United States Patent Application Publication US 2012/0117685 A1 - sequence listing, part 2

SEQ ID NO: 1619 - DNA, 1526 bp, Glycine max
  misc_feature (1)..(1): n is a, c, g, or t
  misc_feature (42)..(42): n is a, c, g, or t
  misc_feature (200)..(200): n is a, c, g, or t
  misc_feature (211)..(211): n is a, c, g, or t
  misc_feature (241)..(241): n is a, c, g, or t
  misc_feature (329)..(329): n is a, c, g, or t
  misc_feature (394)..(394): n is a, c, g, or t
  misc_feature (404)..(404): n is a, c, g, or t
  misc_feature (408)..(408): n is a, c, g, or t
  misc_feature (499)..(499): n is a, c, g, or t
  misc_feature (551)..(551): n is a, c, g, or t
  misc_feature (598)..(598): n is a, c, g, or t
  misc_feature (609)..(609): n is a, c, g, or t
  misc_feature (663)..(663): n is a, c, g, or t
  misc_feature (668)..(668): n is a, c, g, or t
  misc_feature (794)..(794): n is a, c, g, or t
  misc_feature (879)..(879): n is a, c, g, or t
  misc_feature (902)..(902): n is a, c, g, or t
  misc_feature (911)..(911): n is a, c, g, or t
  misc_feature (969)..(969): n is a, c, g, or t
  misc_feature (1429)..(1429): n is a, c, g, or t
  misc_feature (1476)..(1476): n is a, c, g, or t
  misc_feature (1486)..(1486): n is a, c, g, or t
  misc_feature (1501)..(1503): n is a, c, g, or t
  Peptide Sequence Number=SeqID_8561
  Probeset Number=SeqID_11398
ncgcgacggacgcacgacacgtttatctcacctctgcgtgcncagccatcagcacctcgccgactctgagcgccagtatctgcatacgccacctacgcatatctagatgacgacacgatcgtgctcatgcatcattgatcaccacacactcattcacgacatcaggctcgtagtctaagagcatgacgcagtctcagctncatatgatcangcgcgcccacgtacatcacaccagtcccanaaacgtcagactagtgttgatcgccacacgcctatacgcgcaagattctatcgttctcacgtgccagatagtcatcctacagtctcantagctcatgcgagtacaaggcgcgagcactatgtcgcgacacagagctgtggagcggagggtagngctctgcacntgangtctccgcgtagcgtaagtgctcagcacaacacacgcctgcgtgatcagcacatgcgtgagctgtcgcgagacaacagcagactgctcgcntggagaggcagcgtcgtaccgtgtgcagagtgtgtgtagcagtgctaacacnataccgccgcgtcaacaacacaacgtacgcatgcctcgtcagatctncggaactcctngatatgtatcgctatgactcgcacggcgtgaccgagactgcctctcgatcttgnattancctgtatgactgtagcaatcgtagtgtgccgacgtgaagatatgctcgtcagcatgactatctcgacacacgctcgcgtgtgcagccacgagattcacgacttggcgtggctcacatgtcgcgacnatgatgatgactatcgtggcggcggacatggagagagtagtagcgaggagcggagcagatggcgccacggcgaggagagacgcancacgcccgcatatgtactgtgcngcgcagatnagtgatgtctcacgacgcgcccgcccgctaccgtacatgacggactaccgacaagtgncaaatcaatcagcgcagcaatcacacgtccgacacgtcacgcatctcatagtacaactacgcgcatatataatggcccctgcatatatataggtaatcaagtacatatatagattgtagatgcaagcataagtaatgctgagcgatatgagtattagttatttgtagtggtatgtctggtattacttcgctcgtgcgcaggtactagcgcgcatggatattattttatatattatggtcgtaagaggcatataggtgcaagtatatagatatcctaggagtctacagaacatatacacgactgaccgagctacagtacatatgagccatcgtcgcgtgcgctgccctgtgtcacactatcgtgctcttcattgctcactctcatctatacttgggtgtctgtagttattgtagtatgctgagagtcgagaagtatgagtgtatctgggcgtagacgacancaccagtacagtacactatcgccgacagcaatacagaacctacaacnctatgatacnacaacacacagcgcnnnccccccacaaccccacaccaaaa

SEQ ID NO: 1620 - DNA, 588 bp, Glycine max
  Probeset Number=SeqID_11399
ccacgcgtccgcagagatgggcagagcttctctgattccagatggctggatgccttgtcggccatctttgtccttttaagggaacggtgaaaaccttggacgcaaaaccatggctgaagaagattcatgaagctggacccataattcccgtgagtaacaacgctgactctctatcttcccccgagacatgctcccagcgaaagggttcgtgctcggctggacgatgagaggccgcaaccagcgcatcgaggatatagggctgatagaaagggtggaggaatatcctcagggcaaggggcaaggtgaggttttgagatgagaggtcagaaatctcgatctggacctgacgttaagaaagcttacgaaggtggacatatgccgctttataggcgaatacccaaactcagatgaattgcaggaggtatgcatgcggcattgcccaaatatgtccatgaacttctgagagacatagatgatgctcaatttaaggaatgaggatacgcgtatctagagtgactgaaggcgactggtgagattaatccatcacgaagagaaaggagacttcctttgaagatcttgggtgaagga

SEQ ID NO: 1621 - DNA, 462 bp, Glycine max
  misc_feature (415)..(415): n is a, c, g, or t
  misc_feature (432)..(432): n is a, c, g, or t
  Peptide Sequence Number=SeqID_8632
  Probeset Number=SeqID_11400
gtcgcatcttggtggactccggccagcgaggggaagagaagcagccgccgtcgtctcgatctcgggatctctcgtcgccggcgcgcgtggggaggggagctgcggaggggtggttgcgagggaagtgtggtggtggtgtaggaggaggaggaggaggatgagcgagagcgagcagaggccggtgccgaggcgggagagcccgtggggcttgccggagggggacaagcggcagcccaaggcgcaccgctgcaacgaccgcgtcgaggatgtcgtccaggctgcctttgaagggaatccattcaagacagttccaggcccattcaaggtcttttggcaatgcatgcgctcgaaacctggggaggaaccaactgtaccatttacttacctgcagctggatcctccgaagagggtagangccaagctagagtaaanagcacctaaatccttctgaagtgtgcgtgg

SEQ ID NO: 1622 - DNA, 908 bp, Glycine max
  misc_feature (335)..(335): n is a, c, g, or t
  misc_feature (601)..(908): n is a, c, g, or t
  Peptide Sequence Number=SeqID_8633
  Probeset Number=SeqID_11401
cctgcaattcctagaatgtttccaaatatgtttccactggttataagtcagagaaagtcacaaacagaaggctgattgcagtcatgaaattgtctcttgacaagtctgcccaaggagaaagaatttctgacctaagcaagaatggccatattgcttcctacaggttaatgactttgtgtgcttatcacacattgcttatgttagtgaacaaaggttgttgatggaaaaaaaaatccttagaagcttgaatattactttacacgttccacacccccatggttctacttgccttttttttttcccccccctccccccgggggggggggaggaacttncacccctctcttttctttcttttgttcgcgcttttccttcttcaaccaccccctaccccgatcttttttttttgggccctcctctccatccctccctctctggtgtcatcagcggggtcccccccgccccctcacaatcaaccaccttctcttcgcccgtcactctttctccccctctcacagtccgccctcccccttcagccccccccctccccctctcgcgcgccataacgcccccgcactcacctatgtgtcgtctccccccnnnnnnnnnnnnnnnnnnnnnnnnnnnnnnnnnnnnnnnnnnnnnnnnnnnnnnnnnnnnnnnnnnnnnnnnnnnnnnnnnnnnnnnnnnnnnnnnnnnnnnnnnnnnnnnnnnnnnnnnnnnnnnnnnnnnnnnnnnnnnnnnnnnnnnnnnnnnnnnnnnnnnnnnnnnnnnnnnnnnnnnnnnnnnnnnnnnnnnnnnnnnnnnnnnnnnnnnnnnnnnnnnnnnnnnnnnnnnnnnnnnnnnnnnnnnnnnnnnnnnnnnnnnnnnnnnnnnnnnnnnnnnnnnnnnnnnnnnnnnnnnnnnnn

SEQ ID NO: 1623 - DNA, 458 bp, Glycine max
  Probeset Number=SeqID_11402
gcacgagggggaagttgttgagaagtaaattggaacggatagaactgggtctcttgaatacctaggtgaaggagagggagaattgaggggaaaaggtgccagctgtgatggtggctatggagggtagggctcttggttggtttagaaggtgggaatcttgctcaccattctttcatggaagggtttctaaatagcagtaatgaggccatttcagccttccatgaatagaaactcgtgcattgctgctgggtttgaagctgactatcacagtggagtatttcagggagtgattcaagttgtatgctgacctgctggggtgcaccgaacttattattttttgcatcttctggtgaactgaaattcatgtgaattcttgatctgcagtacacttctgttctttagctcatcgttactactgaagatattgttttttgcataaagattatcacttttttctc

SEQ ID NO: 1624 - DNA, 704 bp, Glycine max
  misc_feature (1)..(12): n is a, c, g, or t
  Peptide Sequence Number=SeqID_8634
  Probeset Number=SeqID_11403
nnnnnnnnnnnntgtgtcgtggtacttgtgtggtcatggttgaaggtgcagtttagggttttgcaatgaagatgatgaccacacaagtgccaccacacagtgtccaagtccacacaacaacacaccgctacgaagccggcgtcgtcccccccggagcccgtttcgaaccgccgcgtcacgaagccggcgtcaaggcgccctcttccatttaccattccgagagaggtccgacgacctcccacgtcctcgccgccctcgccggtcttccggacggaggcatcctcctgctcctgtcaggactgacactggctggaactctcaccgggctggtggtggcaacaccgatcttcatcatcttcagtccggtgctgattccagacacggtctctattggcctgaacgtggccggagtcatgaagactgcacaatatgctatgactgcgctgctttcatccacgttgattgtgttatacatcaagaagacgcaaacggagacggagaaaatggcagctgatggtaattatcatctcgatgaagtcattcatcacttggtgataaaaaccaaaaaagtagggggcagcacccacgaaggagcgcaggatattcacaacagcgtagaacatacaaggcaattaattgcaacaacatcaatacattccatgggagcaccctgcacaaatgcaagggatgcaaagccggaggcg

SEQ ID NO: 1625 - DNA, 686 bp, Glycine max
  Peptide Sequence Number=SeqID_8635
  Probeset Number=SeqID_11404
gtgagcaccaataattttgaacgtgccatcggttagtagcataccaaaaatccatgcaacgctgcttcccttcccggagcacccggcggcaggcgcctcatcacggcggcggcgtgaccgtcgtgtcctgcggcgagggcgagggcggcgtcaagatcgtcgtgagcagggacgagctggagcgcatcgccgcgggcgtcagccggaggcagtgccggcaccggcacgtcgtggtgccgtcggcgcccgggcctccggtggaggaggagcagtcggcgcgtgagggggggcgtgatcggctactgcggcgatggccggagtcggagggtggcgccgccgtgcggcgcggcgattggcggcctgagctgggcggcataccggaggaagggtagaccgcatgagaaggatcggttgtttccgcgaagcgctgctggcctgcgctcctgatcgatgcgcgttcgtcttatgtttggtgcgttgtgtggcttaatcatcttgagaacaagatgctgaggtttctgccgaactttactttcaagtttgtgttctcgtaatattctttcatcagaagcaaaaaataaaaggagcagaaaaaatcaatgactatgtacccgggctcacattacagatttcgcgcaaacaacagttgttatgttagtagggatgcaagtaaacccgcttcatgt

SEQ ID NO: 1626 - DNA, 529 bp, Glycine max
  misc_feature (223)..(223): n is a, c, g, or t
  misc_feature (254)..(254): n is a, c, g, or t
  misc_feature (263)..(263): n is a, c, g, or t
  misc_feature (266)..(266): n is a, c, g, or t
  misc_feature (282)..(282): n is a, c, g, or t
  misc_feature (290)..(290): n is a, c, g, or t
  misc_feature (299)..(299): n is a, c, g, or t
  misc_feature (301)..(302): n is a, c, g, or t
  misc_feature (307)..(307): n is a, c, g, or t
  misc_feature (317)..(317): n is a, c, g, or t
  misc_feature (320)..(321): n is a, c, g, or t
  misc_feature (331)..(331): n is a, c, g, or t
  misc_feature (335)..(336): n is a, c, g, or t
  misc_feature (344)..(344): n is a, c, g, or t
  misc_feature (346)..(346): n is a, c, g, or t
  misc_feature (352)..(353): n is a, c, g, or t
  misc_feature (356)..(356): n is a, c, g, or t
  misc_feature (358)..(358): n is a, c, g, or t
  misc_feature (363)..(365): n is a, c, g, or t
  misc_feature (368)..(369): n is a, c, g, or t
  misc_feature (374)..(374): n is a, c, g, or t
  misc_feature (378)..(378): n is a, c, g, or t
  misc_feature (388)..(389): n is a, c, g, or t
  misc_feature (391)..(391): n is a, c, g, or t
  misc_feature (401)..(401): n is a, c, g, or t
  misc_feature (412)..(412): n is a, c, g, or t
  misc_feature (417)..(420): n is a, c, g, or t
  misc_feature (423)..(424): n is a, c, g, or t
  misc_feature (426)..(427): n is a, c, g, or t
  misc_feature (432)..(432): n is a, c, g, or t
  misc_feature (446)..(446): n is a, c, g, or t
  misc_feature (449)..(449): n is a, c, g, or t
  misc_feature (462)..(462): n is a, c, g, or t
  misc_feature (464)..(464): n is a, c, g, or t
  misc_feature (470)..(470): n is a, c, g, or t
  misc_feature (472)..(472): n is a, c, g, or t
  misc_feature (477)..(477): n is a, c, g, or t
  misc_feature (480)..(483): n is a, c, g, or t
  misc_feature (490)..(490): n is a, c, g, or t
  misc_feature (494)..(495): n is a, c, g, or t
  misc_feature (500)..(502): n is a, c, g, or t
  misc_feature (504)..(504): n is a, c, g, or t
  misc_feature (508)..(508): n is a, c, g, or t
  misc_feature (511)..(511): n is a, c, g, or t
  misc_feature (516)..(516): n is a, c, g, or t
  misc_feature (519)..(520): n is a, c, g, or t
  misc_feature (522)..(525): n is a, c, g, or t
  Peptide Sequence Number=SeqID_8636
  Probeset Number=SeqID_11405
gttgttctctctctagggtcttttcatattcggcggtggtgctctcgtcttctcggtttcgaaatggcgaagagaacgaagaaggtaggaatcgtcggcaagtacggaactcgttatggagcgagtatcaggaagcagattaagaagatggaggtcagccagcacagcaagtacttctgtgagttctgcggcaagtacggagtgaagcgaaacgcagttgggnatctggggatgcaaggattgtggcaaggtcnaaggcccgntgntgcttacccccatgangggggggnggggcccgnanntggtnagaagcacanccnncgcggtttgngctnncataaccnangcgttnncancnttccnnnccnntgctnccgnccatcccctnncnggcctcaacnaaccacgactntcccnnnnccnntnncccancctgtccctacctncangaaggatgtagantncctgcncnttganaannnngcgcccntcanntacgnnngncgcnccnggccnctnncnnnnttag

SEQ ID NO: 1627 - DNA, 1449 bp, Glycine max
  misc_feature (1)..(1): n is a, c, g, or t
  misc_feature (109)..(109): n is a, c, g, or t
  misc_feature (141)..(141): n is a, c, g, or t
  misc_feature (220)..(220): n is a, c, g, or t
  misc_feature (286)..(286): n is a, c, g, or t
  misc_feature (293)..(293): n is a, c, g, or t
  misc_feature (298)..(298): n is a, c, g, or t
  misc_feature (307)..(307): n is a, c, g, or t
  misc_feature (338)..(338): n is a, c, g, or t
  misc_feature (367)..(367): n is a, c, g, or t
  misc_feature (379)..(379): n is a, c, g, or t
  misc_feature (407)..(407): n is a, c, g, or t
  misc_feature (419)..(419): n is a, c, g, or t
  misc_feature (429)..(429): n is a, c, g, or t
  misc_feature (454)..(454): n is a, c, g, or t
  Peptide Sequence Number=SeqID_8637
  Probeset Number=SeqID_11406
ntatttcatcgcgtgacgtgcctgtagtcgcggtttattcctattttctctcacgacctatgcgctggatagtatggtgtgtcatatcgacattcgacatgtctctatnactgctcgaggccgtctatttgcctatgagcngctgctcgccagtctgcgcgcgtatccattctcactctctcagctctctatcttaggatcaagtaaatacgattatgtntcttcgactcgccctccttcggggccgcgcgacgctcgcgtcttcgctgaactcccacgacgacangcccatntctangagcctctntcgagtcgtcgcgtcctcgtatgcgtctgtntgcttgcgtcttgtagccgagaggctatngtgccttatatnttactgccgatagtgtcgcgtgctgcgnatattctcgcgnctcgtgttcnctgctctattgctgcgcgaggtctnagagctatcatgtagtctttcctagctgtgagttgctcgtttctcagtgtatatgtgcttcggtgtgcctctgtagatcgcttcgcttgctgtccaatcggtcctgactgatcgcttgtcacagtgttgtctgtatgttgttgtcactgacgaattttcacgctgtgtgtttgcttattgcgcctcgcactcgagatgctcgccacactgtgatatggtgagcatctttgggctcccgccgagtgtgtcccacctctttgacggtgttcttcggcggtcgaaccactctccgttttcttatttctgtgtacactcgtctattgtccgcgcgcgcgcgcggcaagtgattcttctggctctctcacgggtataggtcgctcatcttcattctgtgcgcggagaaccacatgtgtagtagtgttcgagtttgctctttcgtaattaacgaccacccctcaaccctttatatcgactaattgtatagagaggttaatgtccacctgtcctgatcacggttattcatgttatgggttttatttcggttggatgcgaaggtcccctctctctccacgtgctagaggtaaaggaaacccgaagactcgctcgcggtttccccttatctctcctgctgatggtccgaactgttcccgtttatatttatacgttccagaaattcgtttcctgcccgcctcccttatgggaagcggcaagtacgtccaacactccattcatattggtagcttctatccaaggctgaacgcctcccctcttggaaccttctgtgcggggaggaaataaacaggaattaaataagaagaaaccaaacaataagtaaaattgtaaattaaacaaatataaataagtaattccctgcagcccccggcgggataccacttagttgctagaggcggccgccccatccgccggtggagctcccagcttttgaacatgtcttctcccacgcagcctcgggggagacaagtcaccaaaaaccc

SEQ ID NO: 1628 - DNA, 1916 bp, Glycine max
  misc_feature (18)..(18): n is a, c, g, or t
  misc_feature (32)..(32): n is a, c, g, or t
  misc_feature (77)..(77): n is a, c, g, or t
  misc_feature (99)..(99): n is a, c, g, or t
  misc_feature (141)..(141): n is a, c, g, or t
  misc_feature (163)..(163): n is a, c, g, or t
  misc_feature (387)..(387): n is a, c, g, or t
  misc_feature (557)..(557): n is a, c, g, or t
  misc_feature (1281)..(1281): n is a, c, g, or t
  misc_feature (1287)..(1287): n is a, c, g, or t
  misc_feature (1321)..(1321): n is a, c, g, or t
  misc_feature (1391)..(1391): n is a, c, g, or t
  misc_feature (1398)..(1398): n is a, c, g, or t
  misc_feature (1408)..(1408): n is a, c, g, or t
  misc_feature (1471)..(1471): n is a, c, g, or t
  misc_feature (1476)..(1476): n is a, c, g, or t
  misc_feature (1490)..(1490): n is a, c, g, or t
  misc_feature (1508)..(1508): n is a, c, g, or t
  misc_feature (1525)..(1525): n is a, c, g, or t
  misc_feature (1586)..(1586): n is a, c, g, or t
  misc_feature (1599)..(1599): n is a, c, g, or t
  misc_feature (1648)..(1648): n is a, c, g, or t
  misc_feature (1657)..(1657): n is a, c, g, or t
  misc_feature (1673)..(1673): n is a, c, g, or t
  misc_feature (1688)..(1688): n is a, c, g, or t
  misc_feature (1690)..(1690): n is a, c, g, or t
  misc_feature (1741)..(1741): n is a, c, g, or t
  misc_feature (1764)..(1764): n is a, c, g, or t
  misc_feature (1838)..(1838): n is a, c, g, or t
  misc_feature (1891)..(1891): n is a, c, g, or t
  misc_feature (1916)..(1916): n is a, c, g, or t
  Probeset Number=SeqID_11407
agtggtggagtgagccgnatcactgacgacancagtgctgtggcgatgagcttgtgtgtttatatgttggcaggtgnctgtgcggtgcgggacgcgatnctacacattgattaagctggaaagctcgcgtaattctgacgncggccagggcggtacagcaaanatacctctcattctatcattcataccgccaccggccacgcgaccgagtaatactagtcatacctagtggcacgatgggagacctgagtccaacatatctgaggcatgacaaaatgtcaaccgcaaataaataatgcgagagaagggacaacataaggagaaagaggagacaaatgcaatacatgacatcgcatcaccaacctacgaataacgactaagactctnacttagacattataagcagagaacagcaccgcgatcgcggccgaagatctagtctctgtgccatgagatcagtccgcgaacgtgaagtggtgaatgttggatagcaggcaggtgtgggatgcgcttactctagggggatgcgtatgcggagtgtctcgacactatcgatnctgcgatactaacaatgaatagcggaggctatacatatatattctggtatagatcaggagcgtgagcgcgacgagcgtgaatcaagtgtcatgctagtagatggcacactctgaaactcactatacactacatgtcattatgatcaatcgagacgtcgcacaaaaggacattagtacaacgcacaatcgattgcgcgaaacgctaacgagcgagcaataactaagaggggtaagagcacagagcgcgtggcgaggaagtgatgcgagtagaaaggtgttctcatgtccgattatatacatcgatctcacgcaatgacagacatgcacatcttctcatatattcacatatgacatacataagtcgaataccgcacactaagtcattattacaatcacaccggtacgactggacccacagacgtaagagacttctgaaatcgctggataagaccgactactgaacacgcggagatactagtattaacattatattgaaaagcaaagacacatactggagtgagaggagaaacaacagagcgaggtgcagacgcacgaacactactgctataatagtactgcagcgaccctctctatgtgcatgcaggtgtattatatacgataacgagttataactaatcgagacatctgcacagcatcgacatcacatgcacgtctgttcatgtatgtcatgatgtatgagaatctaatgatctgtacgacagantaatgncacagatgtaactgataataaacgtcacagacgntgagcagtagcgtgcacacgacgcgtgtaatgagatctgagtagagctatcaatgagtgatgtactgtanacagcanacgtcagtancttactgcactgcgttacgcatagacatagacgcagaactgacgagatgtaggaagtagaatngaaantcatgtccgatagntatacactctcaatggtngtcaagatgtatgcgangcccaagatagaacacatagatgagcgacgacacgcagatacatgtgagtcaaagatcgangaacagatctgtntacggtagcatgtagatacacatgtgtgctgcgtacatatagtccatancttatatcntgacgctatacgatanaagcgcaacttatanantatagctgtgcgtgatgacatacgtatatagactattgatgctaacgttanagaaacgaagcagatgatatgcngatacgcacataatgcagtagaagtctcgaatcaacaatgatgaactatcgactgatcgacgatagtgctctancaacgcgtctcagataacggctactgggcacgggcttcatcgtcgtactatgnattggatctgctatcatgccatggn

SEQ ID NO: 1629 - DNA, 1421 bp, Glycine max
  Peptide Sequence Number=SeqID_8638
  Probeset Number=SeqID_11408
aaatttaactgaaaacaaacaagctgaaaaagtttaaatgtctgttgaagaacttagtccttgcaagtcctcctcaacctccctctctataggcttccttccagaaatctccttattcagcggcaaacgcttaccttctgagtttgaaattccttccccagaagtctctacacctcttcttccccatcaaagaaaaaaacaacccaaatctggcctcataattagacggtctcatcttctctgctcagaatctggtcaagatattgatgaacccaatagcctttgtatccctagagatttggatactgaatctcagggactctctgtcccatcagaacctcaatcccccttatctcctgattttcgagttggcagatgccccaatggagagaatgatggtttcatggagaaggtaaaagaagtcactgaggaagaagaacagagtccaaagtgtttcggtgaagaattttataagcgaattgaggactttttggacttggagagtttgcacatttgtcaaccagagccccctagaagaaatcttttgaacaccctaagagtcaatacagtaagaatgttgtctactggagttagtgaaaacgcatctggaactggaaccgtccactctgagctaaattcccctagtctaatcagtccaagcatccatacttcaaaacttttccaaagaagatcttcctctaaggactttagtgttgaaagtgccccttcaggccaaaaactcgccttgtcaaagtccccattttatagcatgaataaaagagtgcttgatagtgaaaaaaaagaatcctcaggacaagaagaaaatgaagacccaatgactataagtagaaggtcaagtcccagaaaattctttggactggcagctttaaatacaaaattgaaagaatttgcacaagtaagcagccaaaaccattccgaagcttctagtgctactagtatattgatgctggattgttcccctatcaaaatctaaagttactagaaatgacttttaagattatactcagaaatcatgagttgtgttgcaaaccaaaaatttgaaaactttttatcaaagaccttttcattaacagaaggttagtgtctaatgctggattatttcttgtttttatttgatttaactaactaataaaattttttattaacttaaaattcttaataatagtggcactgagagctaaagagctaaaatcctgtatacctgactctttaagttcgagtgccgctttactctataggtttttatttatcctatattaataactagtagttagtataagtaattagatcttgtactagattctataacatgccagtttttatttacaattctgcatgaacatgtgtgtgttattatcctgaacaccataactacgactcaaaattaaatttttctcttt

SEQ ID NO: 1630 - DNA, 859 bp, Glycine max
  Probeset Number=SeqID_11409
ctaatcgaaagatcttagtagcaagacaagtaataaatgagatatcactgaactatcacggttagcaacacgggcttcatcgactatgactaacggcaatggcatggctcggtgatgttggttgtggtgccgtggtggtggtatcatagatggctccggttttgttcatatcttttccacgtcttaacctctcggctccactgtatatctcccatgaaagcatcattggttatcatatcaatggcttatattttggagagattacttgcaaccaaagaaatagtgaactaaaagtacttaaccttctcggctttcccaacaatctccatagtacgggctcgatatgtaatgataacgaggacgcgtcggtggccctcccacagcacagcatatctccggtggattacatagctccggctcatgtggttggtggggatggaggccatagatccggtgtagcacgtcacttctccacatcttaacttcttgtttccattacttaactccaactatagcatcaatggtggctctcaattcccatgacggtgactccgatcaaggatggtgatggtagtgactcatggtggcacacggctaatccccatcgagttatggatcaaacgataggtggtttgtgatgaatggtggcttggcgttgcttctccttctgatggttaaatatttcaagcatctctatcacgacgtccatggtgataaacgatacaacatgaaggttaaggagatggataacgatgatagcacaaggcggtagaacatgatagtggcggctctttcacaatgtggattttttttaaggtttatggaaaggatatatacacgttaatatatattggtttgc

SEQ ID NO: 1631 - DNA, 379 bp, Glycine max
  misc_feature (98)..(100): n is a, c, g, or t
  misc_feature (144)..(144): n is a, c, g, or t
  misc_feature (147)..(147): n is a, c, g, or t
  misc_feature (231)..(231): n is a, c, g, or t
  misc_feature (331)..(331): n is a, c, g, or t
  misc_feature (361)..(361): n is a, c, g, or t
  Peptide Sequence Number=SeqID_8639
  Probeset Number=SeqID_11410
agcttagggtttggtttcagaggaaggaaagaacgaaggaacgaagaacaaatcgaagaggttagatggatcgtgacagtaatgatgatggacgtatnnngttttaggagcctttcttgctaccaagagatttgtaggcttgcngangaggattgtcacttctcatcaattccaagatatccgcttttcgtgagagacgtgtatgatatggtggatgatccttcaactgantcagttgtctcgtggagtgatagtggtaagagcttcatcatttggaaggaatctgagttcctaggagatgtttttcctaggtgcttttcctgcgattacnaagatatgacatccctcaccgcctggtttnatgccatgggatatagta

SEQ ID NO: 1632 - DNA, 593 bp, Glycine max
  misc_feature (333)..(333): n is a, c, g, or t
  misc_feature (337)..(337): n is a, c, g, or t
  misc_feature (352)..(352): n is a, c, g, or t
  misc_feature (361)..(362): n is a, c, g, or t
  misc_feature (364)..(364): n is a, c, g, or t
  misc_feature (367)..(367): n is a, c, g, or t
  misc_feature (551)..(551): n is a, c, g, or t
  Peptide Sequence Number=SeqID_8710
  Probeset Number=SeqID_11411
gctaaacctcggaagagagagaaagagagagacaacgaagaaaagaacctgttcttcaccagaacggagtttggttttataggaaccctcctattcatccatttatcgatccacgtccatccccatctttcttctcctattctctctgttttcttttcttcttctaaaaagtgagagaagaaaaaagggaattgaaggaagaagattgagaaaaaagggggaatgcccagataattaattcggtgaaatttcggattttcgtaagtgggtgtttctcttttcgtgtttttaccttcagtggtggaaggaagggggtttggtttggtgagttgntggncttgatgagcgttgngtgtgtgtnntnctnggacggggtgggtgaggatgagatccacgccaaccatcatcactctggagttttttccacacagcctcgcgatggaggcacttggaacatcaatggtgtggggccccacggtattgcgtccgcaactcagcgccattgagtgctggactgtacgtgtgcgacttagagcaatgagcgttcgatncatcagtgtcacagtggccacaccacttggtccacatgtaaa

SEQ ID NO: 1633 - DNA, 1751 bp, Glycine max
  misc_feature (1)..(1): n is a, c, g, or t
  misc_feature (6)..(6): n is a, c, g, or t
  misc_feature (72)..(72): n is a, c, g, or t
  misc_feature (74)..(74): n is a, c, g, or t
  misc_feature (195)..(195): n is a, c, g, or t
  misc_feature (261)..(263): n is a, c, g, or t
  misc_feature (271)..(271): n is a, c, g, or t
  misc_feature (335)..(335): n is a, c, g, or t
  misc_feature (378)..(378): n is a, c, g, or t
  misc_feature (407)..(407): n is a, c, g, or t
  misc_feature (461)..(461): n is a, c, g, or t
  misc_feature (531)..(531): n is a, c, g, or t
  misc_feature (533)..(533): n is a, c, g, or t
  misc_feature (705)..(708): n is a, c, g, or t
  misc_feature (710)..(711): n is a, c, g, or t
  misc_feature (784)..(784): n is a, c, g, or t
  misc_feature (826)..(826): n is a, c, g, or t
  misc_feature (955)..(955): n is a, c, g, or t
  misc_feature (959)..(959): n is a, c, g, or t
  misc_feature (1025)..(1025): n is a, c, g, or t
  misc_feature (1027)..(1027): n is a, c, g, or t
  misc_feature (1031)..(1031): n is a, c, g, or t
  misc_feature (1044)..(1044): n is a, c, g, or t
  misc_feature (1067)..(1067): n is a, c, g, or t
  misc_feature (1131)..(1131): n is a, c, g, or t
  misc_feature (1163)..(1163): n is a, c, g, or t
  misc_feature (1233)..(1233): n is a, c, g, or t
  misc_feature (1241)..(1241): n is a, c, g, or t
  misc_feature (1296)..(1296): n is a, c, g, or t
  misc_feature (1307)..(1307): n is a, c, g, or t
  misc_feature (1379)..(1379): n is a, c, g, or t
  misc_feature (1391)..(1391): n is a, c, g, or t
  misc_feature (1512)..(1512): n is a, c, g, or t
  misc_feature (1714)..(1714): n is a, c, g, or t
  misc_feature (1741)..(1741): n is a, c, g, or t
  Peptide Sequence Number=SeqID_8711
  Probeset Number=SeqID_11412
naggcngttgtggtagtagttgggtgctgagagcgatatagggatagacgacaactatacgctgtatatcgngnacagtgtgatgaagtgatgtgtaagctgtggtgttactatgagtgtgatagatatacgtatagtgttgtgcgcctatagtgtgtagtgactgcacgaccgactatgtatggtcgagagcgnagcgagtaacgccctcaatagtgtgtgtgtgtcgtagtaggagttgtgatgagtggagagtaggtnnngtaaatangcaagtacgaaatcgtgtgtacgtctgtgagtagacgtgtgtgtataatatatatatggaaatnctcggatagtgagcatgtcagttagtgataactatactattgngtgttgtgccgctcagtacttgtatatgnttgcgtgtatcatatgtatctatgatgtagacagggagtgacgagagcgcaganagattggagtatagtgcgtgtgagtctgatgaggtgtataagatgagacacaatatgtacgtgtatgacnantacgtagagtagtgaggtacgccgtggtgtacttgtagagcgatcacgaagagacgcacagcgggtagaagagatactatacacatgtatagtaggtcttgtatgaatcgtggagtatatcacgcgcgcgtgagtcatagagtggcggtgatgcgtgacaatagagaggagnnnncnntggtgacgtgctatcgtgatattagagtgcagtaaataagtgctgtgtagtgagagagtctcgtagatgtgtntataattgtttaatgagagaaggcatgtagagtagcaaggangagagcatgagttgtctctcagcagtagctgtgcgtcgatattgagtcacatactgcggtcgtgtattgattgtgtaagcatgtaggtgagcgagctatatctacttcatacatatgttatatatttcncgangatacattatagtgcctactacatcagtcgctcctacgctcgtatctcataagtcacatattattncntacnatttagtatcagngaccatgggtggcgctcgtcagnagaatcggtgtgaggatagaaatatggagagagatgtagtaacgatgatctatggtgagtgganaatgatataatgatctgcttgcgcgcgcgggnagtgagatcgaccagggtgtcgtatgagagaaattgagtgattacggttatgtaggattcaccggcgatncatatgtnagacgtcgctgagagactacgacatgagcatagtgacgacatgtagagatatgangaattatagtnggggctctgattagcatatatattccttcctatagcgagactactgcgtgatcgcttgtgttattacgatgnagattgtatggnaacttacggtctaagacctagtgtgagataaatcgctgtgctataaatgcagatggatggagagattatgtgtttagatgtcgttgtatggatgagccatattgtgcgtagtatatttatnacatactgtagcggtgggtcgaatgaatgattagatagtaaagatatatgtacattgtcagtgtactagagcgcgcgggattggtatacacgagcttagtgtagattagcaggccgcgcctctgacctactggggcggtacgagaagtcgtctaagtcttttgtgtatcgtgtagtgggtttgtgtcgttagaagagtaaanagatagtgtatagaatagatgtagtangtatataaaa

SEQ ID NO: 1634 - DNA, 1643 bp, Glycine max
  misc_feature (29)..(29): n is a, c, g, or t
  misc_feature (103)..(103): n is a, c, g, or t
  misc_feature (190)..(190): n is a, c, g, or t
  misc_feature (303)..(303): n is a, c, g, or t
  misc_feature (351)..(351): n is a, c, g, or t
  misc_feature (377)..(377): n is a, c, g, or t
  misc_feature (617)..(617): n is a, c, g, or t
  misc_feature (829)..(829): n is a, c, g, or t
  misc_feature (1474)..(1474): n is a, c, g, or t
  misc_feature (1548)..(1548): n is a, c, g, or t
  Probeset Number=SeqID_11413
ggacgcgcgccgcttcgccgtagccgctnggcacatggtatccatgtatgagcgctctatatcgactatcgtccacccgcgtccgacgatcacatctacactncagactctacacacttgtctctctcctctgatctgattagatacagcagcgccgtgatacgatatctgtacactctcactgcacgtntccagacgtaagacgaatcatatgcagctgacatgtcctcgtagtatagggtatctatctgactcatagagtcgtgatagtcatacgtcacgtgtacactccgacctgcgtantgtcgcagaagctgtagtactgtcgtggtgatgtcggcacagcacganctgccagcaaacgcgaattgtgcgantggggtagctatgctgtacgtgtcggccgtggtcactagactcacgccgctgctgtcgtgacctacatcacaggtgctagcgtacgcttgcgtcgcccacatcgacacgcatctctctcatcgtatctatatccatatagtgatgtgtcgctgtctgtctcgcatactgaccacggcactcagccactcatgacactctgcgtaacacgcagtaacttctgtgcactctccgcactcgtncctcgttatcagttcgatagtcgatcactacacactcgcctcatactccgcacggcactccgaccgtacctcatcagcactgcgacgtgctcacacaacagcatacatatcgcgatatcgcgtgctctcgcctggctatcgatacaatgtagaaagacgagatcatattggcgtgtcaccatagctgccgtccgtgtcggtgctcgtattgnttgatactagtgtgatggtcgttcctggtcttcgcgtgagcctgatgtcgacgctcactcggtagctcctgtcggccgacgctctgccgcgcaccagtctgtcgcgtgtctatccttccgtgttgcgcgttcccacgtaggtgttgtcgttgtcctcgttacgtttctagatgatgtagctacattcggtgtggcacgtgtggagctgacatgctaaacccagctatttcgttgacgttctctcagcgcgctttcacttcccttcatcttcctctccctctctccattccccctcggctcccacatgcctccgtcttctgtctatagaaacgtggtgacggctcgacgacgcgcggaggtggtgcgggtagaggtacgagatagcagatgcgctagacgtaatagatgataggaagacgagatagcgagatctacagacatcacctcacacactaaagattcgtgtcacctcgatggtgcgaagaggcgcgacggcggtgccgcgcgtagagcgcgtgcacgtcatgatatagcaaagggttcggagtattagataagacaacctttacgtacgctcgcagcttcatgtacctcatcacgtacgtctcgtccgcacaccctgatcgtcgtcctccgcgtctgtcngtcttgtcggcgtcgctccatatactcattaaactcctgtatagagttaattgagaaatcctgcgtggcgcctnatgtccgtcctctgccgcgaggtgtcgacacccttgggccgtacgtgtccgctgtttacgactatctcaagtcgtcgtggtgcggtgggcgggcc

SEQ ID NO: 1635 - DNA, 1449 bp, Glycine max
  misc_feature (4)..(4): n is a, c, g, or t
  misc_feature (26)..(26): n is a, c, g, or t
  misc_feature (99)..(99): n is a, c, g, or t
  misc_feature (114)..(114): n is a, c, g, or t
  misc_feature (161)..(161): n is a, c, g, or t
  misc_feature (167)..(167): n is a, c, g, or t
  misc_feature (209)..(209): n is a, c, g, or t
  misc_feature (211)..(211): n is a, c, g, or t
  misc_feature (213)..(213): n is a, c, g, or t
  misc_feature (215)..(215): n is a, c, g, or t
  misc_feature (219)..(219): n is a, c, g, or t
  misc_feature (245)..(247): n is a, c, g, or t
  misc_feature (254)..(255): n is a, c, g, or t
  misc_feature (257)..(258): n is a, c, g, or t
  misc_feature (260)..(260): n is a, c, g, or t
  misc_feature (269)..(269): n is a, c, g, or t
  misc_feature (285)..(285): n is a, c, g, or t
  misc_feature (310)..(312): n is a, c, g, or t
  misc_feature (328)..(328): n is a, c, g, or t
  misc_feature (356)..(356): n is a, c, g, or t
  misc_feature (358)..(363): n is a, c, g, or t
  misc_feature (372)..(372): n is a, c, g, or t
  misc_feature (397)..(404): n is a, c, g, or t
  misc_feature (407)..(407): n is a, c, g, or t
  misc_feature (413)..(414): n is a, c, g, or t
  misc_feature (421)..(423): n is a, c, g, or t
  misc_feature (425)..(428): n is a, c, g, or t
  misc_feature (434)..(445): n is a, c, g, or t
  misc_feature (447)..(452): n is a, c, g, or t
  misc_feature (454)..(455): n is a, c, g, or t
  misc_feature (457)..(457): n is a, c, g, or t
  misc_feature (460)..(462): n is a, c, g, or t
  misc_feature (624)..(624): n is a, c, g, or t
  misc_feature (905)..(905): n is a, c, g, or t
  misc_feature (1410)..(1410): n is a, c, g, or t
  misc_feature (1424)..(1425): n is a, c, g, or t
  misc_feature (1430)..(1430): n is a, c, g, or t
  Peptide Sequence Number=SeqID_8712
  Probeset Number=SeqID_11414
cgangttcaggaaaccacaggggcgngcgccccgcggcttctgtcgtctgccacactctcctacctgctcaccctctttcctagaatatacacaagcanaatctcacatcagantcccgctccacgaccgcggaaggagcgtgcctcgtcatcttcatcgngatatnaaaaaaatatggttagcttctctcctgtgcgtactctagggngngngncccncccctctatacctagtcccttttgcnnnccttaannannanaaacccganagaggagaggagagancaggtggccagatacaacgtggagnnnggaaggtgggagtggngggaggggcgggcgctccagggagccangnnnnnnctcctatanactagattgtgtataggctaagtgnnnnnnnnganagaggnnccctggnnngnnnncttggnnnnnnnnnnnngnnnnnngnngnggnnnggggaacggagcgttctctgcgacaagaacgaagaatgagtactcattcaattacgagatgttagccgcatctgatagatgcatcgtcagccccgtggttcccgggggaggggtgccgcccaacgctttgtactgcttttgatagtcgagatgagtgtggtnttatcatgatgcgcctagagtgtccgcggcgcgagaagcgactggcgggcatgttcgtgtcggcgcgagcaccggatggtgtggacaggtggagtgcgtatgtacggtgaagagacgttgtatagtctcagcgtcacgctcgtgagactttgtcgtgttgtttgtggcaagtgaacaagagtgttggtgttatgatatgatataatatttattaacaagtaatttatcgagatgattattcacatcttatatattattgtaatatgaagctggtatatgtntgtggtttctgctgtgtgttgtggtcgggtcgtttctagggtggtgctcttttggatgagtgctctcgtggtgtctggtattctgtgctcttggtgtatatcgggggcgcagaggcaggacacgcggttcgcgcgtcgcaccagcttctgccgcatatcggccaggctaacgtcggatcctcgtgtgacgagatccatcttctactcgactcatagataaatgggttgcgataaattaaatactaatattaataatctaattacacggccgacgactaacgacattaactatattaatcatcgcagcatcgacaacacagaaacaccaaacagaccagctcaacacataaccacaaaggagaaacgaaagcctatacaacgcgaacttctatacagcgaatagcgtatgtatgccatgtgtcgtgggtataagcgatcaatccttaccataatatcaaaataccaccaaaccttactcccatacatggcggggcgggggggcggngtcggggggggggnnggggnggggtggggggaaaaaaaa

SEQ ID NO: 1636 - DNA, 1656 bp, Glycine max
  misc_feature (46)..(47): n is a, c, g, or t
  misc_feature (60)..(62): n is a, c, g, or t
  misc_feature (68)..(68): n is a, c, g, or t
  misc_feature (73)..(73): n is a, c, g, or t
  misc_feature (76)..(76): n is a, c, g, or t
  misc_feature (84)..(84): n is a, c, g, or t
  misc_feature (93)..(93): n is a, c, g, or t
  misc_feature (97)..(98): n is a, c, g, or t
  misc_feature (109)..(109): n is a, c, g, or t
  misc_feature (145)..(145): n is a, c, g, or t
  misc_feature (186)..(186): n is a, c, g, or t
  misc_feature (201)..(201): n is a, c, g, or t
  misc_feature (263)..(264): n is a, c, g, or t
  misc_feature (403)..(403): n is a, c, g, or t
  misc_feature (427)..(427): n is a, c, g, or t
  misc_feature (530)..(530): n is a, c, g, or t
  misc_feature (565)..(566): n is a, c, g, or t
  misc_feature (569)..(569): n is a, c, g, or t
  misc_feature (766)..(766): n is a, c, g, or t
  misc_feature (792)..(792): n is a, c, g, or t
  misc_feature (849)..(849): n is a, c, g, or t
  misc_feature (852)..(852): n is a, c, g, or t
  misc_feature (870)..(870): n is a, c, g, or t
  misc_feature (872)..(872): n is a, c, g, or t
  misc_feature (883)..(883): n is a, c, g, or t
  misc_feature (891)..(891): n is a, c, g, or t
  misc_feature (928)..(928): n is a, c, g, or t
  misc_feature (937)..(937): n is a, c, g, or t
  misc_feature (977)..(977): n is a, c, g, or t
  misc_feature (1031)..(1031): n is a, c, g, or t
  misc_feature (1050)..(1050): n is a, c, g, or t
  misc_feature (1079)..(1079): n is a, c, g, or t
  misc_feature (1105)..(1105): n is a, c, g, or t
  misc_feature (1188)..(1188): n is a, c, g, or t
  misc_feature (1358)..(1358): n is a, c, g, or t
  misc_feature (1397)..(1397): n is a, c, g, or t
  misc_feature (1447)..(1447): n is a, c, g, or t
  misc_feature (1457)..(1457): n is a, c, g, or t
  misc_feature (1530)..(1530): n is a, c, g, or t
  misc_feature (1536)..(1536): n is a, c, g, or t
  misc_feature (1656)..(1656): n is a, c, g, or t
  Probeset Number=SeqID_11415
ttttgttgttttggttgttttgtccccccctctccctccctcttcnncccttgccctctnnntttttntcttntgnccggttgnggcgcgcgngcgnnccccacaccanccactcctgcatgcaggcgggcgcggcgcgcgcatncggatgtataggctatgacgtctagcggacccgcgcgcgcnccgagaagaaaacgncataaaagatcatctcatccttctttcgtagtggtggtgagaacatcgacggctctgccacnntgtagacgctacacaagcgacgccgcgagcgccctgatggagacgcgtctgcgcgactccgcgcaagaacgctctagaggtctctagccgcgtcaaacaacgtctaccacaacacaaagatgaccactatagccaagcngtcgcagaaaacgtgagacttctncatcacagtcatcgcgcctgcgggagtgtactggcgatgtatatggacgatgtcgaggtgaagtagttctgtactgtcacctgcgcggcgcacggcgcgtggntgaatgaatccggctgctctgccgcgcgagtcctnntgncgtgtttcgtgcgataagatatgtgtcaaacacaccgatattatctcatatatatgattcatattatacgtgttatcacagacaacatcacacatcgctattattagatatatcacatgtagacacacatataccctacacacgacgcggtgatgtattaagtatggagaatataatacgtatactacaacactatnttaaaacaccacgtgaagatgcgcancaccacacttcaacaactacctctcttcgctgtcacgtgcctcacttctatatcatnatnacgatgatagacgcatgnanagatcatcccnctcacgcntctaccacgtctattgatatgtagaagaattgtagtntgtagagancccccccacgtggaaaaacactaacacacacacatacgcngacacgctgatgcacgatctcatgacggaggtagatatgtagatgtatgccganctatatgatccaaaatagnaaaaaaaaaatctagtaacatgacgatgntcgtaatggtagccaacagccagaanacattgctatgaagatatgaaattagactgtgtccgtctgtctaccactcacacttgccgtagtaacattcttactgcacagncaccatgctacgaaactcattctatatcagaagcgcagactcacgtgtctctaccacgtgtctctatctctctgactgagaacctattcatcaatctcattgcttcttgtctatggcagtgagctgtggctcgtacgttttgtctgctagcgctctcccgacatatgtgncacactcgcatgcagtgcagtattatatgatcgcgtccnacgcgtctacgcctatctgagcaactaacatcgtgacgagtgtgcctatntctatactancaccatgctctctcacactgtatatatgtgagaagttgaatgatgatgtgtgtcgacgtcccgtcacttattntgtacngcgttatacgagactacactgacatattctactgagagcaaacatatatatagtacacgactagcaagatgaacactaagaaaacgcgaagcagacgcacgagcaagcgcactgtaaatn

SEQ ID NO: 1637 - DNA, 1359 bp, Glycine max
  misc_feature (269)..(269): n is a, c, g, or t
  misc_feature (442)..(442): n is a, c, g, or t
  misc_feature (484)..(484): n is a, c, g, or t
  misc_feature (1032)..(1032): n is a, c, g, or t
  misc_feature (1036)..(1036): n is a, c, g, or t
  misc_feature (1076)..(1076): n is a, c, g, or t
  misc_feature (1174)..(1174): n is a, c, g, or t
  misc_feature (1266)..(1268): n is a, c, g, or t
  misc_feature (1272)..(1273): n is a, c, g, or t
  misc_feature (1319)..(1319): n is a, c, g, or t
  Peptide Sequence Number=SeqID_8713
  Probeset Number=SeqID_11416
ggccgccgcccgtcctgtcccatcttttatctcactcctctgcgctatacactacctgttactatgaggtgtagtgacaaatcgttaatgctccaacaaagattcgactcgatgtctatcaatatacctacacaccacgagcactttatccgtcactccacaacacaccctagataagtcataatttgtgtcatctgatctacgtctcttccctacgatacacgcgccgaagcattcgtacgtatttatatacgtacgacgagagccgntccctagtagttagcggcctcacatgccacctcaccggcacgaacacccctaaaccacacactccgtccgacatcactctctgcatcatgtgagcccattcacttttatcatatgattccactaatctcatcatataacactatacactactctcactcatatctttatactnttcctcgtatcttcgatttccgtctcgcatcatctatatatnttttagtgtctatctcttcccactattttttcacttaacaatttattgcgtgcgccggcggtgtctctctatctctcctttatgcccctttggcttcatatcggtttactttgttacctctcaataatatcaacccatacatctaccacaacactattaccttagcaaacactcccctcatcacaacccacaaccatcacactgatcccaatcaccttcactccacctcacacatcctcctatctacattatcctggcacaacatccccacacacacattattaagaagactaatattaatacatctgctacacagctccctctcactcaatcctctcccatacctatctcccccactatacatcatccacaccaatttaatattttgtttgttgtcttgtttattgtttttctgtcttctcccgtctctcttttttctcctttttttgtctgcttctccccccgtgcactcctgtcagaaccgtcacacacccaacgcacacaccacataaacacccccccactcagcaccccagcacaacctcaancccnaactaccccgcccctaacgaacactaaaaagaaacaaaantatatccatacaatatcatttatattttatatttgtataagtaaacgcactctacccttcattttctcattttttcttttttctctttctcgattttntacctgtgtggtcttaggttggttatatttcccgcaccacccacacacaactccatattgtaatccattcaagcgttttttttgttcggggnnngggnngggggtgtgggggcttctcatggtcctacccaccgccttgccaagngggcacacaacacaaccaacacaccacacacaaacaaaac

SEQ ID NO: 1638 - DNA, 325 bp, Glycine max
  Probeset Number=SeqID_11417
tattggctgggccgatggtagaagatgggctgacgtaatcaagccatgctgtgtcaacactgaccccattttttccaatacctagctcacctgaaccgatgtgggttaccctggaggcctttggatagacgcccttgtatggtgaaccggttctgctcagacgatcaaggacttgagagctatggaaatcaaaaatggctcactggccatgcatgctatcatgggtgcatggtctcagaacatctacactgactgcggtcctattgacgacgtctttgcctaccttgcagatgctgcccatgctgccatgtatgctgctttcaca

SEQ ID NO: 1639 - DNA, 711 bp, Glycine max
  misc_feature (1)..(82): n is a, c, g, or t
  misc_feature (296)..(296): n is a, c, g, or t
  misc_feature (683)..(711): n is a, c, g, or t
  Peptide Sequence Number=SeqID_8714
  Probeset Number=SeqID_11418
nnnnnnnnnnnnnnnnnnnnnnnnnnnnnnnnnnnnnnnnnnnnnnnnnnnnnnnnnnnnnnnnnnnnnnnnnnnnnnnnnnatcagacccaagaaaagggcattcaggtggcgctttgggcatgaaggtcccgacattggtgtcgatgcccaaggagtggctctgagcccacaggcctggtcagccgcccgcggccgaaggagcatggacctcattcgagctgggtaatcttggtgcatgggagaggagctaatttgtctctgccggatgccgggctgagcaagcgggcgccganagcggcgcgggcgcgggccgaggggggatgtggactggctgatgggcggagcgccccgtcaaggtcataaccttgtatcagcattcccttcaagatcacaacggccatcatcttcgaatacgtaaaatgccaaagattgtttgaggtttcttgcactcatttatgattgtatgagctcttatgctgagttacttttggttgtgtttatttgaggtactggtgtggtagttaaattagtttgtagctgtccataagtaaacagcgtagctgcttaattaggaggtctgaaatgatgaaatagtttgtattgttattgcagaaggtaggttttattcagtatttcattctattgcaatggctgaatttaatgctcatccgcttagtacnnnnnnnnnnnnnnnnnnnnnnnnnnnnn

SEQ ID NO: 1640 - DNA, 554 bp, Glycine max
  Probeset Number=SeqID_11419
aagtcagctgatgttgcaagcagggttcagagccagctaaggctagtgattaggcacatgtatcaaagtcgtcccattcatggtgcatcctttgtgggtgccattctcaaggactggaatctgttccagtgctggaatattgagtttaaggtaatgtttgtttgcatgatcagtatgcgccaagttcttttccatgctttatgtttcaaaggcactccaggggatggaagtctcattatcatgcagattgcaatgttttctttatgtggattgaattcggaacaagtttccttcatgcatatagagttctatatacacatgacgtctcatggtagaattagcatggttggtctcagttcagactttgtcccacttgttgtggattcgatacatgcacctgtaaccccagttgtctataacatgttgacgacagttttcaccatgttccctagtcccgataggaggacttgccatctgttttgtttaatcattgcctacgtcctctatgcatacgttttatttgatgtgacatttttaaaggaagtttttctgcc

SEQ ID NO: 1641 - DNA, 1622 bp, Glycine max
  misc_feature (201)..(201): n is a, c, g, or t
  misc_feature (606)..(606): n is a, c, g, or t
  misc_feature (681)..(681): n is a, c, g, or t
  misc_feature (1286)..(1286): n is a, c, g, or t
  misc_feature (1457)..(1457): n is a, c, g, or t
  Peptide Sequence Number=SeqID_8715
  Probeset Number=SeqID_11420
tatatgccccaccatagatacggtcgaaacgtgttagcgaccgttggcatatttttgaccacccgtgtatccctctctctcgccttgttacttgaccttttttagtgcccctattcgccctatctttatctccatcatctcttacttgtttccgccgctcccccgcctcttttgtattagagagattatgtgggacgcgtnaagccccgcaccacccgcatcttttccctcttattattcccccacaccgtgtcatccaccataaattcgcggcgtacaataactctaacaccgcaacgctataataataaaatagcgaaccaccgaacggatacatctatttattactccattcacattatttattaatatcacacaatccacgccccgtatctctctatatatattcccgacgcgctttattatattttaatatatctgtaactcgcgcccttttttataatgccggcgtgttcggcacgccgccgcctccgccccccttgaacaaaagacgaacaaatggaaattacaagtatcctcacgcggtggtaattttcaaccccgctaatcctgcccgcgcccgccgcgtgaagtaaatgatatatnagaactcttgcgtataaacagaccgcatagaggtcgccgcactatacgtatccttctcgttgtttttctcccgcncgccatattatatatttcgcccgctatagtggaataaacagcgcccgccgcccgcggatgataaaaacaaccccctcgcgcgtcgcgctagataataaataacgcggccttgtaaacgcacattaccaaacgtcgtctgaagctataaccgcctccgcgaccgtaataaatacgataaaacgggcccgggcgtggcacacacgacgcgaatttatatagaagcaccacgtgtgttcagtcctctcattcacgctagttgtgtgagcacattaaggccctgtctcgcagtcttccacagaacacgtggttttattcgcccacacaccgtgcctgtacatatattatattatttatttacttatgttatataagtagaaatcattgtaagttgcggacaactcctccacaatatatatttctgcgtcaattgctctgcgagattcctcgcgcacccttcatttatgcccagcaccgcagtccgcgctgcacgccgtattgcggtggaatataaatatacgcgcgggccgaacaatatatagtgcggctcgtcgccacgtaaaatgattgagaataatataatccgtctcgaagacccgcccgccgcngcctacatatgtataaaatatatatgtgttgtgtataacaacggcgcacgtcttggtacctcgcatactctcattcaaacaaataatacggacgccgtgtgtctcgcgagataacgtcaattagcgagacgtaatatctgatctcgcgccgcgcagacgacgcgcggaganatatagcgagctacagtattcttcagtccccacgcgcgcgcaggatcaagtatagctatacagtgaaccacggctgcgtcgctgtgccgtcgatacgtagactcacactctgtgttctacttgcacgcattacaaagaccgtatatgccgcggacggcgcagcgg

SEQ ID NO: 1642 - DNA, 630 bp, Glycine max
  misc_feature (630)..(630): n is a, c, g, or t
  Probeset Number=SeqID_11421
tcagctacgtagggcccccccccaaacgcaattcactaatccatcgatgttctctccagaactcaatgattttctcgcacaatgcttgcagatagacccaaaaaagaggatgtctgcttcagaactgctaaggcatccttttatgctaaaatataagggagacttatccaatataaggaaacagttctgtcaagaaagactaccaaagatagaagagcataaaaagcatgtaatcactagaggcaaggatgagggttcaaagatcttggatggagactctatggctggagataccgccagaagtagagctaatggggagcaacgctttcaacacccttcacaagatgattatgagaataacagtgttatcgaacacccttcccatataactgaagaagcaaatctaacttgtattgagaaatcaggaatagacttaggtgaaggctctgagctatatcaaaatcaaggcatatatgaaaggcatgcgcctgtatcttctaatcttaagtttgctattcaatatttacaatctacccagccggaaacaaaagaaacagaaaggcattctgataataatcatttgatccttagagaaactgaccctggatttagtaatatgcacccccatgn

SEQ ID NO: 1643 - DNA, 1481 bp, Glycine max
  misc_feature (1)..(1): n is a, c, g, or t
  misc_feature (13)..(13): n is a, c, g, or t
  misc_feature (42)..(42): n is a, c, g, or t
  misc_feature (104)..(104): n is a, c, g, or t
  misc_feature (154)..(154): n is a, c, g, or t
  misc_feature (222)..(222): n is a, c, g, or t
  misc_feature (248)..(248): n is a, c, g, or t
  misc_feature (268)..(268): n is a, c, g, or t
  misc_feature (277)..(277): n is a, c, g, or t
  misc_feature (380)..(380): n is a, c, g, or t
  misc_feature (415)..(415): n is a, c, g, or t
  misc_feature (500)..(500): n is a, c, g, or t
  misc_feature (554)..(554): n is a, c, g, or t
  misc_feature (590)..(590): n is a, c, g, or t
  misc_feature (597)..(597): n is a, c, g, or t
  misc_feature (659)..(659): n is a, c, g, or t
  misc_feature (724)..(724): n is a, c, g, or t
  misc_feature (737)..(737): n is a, c, g, or t
  misc_feature (745)..(745): n is a, c, g, or t
  misc_feature (932)..(932): n is a, c, g, or t
  misc_feature (980)..(980): n is a, c, g, or t
  misc_feature (1044)..(1044): n is a, c, g, or t
  misc_feature (1082)..(1082): n is a, c, g, or t
  misc_feature (1158)..(1159): n is a, c, g, or t
  misc_feature (1169)..(1169): n is a, c, g, or t
  misc_feature (1200)..(1200): n is a, c, g, or t
  misc_feature (1214)..(1214): n is a, c, g, or t
  misc_feature (1341)..(1341): n is a, c, g, or t
  misc_feature (1343)..(1343): n is a, c, g, or t
  misc_feature (1367)..(1367): n is a, c, g, or t
  misc_feature (1410)..(1411): n is a, c, g, or t
  misc_feature (1434)..(1434): n is a, c, g, or t
  misc_feature (1439)..(1440): n is a, c, g, or t
  misc_feature (1446)..(1450): n is a, c, g, or t
  misc_feature (1452)..(1452): n is a, c, g, or t
  misc_feature (1454)..(1458): n is a, c, g, or t
  misc_feature (1465)..(1466): n is a, c, g, or t
  misc_feature (1471)..(1477): n is a, c, g, or t
  Peptide Sequence Number=SeqID_8716
  Probeset Number=SeqID_11422
ncgtcgctcacgnactctctctgtgtgagcggcagcgcgcgngtctgcgacacgcactgaagagtagtagtgcacgagcgagcgtgcacatgaactcgtgcgtnaagataggtgctgtatctgtggcgaagcggtgcgtcacgcggctcgcatngagcaggtgagcgagcgctaagtgtgcgagagacaggtgataagtgcatgtatatatttcgggattangtgcagagacgcgtctatgagatctnatatctacgttattattgcngccttccgnctaagcatgacgatacgcgcagagcaactcgctcttgtatttcgccgatcacacctacgctgattgacttggtgagaggagagagtagggcaagtctatctgncactctcgcgccggtgccaccaacatttgtggtgntcactcctcttagtgttacgtgacgtcgtgtcgctggatgaggacaagggcaagtgagtggagggtcacgggcctcccgtcctcncgagtgagatatctgcgaagtgtcgcatgagcgactcctagtcggcgagggagngagggcagagggcagcgactaaggtgtgataatatngcatgtncaggatgtcgtgagagtccagtactctatctacattaatactatatgactgagtgttcgctngcggcgtgcgcggtagtgtagtgtggctggtgccgtggtcgggtcgcgtaaatatatatgccatngcgagtatattgnattcacanacatgataaaacgcaactgtccgacattaacatgctcgacgtgagacctacgacgacgcgacagtgagtcgaacgactagctgatagagaagaaggtgagacagacagcggcagagcacatataacagcgcattgacgacaattaacatagtagagtgagagtgagataggacagtaaagtaaatanagagggtttagatactaaagagtggatgaccagttgtagtattagacnagagagagcgcacatttatagtacaagaacaaagaggcagacgataagatcacacaatacagcnaagaaaaatatatatgtactctgtgtctcgctctctgnctctttcttcttttagtccgtccgcattgcactttcttctctcctccgttcgattcactgggtgtgctgagctccnnattcgtgatngtctgcgtgtggcgcggcctcctacgcgcantgaggtgatgtcancggacagcgcgcgtgcgagcggtgtatgttggacagtttgtattcgcacgtggcaaaacgaacataataaaatgagactcctcccaccatctctctagcgacattacacacctacataatataatangnagatattatatatacatatcacanatgctatagtatataaattgataaagagtgagaggaggggggnngggagaagcggagaggggccggngtaanntttaannnnngngnnnnnggggggnnaaaannnnnnncccc

SEQ ID NO: 1644 - DNA, 1506 bp, Glycine max
  misc_feature (1)..(32): n is a, c, g, or t
  misc_feature (45)..(45): n is a, c, g, or t
  misc_feature (48)..(48): n is a, c, g, or t
  misc_feature (56)..(56): n is a, c, g, or t
  misc_feature (59)..(60): n is a, c, g, or t
  misc_feature (70)..(70): n is a, c, g, or t
  misc_feature (131)..(131): n is a, c, g, or t
  misc_feature (135)..(135): n is a, c, g, or t
  misc_feature (149)..(149): n is a, c, g, or t
  misc_feature (187)..(188): n is a, c, g, or t
  misc_feature (191)..(191): n is a, c, g, or t
  misc_feature (333)..(333): n is a, c, g, or t
  misc_feature (367)..(367): n is a, c, g, or t
  misc_feature (384)..(384): n is a, c, g, or t
  misc_feature (458)..(458): n is a, c, g, or t
  misc_feature (507)..(507): n is a, c, g, or t
  misc_feature (549)..(549): n is a, c, g, or t
  misc_feature (559)..(559): n is a, c, g, or t
  misc_feature (768)..(768): n is a, c, g, or t
  misc_feature (1105)..(1105): n is a, c, g, or t
  misc_feature (1159)..(1159): n is a, c, g, or t
  misc_feature (1445)..(1445): n is a, c, g, or t
  Probeset Number=SeqID_11423
nnnnnnnnnnnnnnnnnnnnnnnnnnnnnnnncccagtgcatggngcngcgaccgnccnncgctgagtgngccgcgcccgtcgctcgctcttgcgtaggcatcgaagtgatattctgtcgtttagtttatnatantataatttataagnatatgtttgttacttcatcgtgagcttactatattatnnacnccagcccgacgcgacgtgataccactccatagtccgtatagcgcgcgcgatactggctctgctcacgagaagcgcccagttatctatatctcagtgtcttcgttgtcattgcatgcgcgctggaaacaaggactgctacggngcacaaactgacgccggctcacgcgcggacgggncgcaaacgagaggacgngaactaagtagatcactccatctgctgctcgatattacaatatatattataggagataatatgatatatatatnacgacgattgattatcagtagatattgtataaagtatgtgcgtgcgccnttcgtttcactagagacaatactcatgtgtggatattgtctncgtagaatanatgaagatatgagccagctgcggcgagacaagcagcgactctatcagcgcgcgtcgttagacagcgctcactatctcatcatcatgttcgtctatattgtatgtctttcgccttctcgtcttctcagcgctgttcatgtctgctgatgcgagactagtatatcggcgtgtgtgtgtcccctctgctcacgtttgtgcacctgttagatnctcatgatgtagactgaggtagaagtgtgcgtatcgtcgacgcaatagggcacacgtgccgaccctccgcgcctcactctgcctactgtcgtactaccgtcgataaagtagatgtgacggttacgtaatctaaagagacgcacgatttacgcacccacgcatatagcagctcacgtattatggagagaatcatgtaggggaccaccgaatatcagccaccagtatactttcttccgcgctcacacttatttgtattgtttagacttcgctggattaggacgtcgcgcacgctctcgttgtgttattaccacgtgcatagatgtggtcgactatgctngtatagatgaacctacgtccgcaccgtcgctgccggaatcacacgatagaaagnccgcgcgtagctgtcacgacccatctcctatacaccactatatattatatataatatgtaagatataagtattatggtatacattagagtaattgtacgtgcatatatatactacgctacacacaagacagataagacaataagcacacaatacatctcactacatatctataccaaccaactcaccaagatgtgtgtatcatgccacctccacctgatattgtatctgaagcgcacgctcgtcgcgcctgtgatgagaggaatacgacaccgcgctccgcgcgangcaggactcccgagagctcgtcgactgtcgtgccgccgcgacgcgaggacagtcatgcgtg

SEQ ID NO: 1645 - DNA, 1455 bp, Glycine max
  misc_feature (1)..(1): n is a, c, g, or t
  misc_feature (5)..(5): n is a, c, g, or t
  misc_feature (132)..(132): n is a, c, g, or t
  misc_feature (341)..(341): n is a, c, g, or t
  misc_feature (348)..(348): n is a, c, g, or t
  misc_feature (353)..(355): n is a, c, g, or t
  misc_feature (469)..(469): n is a, c, g, or t
  misc_feature (485)..(485): n is a, c, g, or t
  misc_feature (642)..(642): n is a, c, g, or t
  misc_feature (750)..(750): n is a, c, g, or t
  misc_feature (752)..(752): n is a, c, g, or t
  misc_feature (790)..(790): n is a, c, g, or t
  misc_feature (833)..(833): n is a, c, g, or t
  misc_feature (883)..(883): n is a, c, g, or t
  misc_feature (889)..(889): n is a, c, g, or t
  misc_feature (907)..(907): n is a, c, g, or t
  misc_feature (938)..(938): n is a, c, g, or t
  misc_feature (942)..(942): n is a, c, g, or t
  misc_feature (998)..(998): n is a, c, g, or t
  misc_feature (1014)..(1014): n is a, c, g, or t
  misc_feature (1037)..(1037): n is a, c, g, or t
  misc_feature (1078)..(1081): n is a, c, g, or t
  misc_feature (1087)..(1087): n is a, c, g, or t
  misc_feature (1219)..(1220): n is a, c, g, or t
  misc_feature (1224)..(1227): n is a, c, g, or t
  misc_feature (1229)..(1229): n is a, c, g, or t
  misc_feature (1259)..(1259): n is a, c, g, or t
  misc_feature (1265)..(1266): n is a, c, g, or t
  misc_feature (1309)..(1310): n is a, c, g, or t
  misc_feature (1374)..(1374): n is a, c, g, or t
  misc_feature (1387)..(1387): n is a, c, g, or t
  misc_feature (1406)..(1406): n is a, c, g, or t
  misc_feature (1411)..(1411): n is a, c, g, or t
  misc_feature (1414)..(1414): n is a, c, g, or t
  misc_feature (1417)..(1420): n is a, c, g, or t
  misc_feature (1424)..(1425): n is a, c, g, or t
  misc_feature (1428)..(1429): n is a, c, g, or t
  misc_feature (1431)..(1431): n is a, c, g, or t
  misc_feature (1436)..(1436): n is a, c, g, or t
  Peptide Sequence Number=SeqID_8717
  Probeset Number=SeqID_11424
ncgtngagagagctgtgtgctctcgcatatcgcgactgccctggcgacttctctcacatctctgcattcgttacagtgtgtagtgtggagcatctgacactgcgctccgctcatcctcatgccgtcgcgtangcgcgcgcggctagcacgtgtcgcgcatgacgccgtatagcatgtatattgctctgtgtcttatctcttgtattggtacgtgcacagtgtccgtgcgcgactctgctatctgacactctctcacattcacttcggcgagcacctcaccacgtctcgctgatcttcactctcttcgctacttgatatgcaagtgtcacactgtggaggtngtaggtntgggnnntgctcctcctccatatcacgctcgcattcacttgactctgtcatctctcctgtataacaacagtacttgaattactagataaaatacacagctagagcggtcctagcgcacatnaacgtacgatgcgtcnctaatgcagagtatcagctgtgctgcgtgcctatcactgagcttgattcggtgagtgtgtgcacactcctgaccccgtcgcatcatcgacgtcactcatatcacgccatactacgtctagcgacgcctgtgtaaggcgtgggtgattgtacacacancttacgtacatagcgagaggtcagctagtgtatgatatttaatattatatattctctcatagactgtggagccgatgtatgactgctctatctattttgatatgtgtngnattttcactccttcctgtctttgttcgtcatctaatcnaatctcttctacaccatccagagcacatctagcctcgcctctnacagcattatgattaattactatatgtcagtattaatactatctatcttntttttnatttctttatatattttntatatatctctttctagttattctgtcacancatngcagacgatacacacgctacacaatccacagtatacagcattcgccacgatgatantgatccatatcacgtncctccatccagactgcgacatanatcacatctgttagagtcatcaggacagccgctgttgttannnnttcttntatcactacacagcacacatgacaaatcagatatatagacgttcttgttgcgtgctcgccgacactaccagagttgggggtgagagtgccgacagtatgggatacacatcaaactctcctctattcctcctnncttnnnncncctcccccatcaccgcgcgcgcctcgccgntttctnntttttgataatgtgtttgatttctttttctatctatatatatnntgtgtgtggttgtgttgggattatgtgtgtgtgctgtcttgtgagttttgataaaaagagtaanttggataaataanataaaaagttatgttgaanatganaanaannnnaagnnagnngnggggngggggccacccacatcaca

SEQ ID NO: 1646 - DNA, 508 bp, Glycine max
  Probeset Number=SeqID_11425
cctcttctcttccctttcacctcctaaatccctaattccgaagaatctaagctcgatctaaaggttttggagatggcatcgaaacggattttgaaggaattgaaggatcttcagaaggatcctcctacttcctgcagcgcaggacccgctgctgaagacatgtttcattggcaagctacgataatgggtccttccgacagcccatactctggtggtgtgtttcttgtaaccattcatttccctccagattacccctttaaacctcttaaggtggcttttaggacgaaggtgttccacccaaacatcaacagcaatgggagcatctgcctcgacatcttgaaggagcagtggagtcctgcactcactatctccaaggtgctgctatcgatctgttcgttgttaactgatccaaacccggatgatcccttggttccggagatagctcacatgtacaagacagacaagaacaagtacgagtccactgcaaggacctggacccaaaagtacg

SEQ ID NO: 1647 - DNA, 1366 bp, Glycine max
  misc_feature (1253)..(1253): n is a, c, g, or t
  misc_feature (1366)..(1366): n is a, c, g, or t
  Peptide Sequence Number=SeqID_8788
  Probeset Number=SeqID_11426
tattttccgccgtttctcgtgacctcctcccccttatacgtgttgcaacaaacagcttatatttcttattttatttacaccacaacccccccgccctttctttgtctcgcccttctcatcgccccaaactctgctgaaatgaacctgtgggatgggcgggcgtgccccgccgccctaacatcgggtttaggtttgctttacgtcctcgctatcctaataatccccatccacgcaccgtccacaaagcatcttggtctacatatatatattttatcccccccccccaccccgccccccgcccctgtatttctttacaatttattgtagcggcgcgtctagtggtctattataccggtgatttctccttatttcatttatacttatattctccccccctcccgccacctattcttccttcataatcgcgccgatagtttatgtaatctagagagcaccccgatgctcactcgcaaatggatctggcatttttaggtagtcgtctaccccgcactacctcctgctttctctttatgggtatttccttatcccctattattttttgttattttgtatgtcgcgcccgcgcgagtatatattgtggtatatctcctcacagactcacgagtcgccccccgcgacaatatttcgcctcccctctatccgatcgaatcgctatataacaccccactatttgctcatgtgcgccgctccccatattactcgtctccatttgttttttattcgtgtttttccgcccgctccaccactatatgcctttaccatataatcataataaaacactcatctatgtccgctttatacttacgtcgttcactttattcgctctatcgccgccttagacatccacctggctatccttccacacacccttctgtatcgcactttatgttctttcacctataaccacttaattcatcccttctcctatctctcccctccgccccatagttacatcggtaatcgcgggggtggctacatcttcgatctacgcatatattatatttgcgcgcatatatctgaccagttacacgcagcccgcaccattctatatcccgcgccatatcataatcctaccctaacactatttattattatcacgcctcccgccgccacttttctagcttatgttcgccaacgccagacccacctagataactatattacgctccggtcaaagaacgccctcctccgcactcgcgacgcacacacatgatctctaatctcactgtatncatagtacgccaagaaccctcacactccctcatacataccactatgtgtctacacacatgtgattatacgtctatctccacacgatagtctaccgcgcagaactcgaccacan

SEQ ID NO: 1648 - DNA, 522 bp, Glycine max
  Probeset Number=SeqID_11427
agaacatcctaatcgaaaaattcgaatcaatccgaaccaaaccttcaccatggtcagcaaggtcgtaatcgtcgccttcgtcgctctgtgctgcgcacaggcgctggctgctcctcgcgaggagaagctggagctggagagcgcaaacctcaacatgaacatcatcaagtgcacgaaatcagtgatcaaggccgttggagttgtgaaggacacactcgccgttgttaaagacttcacgaccatcgtcaagaacggtcaggccgcgaaggctacctgcaagtctaacgaggccgccaccgccgaggagatcgaggcctgcgtcaacgccgccaaaaccgcagagatcaacgagatcttcgctgaggtcaatgttgctgtccagaaggctgcaaccgcttacgaagaaatcaaggacgtcatcgacgagtgcacttaaatctctaatcaccctaattccctccaccacccccttccacaccaatgttttaaggctttataaaataaaatttatgtttgcaagtc

SEQ ID NO: 1649 - DNA, 1962 bp, Glycine max
  misc_feature (14)..(17): n is a, c, g, or t
  misc_feature (19)..(20): n is a, c, g, or t
  misc_feature (22)..(22): n is a, c, g, or t
  misc_feature (25)..(25): n is a, c, g, or t
  misc_feature (36)..(38): n is a, c, g, or t
  misc_feature (54)..(54): n is a, c, g, or t
  misc_feature (83)..(83): n is a, c, g, or t
  misc_feature (127)..(127): n is a, c, g, or t
  misc_feature (173)..(173): n is a, c, g, or t
  misc_feature (220)..(220): n is a, c, g, or t
  misc_feature (357)..(357): n is a, c, g, or t
  misc_feature (368)..(368): n is a, c, g, or t
  misc_feature (466)..(466): n is a, c, g, or t
  misc_feature (475)..(475): n is a, c, g, or t
  misc_feature (480)..(480): n is a, c, g, or t
  misc_feature (508)..(508): n is a, c, g, or t
  misc_feature (543)..(543): n is a, c, g, or t
  misc_feature (611)..(611): n is a, c, g, or t
  misc_feature (657)..(657): n is a, c, g, or t
  misc_feature (659)..(659): n is a, c, g, or t
  misc_feature (668)..(668): n is a, c, g, or t
  misc_feature (674)..(674): n is a, c, g, or t
  misc_feature (682)..(682): n is a, c, g, or t
  misc_feature (687)..(687): n is a, c, g, or t
  misc_feature (694)..(694): n is a, c, g, or t
  misc_feature (738)..(738): n is a, c, g, or t
  misc_feature (740)..(740): n is a, c, g, or t
  misc_feature (751)..(751): n is a, c, g, or t
  misc_feature (777)..(777): n is a, c, g, or t
  misc_feature (809)..(809): n is a, c, g, or t
  misc_feature (867)..(867): n is a, c, g, or t
  misc_feature (996)..(996): n is a, c, g, or t
  misc_feature (1015)..(1015): n is a, c, g, or t
  misc_feature (1068)..(1068): n is a, c, g, or t
  misc_feature (1154)..(1154): n is a, c, g, or t
  misc_feature (1159)..(1159): n is a, c, g, or t
  misc_feature (1167)..(1167): n is a, c, g, or t
  misc_feature (1210)..(1210): n is a, c, g, or t
  misc_feature (1220)..(1221): n is a, c, g, or t
  misc_feature (1227)..(1227): n is a, c, g, or t
  misc_feature (1241)..(1241): n is a, c, g, or t
  misc_feature (1301)..(1301): n is a, c, g, or t
  misc_feature (1332)..(1332): n is a, c, g, or t
  misc_feature (1346)..(1346): n is a, c, g, or t
  misc_feature (1348)..(1348): n is a, c, g, or t
  misc_feature (1361)..(1361): n is a, c, g, or t
  misc_feature (1438)..(1438): n is a, c, g, or t
  misc_feature (1440)..(1440): n is a, c, g, or t
  misc_feature (1482)..(1482): n is a, c, g, or t
  misc_feature (1490)..(1490): n is a, c, g, or t
  misc_feature (1496)..(1498): n is a, c, g, or t
  misc_feature (1501)..(1501): n is a, c, g, or t
  misc_feature (1525)..(1525): n is a, c, g, or t
  misc_feature (1544)..(1544): n is a, c, g, or t
  misc_feature (1546)..(1546): n is a, c, g, or t
  misc_feature (1549)..(1549): n is a, c, g, or t
  misc_feature (1572)..(1572): n is a, c, g, or t
  misc_feature (1575)..(1575): n is a, c, g, or t
  misc_feature (1578)..(1579): n is a, c, g, or t
  misc_feature (1582)..(1583): n is a, c, g, or t
  misc_feature (1596)..(1599): n is a, c, g, or t
  misc_feature (1601)..(1601): n is a, c, g, or t
  misc_feature (1639)..(1639): n is a, c, g, or t
  misc_feature (1690)..(1690): n is a, c, g, or t
  misc_feature (1710)..(1710): n is a, c, g, or t
  misc_feature (1712)..(1712): n is a, c, g, or t
  misc_feature (1740)..(1740): n is a, c, g, or t
  misc_feature (1743)..(1743): n is a, c, g, or t
  misc_feature (1745)..(1745): n is a, c, g, or t
  misc_feature (1762)..(1762): n is a, c, g, or t
  misc_feature (1767)..(1767): n is a, c, g, or t
  misc_feature (1769)..(1772): n is a, c, g, or t
  misc_feature (1867)..(1867): n is a, c, g, or t
  misc_feature (1877)..(1877): n is a, c, g, or t
  misc_feature (1905)..(1905): n is a, c, g, or t
  misc_feature (1907)..(1907): n is a, c, g, or t
  misc_feature (1911)..(1911): n is a, c, g, or t
  misc_feature (1913)..(1913): n is a, c, g, or t
  Peptide Sequence Number=SeqID_8789
  Probeset Number=SeqID_11428
tcccttttttcttnnnntnncnttnttttatttccnnnttttatctcaacctcngccccaccccgcctcgtcctcgcgcccgncgccccgtcgcccgcctcccgcgcgtgcgaccctcggctgccgntctgctctccccacgccaccctttacactgtactactcgttgtccnctcgacagggggaccgtgttcttgtgtgggatccttcgctcatgtcncctagacgggctcgccgcaccttctctcgctcagctgctctatgaagactcgagcctactgtactcgacgacagacgacgacgcgatatggattgcacgccagacagacgcgcatacttaatcgacgaaatgcgggntgttcgcttgngtgcaggcatcgttatcagtagtcgtgtgacgcatgcctcacgtcatgataatccacagcacaccatctacactgttatgagctctgctctcaggcgngttcgcgcnctaancgcggcgcgtgccggcgtctcgcgcgcntacgcgcaccggagcgcgccgcccacgctcgcccnatcggcgcgtctgcctgatatgcagcttgatgattgatttagcaacctaacagatgcgttctcgctanatgctgagggttgcgtgtgttcagtgtgattctagtctgtcgttgngntgtttaagngttctnaataagantgttntagtctnttgtcctaatttacgatctctacaatcctgcgctgtatgtgctntntttggacagangggagatagcatgtagtatagtatancgaatatgtctatacgatatacgaggcaatcncattacatcaacacacacacgatcagtaacatccttatcctatacctacacatcgtcnctacatacactcatactataatacaccattacagtactataacataattcgcgcgactaacgagcgcctatcataaacacgaacattatctctatagtactctcacacctatcacgtccgcgatatagnacgtcataagtgtacactntgtggagagattagtgcttatacacaactctgagacctaagttgtcgtggagntgtgtgcgcgccgtgcaggtcgtatgtgccactcacgcgcaccacacacgagtgttatacgcttgatcatcgatggtgacgacgcnactgntgtaatgncacacatcgatatgatgacacacacgactcacgacatcacacnacatcaacanngagttnactatcgaacgtanctgaatattaattactcgcacaccacaacagccgaatgtcacgcaccgtctcacatatcngcccgcgcacgccctgtgctcgatgatatanagtacgcgctccgnanacattcacagaanggagtcgatgtcatagcgtgactacgagcatcagttagttgaatctactacagtcactacggtcaatgagctgaccncntacagcatcatcacaacagatacgatgacgatcgactactantcgagtanactgcnnncanattcgcgatactaacacagtccgnacaatactcacgtcgtcgntntgngggtaacttcgtgcacactgcgnganggnnggnncgcgatgaatacnnnnanactatttgatgtatgatatagatttcataattcatgangtgtgatgtggtgactgcagcgcagccctctgatatctactatcactcttncttcaacacgcgtggagtcntnatctgcatgatatcatatcagatgtctncgnancagaccacaacagcganctccncnnnnccctccgcttagtctatcatctattctatcgcgcgtcacagcatatgtatcatctgcagataggcatctatgcccagtggcgccgtatcatcacnactactacangcacatcgtctgacatgatgcgtactgncntatncngcacctagtgacatgcgtcggtgctagtctactatacacctacgcactg

SEQ ID NO: 1650 - DNA, 1438 bp, Glycine max
  misc_feature (1)..(1): n is a, c, g, or t
  misc_feature (225)..(225): n is a, c, g, or t
  misc_feature (346)..(346): n is a, c, g, or t
  misc_feature (448)..(448): n is a, c, g, or t
  misc_feature (456)..(456): n is a, c, g, or t
  misc_feature (478)..(478): n is a, c, g, or t
  misc_feature (507)..(507): n is a, c, g, or t
  misc_feature (641)..(641): n is a, c, g, or t
  misc_feature (1365)..(1365): n is a, c, g, or t
  misc_feature (1417)..(1417): n is a, c, g, or t
  Probeset Number=SeqID_11429
nagcaggcggcacgaggcgatagatacatgaacagtaatgagagagaatgcgcgctgatcgcgcgctcagccatgtggaatataacgataatatccacgcgcatatatcaataacaagttgcaccgcgttacgttcagctcgaaagagtgtaactcgcggcagcgcgtgatactaaacctacagctgatgggtcatatgtcaactccgacggttactatatgttncccacccgcgctggttgcgtattgtgactgtgtcggcgaatcacagatatgtatgtatatactatttcgacactagggcgcccgtggaacgacacatcgactgatctactagattcgcctnagagcgtctattccgttcgtgtcgagagagcgcgtgcagtacacagaaatatgaatattatatatacgcggtcttacattgtggaagattgtattgagggcntctacacnatgacggtgtattacatcgaantctgcgtcagcgctctaaaccagcgatgngagcgagatatacaatgcgcacgattactagacaataaatgaaacccgcggtgttaggcgtagcacgaagttgcacactcacactacacacctccatccgcacagcgcgtgtgggtgggtgtgtgtatggtgcncgtacgactcgcgattaatcctggcgtatcttttgaatagagttatgttaagctcggctctcacaacatggacaagaacagagatatcgtccacacatttagggatgttacgcttaatctagtcaatacgatctgtgcggcgaggagtcccggcgccgggcgtttattataatgcctgctcatttctcgtgccccatatccaccacttctaataaagtaagacaattagaggcggcttcgcacattctgttgctcttgccaacgaggtccgcagctaaaggtagcggagacatgtccttgcatcaatcaaactcacaactcggaccttggtcgacggagtgttcgctatctcgcatgcgtgacaccatgtagtttcgcgaataatacgttcaccatctctcgtgcctatccgctccctgtgtgaaatagactgaggtatcagcttatgctaaggtggtccaatatatgaagaaaataagactccgtcacaacggccaagcgtggtgcgcggggtatacgcacctctgacggctcttatatgtggtcactaattgtcgacatgctatctgggttatgtctttcttgttttatatacgaatatacacatacaaaccttcccagacatgttccctggcaggcacgcgcgcgtgatctccttcctaagtcagtagtaggtcgtctcgagcgctggagggcggtgagagacttcctatataattgacgnaactgagccggagcgcgatgattgcgttagtgtagaaagtattagcgccgtngtactggggggggggcgcccc

SEQ ID NO: 1651 - DNA, 525 bp, Glycine max
  misc_feature (322)..(322): n is a, c, g, or t
  misc_feature (380)..(380): n is a, c, g, or t
  misc_feature (384)..(384): n is a, c, g, or t
  misc_feature (398)..(398): n is a, c, g, or t
  misc_feature (419)..(419): n is a, c, g, or t
  misc_feature (471)..(471): n is a, c, g, or t
  misc_feature (485)..(485): n is a, c, g, or t
  misc_feature (511)..(511): n is a, c, g, or t
  Peptide Sequence Number=SeqID_8790
  Probeset Number=SeqID_11430
tcagctacgtaggccccccccccccccccatcttcgacaacgtcaagacctgcatcgccaccgaccaagttatcatcaccgacatcatcactggtgttgaagatatccaaactaaggtcgcttccaaggtccaagaaggtattgccctcatcggtaaggccgtcgaaatcatccccactgccgttcaacaatgcaaggttgctgaagctgatatcaagaccctcatcaagatggtcaactccttcaagaaccccgcctctttcttgtactatgttggcaagagcatcctcatcaacagagttgatgtcttcaaggaggtcancagcgctgtcaaggcttaccaaactggagatttcaccaacttcggatactggatcggnaganctatggacaccatnttcatcggacaaaaggctctncaagtccaagacacccaaaccgatgtcctcaacttcgccagaggtttcctcnccggtattgccagngaaagcatcttcgatgacatcaaganctgcatcactgata

SEQ ID NO: 1652 - DNA, 629 bp, Glycine max
  misc_feature (279)..(279): n is a, c, g, or t
  Peptide Sequence Number=SeqID_8791
  Probeset Number=SeqID_11431
ggttccccttcgctcagtggagccatcagggtgaatccgtggaacattgatgaagtcgctgaggccatgaattcggctgtcacaatgtcggaggcagagaagcatttgcgccacgagaagcattacaagtacataagctctcatgatgtggcttactgggcaaggagttttgatcaggatttagatagagcttgtagggagcattactctaagaggtattggggtgttggattgggcttggggttcacaattgttgctttaaatcctacctttaagaanctctctataaatcacattacctctacatatacatatacacacaatcaattaatccttttaaactactataacaccataataccgcgaacaacaatcaatactccgaacaaagaatgtattactatcttaaattatttatacagtaatccttcaaacatgaggtgcattatgaacaagcaagataaaaattacttaagcaagtaatcttctcgattttaaaaattagatgtctgttctaagcaccattaccttacttagaagtgggataccgcttttacttaaacgactagatatttcttcattggacataacaaagtgctataatttagcgccatgcaggaagcagacct

SEQ ID NO: 1653 - DNA, 1503 bp, Glycine max
  misc_feature (1)..(1): n is a, c, g, or t
  misc_feature (15)..(15): n is a, c, g, or t
  misc_feature (28)..(28): n is a, c, g, or t
  misc_feature (283)..(283): n is a, c, g, or t
  misc_feature (452)..(452): n is a, c, g, or t
  Peptide Sequence Number=SeqID_8792
  Probeset Number=SeqID_11432
ntgctgtcgtgtagntacgctctgagancgcgtctgtcagcaaagcacgcttgtatcagagtagtcggagcactccggcgcttgcgcgttcaatgcgagtatagatatttacgtacatatataacagaggcgaggaattactgacagagagcggcagactagcaactactgctgtatggctactcacgctctctagcgtcccgttactagtaacgtctgctgtcagttgccgacagctgtatagcactgacgcgtggcccactcagtgatgcagttgtgttgngtgacccattgcgctgacgtctacggcactacgtgcgtcatgagtgctcgtatcatcaatgcgactgatccttgattgcgcgtagtgtactgatcaagaatcctagactcatatcagtattaatacttctctgtcgtctataagtagtctatatttgtaattgaagcgntcgctgtgatgtgtgtttcgtagatggttgtgacatcaatctatctaatctctcaaccgttatcgtgtcctgtcgtggattcgtagtctgtcagattatcgcatagcgcgcgcgcggcgcataatgatgggttatatatgttatagcgtcgatgtacgataacttaattaatggcagctgcgacgcgatcggaggtgagtaacacaatatcgcgatgcatgcacatgactaccaatggtgcattgtaatcggtagcgcgtagtagtatgtgatctgaaaaatctagcgatggatgacgatgtttgtgagagctgtcttagtaagtctctaagaaatacgatgtgatacgcggcgcatacgcgatctaatatatctagtgacacacgtgagttcgtgagccgttctatacaacagataagaataaacatggcgagtgtgtgtatggagctgagctgtcctcacttcttatccagcgacattgaactctctctcagctgtcggattctactcgctgttgatcgatcacgtatggcctatagaggttggataggggagtgtgtatgggatgctggtgagctgttgtgcgcgaggttgacttgtggtctgcgtataggcgggtgcgggcgttgggtgaagataatcactacgggaagacaggtcgagaatggatatcgtgcgtgttgccgcgcttttgatagagtaattcagaagagacgtgggcaggcacgcatatcgcgcgtcatcgcgtcctcacacgcgccacagtagcaacgtccatagccagacctatcatcccactttcgaagaacgttatgaagagggttgcgaagatgagaagggaactctggttattatgtggtataattattgtgttgttatctcgttctgatagctgtttgatacgcattcgggcgtccttccttgataaagatataagagaagaacactcttatctttattctgtcgcctcgtcaagcgggcgccccgcttcaccacattgcgcgcgttcgatccacagacgtgattaataaaataaccaagaaaaaaataa

SEQ ID NO: 1654 - DNA, 842 bp, Glycine max
  misc_feature (1)..(35): n is a, c, g, or t
  misc_feature (285)..(285): n is a, c, g, or t
  misc_feature (306)..(307): n is a, c, g, or t
  misc_feature (327)..(327): n is a, c, g, or t
  misc_feature (396)..(396): n is a, c, g, or t
  misc_feature (646)..(842): n is a, c, g, or t
  Probeset Number=SeqID_11433
nnnnnnnnnnnnnnnnnnnnnnnnnnnnnnnnnnncaaatgatggctgggaaccctaactggtggactatgcatccaccatctttgatccctccccagtatgtgtttggatcttcttcaattccttttaattcttctacacaaaaccaagagccccctcagtcattgagccaacttcttttcactggtttaccaggagaggaagagagaattgcattcagtccttttcaatcaaaaaagttggatgaatggaatgacccaatgcttaatattccgtcccctatangtccaatggctgatgtaatannagcagaggtttcccaagtgncagcttatatcaccatggacatgatcaagaaatttcagggtttctggggcacccttggtcacatatggntgccaattttcttcttcccctaggtctagggttgctagcttcagaaaaaaaaaatttattgggatttccccttacaacaagaacgatccttaggaagaacccaactacccagattccttcccgaggggtaataaccacagcccactggcctggagtttttacaagaaagactaaagagcccaaccatttttcaagcgcaaaccaccttctccaggggtgaaaaaaggaagaagttaggtggaataaaaannnnnnnnnnnnnnnnnnnnnnnnnnnnnnnnnnnnnnnnnnnnnnnnnnnnnnnnnnnnnnnnnnnnnnnnnnnnnnnnnnnnnnnnnnnnnnnnnnnnnnnnnnnnnnnnnnnnnnnnnnnnnnnnnnnnnnnnnnnnnnnnnnnnnnnnnnnnnnnnnnnnnnnnnnnnnnnnnnnnnnnnnnnnnnnnnnnnn

SEQ ID NO: 1655 - DNA, 414 bp, Glycine max
  Peptide Sequence Number=SeqID_8793
  Probeset Number=SeqID_11434
atttggaattagggttttagagctgccgtgttccgccggatcatcaccgttgcaacctcaaggctcaagttcaccgttcgagagcttaagatgccgtcgcacaagacgttcataatcaagaagaagctggggaagaagatgaggcaaaacaggcctatccctggctggatccgtctccgtaccgataacaagatcaggtacaacgctaagcgtaggcattggcgccgtaccaagctcgggttctagatcatccgagctcgctgccatgactcttattcgttcgagttttgctattttactttcggaattgtggttaaagttttagtttttatcttctggatcttaaattttaaaagacttgcttattgcattgcatgaataatatattatgagtatctaaaaaaaaaaaaaaaa

SEQ ID NO: 1656 - DNA, 549 bp, Glycine max
  Peptide Sequence Number=SeqID_8794
  Probeset Number=SeqID_11435
ggcaccggtccggttggtgttgctatgttgggctttcttatctataaaagaccagatacagggaaagccggagccaaacaccatgcttctacaaaccggtgttgcgtgtggttcgtccctctccctcttcagcccgaacgccgaacctccccgtcgggtcccgctcgtggattggggttcgcgcagcgaaaggatccacgaaccaccgcgccctgaccggagtgatttttgaaccgttcgaagaggcgaacaaggagcctcgatctcgggcgcaccgcgccgcaagcttctctcgcgcgccaaaaatacgtcgacgaatctgaggccgccgttaacgaacaaatcactgaggagtataacgtttcgtacggttaccatgccccgcccgcgcacttcaataggaacaacgcaccctgacagccactgccaagtttttttaaggaaatccctgaacaaaaaagaaagcatgttgggaccccgccgcgggtatagaacaacacgggcggccaacggaattccgaaccgattgcgccgcccgcctccccattt

SEQ ID NO: 1657 - DNA, 1527 bp, Glycine max
  misc_feature (28)..(28): n is a, c, g, or t
  misc_feature (50)..(50): n is a, c, g, or t
  misc_feature (176)..(176): n is a, c, g, or t
  misc_feature (217)..(217): n is a, c, g, or t
  misc_feature (227)..(227): n is a, c, g, or t
  misc_feature (513)..(513): n is a, c, g, or t
  misc_feature (549)..(549): n is a, c, g, or t
  misc_feature (561)..(561): n is a, c, g, or t
  misc_feature (675)..(675): n is a, c, g, or t
  misc_feature (806)..(806): n is a, c, g, or t
  misc_feature (1233)..(1235): n is a, c, g, or t
  misc_feature (1364)..(1364): n is a, c, g, or t
  misc_feature (1367)..(1368): n is a, c, g, or t
  misc_feature (1454)..(1454): n is a, c, g, or t
  misc_feature (1490)..(1490): n is a, c, g, or t
  misc_feature (1498)..(1500): n is a, c, g, or t
  misc_feature (1502)..(1504): n is a, c, g, or t
  misc_feature (1508)..(1508): n is a, c, g, or t
  misc_feature (1510)..(1511): n is a, c, g, or t
  Peptide Sequence Number=SeqID_8795
  Probeset Number=SeqID_11436
cctcgcaccgctttgttattcattgtgntagagtcatgatagatgtagtntagtgagctcagcctcgcacacgatgtagctggcgcagatggcgtagacgcgtcggctgcgtcagtacacgtgcgcacacctcagcaacacatctagtcacgctagagttgatggcagcatgcacngcctcgtggtttatctcgtatgtgtgtcgtggcggtcacgnccgtcagcgnctatatgtgatgtcattgcgcgctcacacgcgatagtatgtatatagtaggttaatacgctagcgcggcgtgcgacgtctactatggatatacgcgtgtacgctgttgtcttgttagcatgggctcacccgcgcccagagcgttgtatatgagcgatgtgcagagatctgcagtgagtcgtacgttagtttgactgtgacgactagtcgccgcattcatcgtagtctttggttgtttgtagacgcgtgtgcgacggtgcgcgtgacgcgcggcagaggtctatganctgatacgaagtacacactgagtggctagtaggagntgcaccgagtgnggtgtgttatgagcacatatgcgcgtgtcacacagacacacaccacactcagtgtgcgtagggggtgagtcgcagaccaacacacgtacacgcgatagttgtgtgatgagtggngaagggatgcgacgagagatataaaatatgaaagacaaggcgaggggtgcgagcgggggagatagtgtgtgtaagtgggtgagaggagtaagaccgtggagatatagagtgtatgtttgtgtcggtagtgntgtatcgttgtatttagcgataatatattataaagtctccatccagcactcaggagacagaaacgcacctaggaggcgcacgcgcgcacacagtactccgcccacccccgacacgcgcgactggggatgatcgagaaggtgggagggtagcctttttcgactcacccggacgccgcgcgggttgggcgcggcgcgccccgcccgccgccggctggggtgggtgtgagtgatctgtgcgctgtttgttgctcgcaaacgcgccggtgatgttctttagatgtgatgtaagtgtactaatgctcctcgtgatgtcagccacgaattattgataatgacccgccagtataggtggatgtaggccgctgatggtgcggtgggggtgtggcgggtgctagcaggcgcacgggggaggggtggcgtggctggnnntatgggaagacagaggaagagagagagtgaggagcgccaacatgatgtaatagcgcaagcggacgcgatgaggtggagtgttagagggagggcggtgagcacgtgtcgcccgtcgccgttccgatctcnctnnaaaaagagcgggaggtggagtgaccgcgcgcacccccccatactattttaccactaacccctatctcaatcaatccattaataaanaatatttctctatttatatttcttcccaacattttncacttctnnntnnntctntnntcctctcctccctttc

SEQ ID NO: 1658 - DNA, 685 bp, Glycine max
  Probeset Number=SeqID_11437
aatcctccgtccgtagcaaacttttctccggttctcggcaaggaccagagtgatgatgatgaagaacaaagccggtggtgcgggtggcggtatgtccggatccggtgaaggagccggaccaacggccgcagcagccgcggcagcattacagaagcaaaaggcgttattacagagagtagagactgacatcacatctgtcgtcgataacttcacccaaatcgtcaatgtcgcgagggtgagcgatcttccggtgaagaactcgcaagaagcatacatgatggagatgcgagcttctaaaatggttcaagcagctgattctattttgaagctcgtatcggagctgaagcaaacagcgatcttctctggatttgcatcacttaacgaccatgtcgagcaaaggatcgcagagtttgatcaagaggctgagaagacaaatcgattgttggctagaataggggatgatgcatcagcgagtcttaaagagcttgaggcgcactattactcttctgctcagaggttgactccagacgtttaaagggatttagttaaatagcccaaatatttaggccactattcactagtctcggatcaaactctggttttaatgggcttttaacagaatctatttttttatttcaacttgtttcattcgtcaacatagaaggtagatatcaatactcttttt

SEQ ID NO: 1659 - DNA, 1339 bp, Glycine max
  misc_feature (17)..(18): n is a, c, g, or t
  misc_feature (21)..(21): n is a, c, g, or t
  misc_feature (24)..(24): n is a, c, g, or t
  misc_feature (28)..(29): n is a, c, g, or t
  misc_feature (32)..(32): n is a, c, g, or t
  misc_feature (34)..(34): n is a, c, g, or t
  misc_feature (55)..(55): n is a, c, g, or t
  misc_feature (57)..(57): n is a, c, g, or t
  misc_feature (130)..(130): n is a, c, g, or t
  misc_feature (695)..(695): n is a, c, g, or t
  misc_feature (760)..(760): n is a, c, g, or t
  misc_feature (763)..(763): n is a, c, g, or t
  misc_feature (966)..(966): n is a, c, g, or t
  misc_feature (973)..(973): n is a, c, g, or t
  misc_feature (1034)..(1034): n is a, c, g, or t
  misc_feature (1138)..(1138): n is a, c, g, or t
  misc_feature (1180)..(1180): n is a, c, g, or t
  Peptide Sequence Number=SeqID_8866
  Probeset Number=SeqID_11438
cccggtgggtgtgggtnnttncancttnncgnangacaacgtcggatatgtgaananacacaataaaaactcactcaacctctccacaccacaaactatcgggcaagcctcctccagatggagagggggngcgcgcccacctatacaaacttgttcctacctcctcacccacgaacctagttgagagagactccctcgccttgcttctccggctgctcactccgatcacagccatcccatctatttcgactttcgcatatattaagtacgaggacggagacatcaccgacagcacaccacaccctttaatttcacctccttatacgcatcacacatagagtgctcggcacgtcctctctcccaccccacatgcagaccgctacctttgttctccttgcctcccactgcgcaccccacactctcactaccgaccctctcttagatccctcattacaacacaccattcgttatatacacgctttcatctcccctctcgcctgcgcacaccccggctccggctctctgccgcaatagtgcactgatagctcccctctgactcctaagcagaaaatatcgcagcccactcccccctctccaccccccttatctgctgtcacccagctccctctcctccctgcaccctcctatcttattatttatgttcttttaattctttcttatatgtgttgtttttntatatgagggcgagagatcaaaaaactactcattacaactgtgctgaaattgcaaccaccccagncgngccccccgccaccacccccaccacaccccacgttcgataatattctcagatatcctcctctcctactactacagacacacgagctctactgcccctcttcctatgaactctccacaccaccactaacatcaactttagaccgcacacaactattttgcgcttatgatacgcacacgtgcgctcactctcacaccacgcccgangctacanactcatgttgtctctctcttagagtcttcccccttctaatattgcatctatctctctcagngtcacacacagctcgcctgtctactagcttatgctcttctgttctcgaggaggctcactcttcctcacgtgcgctgccgcgcccactctactgcctcggcactngctctacgatcgcctaaacgcctgcctcactgctagctctanattcacaatgatattgtacacgcagcgcacgcgcgctgcttgtcacattatatcacagcgcgacgacactgcctcactacgttgatgctgcgcatggtactggcgtgtgtcgcctgtcgtctactacgtgttggggtccctcctaccacatcgatatac

SEQ ID NO: 1660 - DNA, 361 bp, Glycine max
  Probeset Number=SeqID_11439
cactgatgctttcctattggagtcaatatttagaaactccatctggggtcatcttgaattgcctgtgagccgcgacaatgaagagctcatatgcagagtagttagagagacctgcaaaaccgcccttgctggttatcatacaaccattgaagaggatcaaaagttgaaagaagcaaagctagattcaaggcatgctatagcagttggaattagacacagggagaacaccctcctacaccaaatttgcccagatcttcaaggaataacacttgcaatggggggggggggaaattatcaagaagggacgcccacggaccttggattttcgagggaaaacgccgcccccctcgtctccttggga

SEQ ID NO: 1661 - DNA, 181 bp, Glycine max
  Peptide Sequence Number=SeqID_8867
  Probeset Number=SeqID_11440
ctgcagattataaacacaattttacctgcgtgggaagtgcttaccggtagaagagatggcacagtatccgtaagtggtgaagccttggccaatctgccggcacctttctacaatttcaccacgctcaaagcaagctttgctagtaaaaatcttaatgtgcacgacctggttgtattatcag

SEQ ID NO: 1662 - DNA, 1548 bp, Glycine max
  misc_feature (1)..(1): n is a, c, g, or t
  misc_feature (24)..(24): n is a, c, g, or t
  misc_feature (38)..(40): n is a, c, g, or t
  misc_feature (53)..(54): n is a, c, g, or t
  misc_feature (58)..(58): n is a, c, g, or t
  misc_feature (103)..(103): n is a, c, g, or t
  misc_feature (115)..(115): n is a, c, g, or t
  misc_feature (119)..(120): n is a, c, g, or t
  misc_feature (235)..(235): n is a, c, g, or t
  misc_feature (243)..(244): n is a, c, g, or t
  misc_feature (246)..(246): n is a, c, g, or t
  misc_feature (250)..(250): n is a, c, g, or t
  misc_feature (281)..(281): n is a, c, g, or t
  misc_feature (412)..(412): n is a, c, g, or t
  misc_feature (446)..(446): n is a, c, g, or t
  misc_feature (529)..(529): n is a, c, g, or t
  misc_feature (632)..(632): n is a, c, g, or t
  misc_feature (658)..(658): n is a, c, g, or t
  misc_feature (731)..(731): n is a, c, g, or t
  misc_feature (1027)..(1027): n is a, c, g, or t
  misc_feature (1249)..(1249): n is a, c, g, or t
  misc_feature (1408)..(1408): n is a, c, g, or t
  misc_feature (1425)..(1425): n is a, c, g, or t
  misc_feature (1540)..(1540): n is a, c, g, or t
  Peptide Sequence Number=SeqID_8868
  Probeset Number=SeqID_11441
ntttggggggtttggtgtgtgtgnggggtggttggttnnnttttgataatctnntatnattcttcggtattatcttcgctcttatactctcttgtatgtttantcttttatattnttannatttaggaccgaaattcgccgcacatctcatacattcaacagacacagccacgaatataagagatgatgaattactacagacacggcactgcgtgtctcatcacacatctacttncttacttnntntctntagcccataagagaatgttatgatacacatnaatcacaccaacacccgacgcctagatcgctgcgtcgtatgtgtagactgagagcaaccagacccggcgaaagagttctagctgtatagagcgactatcatcccagcaacattaaactatcatcacatatntctcatcagaaataacacaacaccgacgatgtgnagagtatgcagtagtgtccacggccgcgcgcgcccgctctattgtataacctcaatactctagaatcatgtatatctcacatntcgtaaccccacctacctcccgcccggctaactcctatctctctcttcattctctcctttaatcatcccgcatatcgatctccgcgcctcctcttatcatgtntaggacgtggatgcagacgcaactanatgaatagttatgtcgaatataaccacaaacagcttgatatagaaatatgaagactatacaatcaacatctcngtagtggttactcacgcacgctgcagacatacaaataccaacaccacatactcaactcaatatttggatttattaattataataatgacacttaatagacgccacaattgactcgcccgcaaaacggataaccagccgctatactacgtctacacaggtcagattattcgacttagattatgatgaatgaccgtatctacgattagaactctacctgtagtagtaacaactacacaatacagtcgactataccgacctactgccctacattatgtaagtgtgtgttgggtgatgtncaacaatagagtccctaccgccgaccggcgcgccaatgcgtgctgtgttagagtccacccacaagctcgagcacatgctataccatcctcctctctcatacatctcatcaccctatctagtacttatatctatactccacctactccatcacccgacgtcgctctcagcgcgcctgctcgctgtccgtaagcacgttcgtcacgacgctcacggtaatagantcacgcagtctgacacgagacactaccgagccgagaggagatgacgtatcatcacactaacatatgccacgaagcaaggaactgtgtaccagagatgcattgcatcacctcaatccacacactaacaatgccgaactctcgaattatttatataatacnctatggactgactatanacaccgacatttcactacacactctctagatacagcaacacacaacagagctaaggactcctcatcgacactagtcatacaccagtgctgcgtaataagtaaatgcagaaaagtntagaacaa

SEQ ID NO: 1663 - DNA, 1869 bp, Glycine max
  misc_feature (108)..(108): n is a, c, g, or t
  misc_feature (110)..(110): n is a, c, g, or t
  misc_feature (164)..(164): n is a, c, g, or t
  misc_feature (169)..(169): n is a, c, g, or t
  misc_feature (179)..(179): n is a, c, g, or t
  misc_feature (218)..(218): n is a, c, g, or t
  misc_feature (220)..(220): n is a, c, g, or t
  misc_feature (308)..(308): n is a, c, g, or t
  misc_feature (322)..(323): n is a, c, g, or t
  misc_feature (343)..(343): n is a, c, g, or t
  misc_feature (394)..(394): n is a, c, g, or t
  misc_feature (503)..(503): n is a, c, g, or t
  misc_feature (514)..(514): n is a, c, g, or t
  misc_feature (518)..(518): n is a, c, g, or t
  misc_feature (520)..(520): n is a, c, g, or t
  misc_feature (535)..(535): n is a, c, g, or t
  misc_feature (537)..(537): n is a, c, g, or t
  misc_feature (598)..(598): n is a, c, g, or t
  misc_feature (600)..(600): n is a, c, g, or t
  misc_feature (748)..(748): n is a, c, g, or t
  misc_feature (943)..(943): n is a, c, g, or t
  misc_feature (958)..(958): n is a, c, g, or t
  misc_feature (966)..(966): n is a, c, g, or t
  misc_feature (1277)..(1277): n is a, c, g, or t
  misc_feature (1298)..(1298): n is a, c, g, or t
  misc_feature (1301)..(1301): n is a, c, g, or t
  misc_feature (1304)..(1304): n is a, c, g, or t
  misc_feature (1308)..(1308): n is a, c, g, or t
  misc_feature (1418)..(1418): n is a, c, g, or t
  misc_feature (1518)..(1518): n is a, c, g, or t
  misc_feature (1523)..(1523): n is a, c, g, or t
  misc_feature (1531)..(1531): n is a, c, g, or t
  misc_feature (1638)..(1638): n is a, c, g, or t
  misc_feature (1648)..(1648): n is a, c, g, or t
  misc_feature (1683)..(1683): n is a, c, g, or t
  misc_feature (1685)..(1685): n is a, c, g, or t
  misc_feature (1692)..(1692): n is a, c, g, or t
  misc_feature (1748)..(1748): n is a, c, g, or t
  misc_feature (1762)..(1762): n is a, c, g, or t
  misc_feature (1764)..(1765): n is a, c, g, or t
  misc_feature (1804)..(1804): n is a, c, g, or t
  misc_feature (1809)..(1809): n is a, c, g, or t
  misc_feature (1812)..(1812): n is a, c, g, or t
  misc_feature (1814)..(1814): n is a, c, g, or t
  misc_feature (1828)..(1828): n is a, c, g, or t
  misc_feature (1835)..(1837): n is a, c, g, or t
  Probeset Number=SeqID_11442
ctatgatagtacactacattatatcatgcacatcatctagatacacactgatatagtgcataatactgcattacatgtagatagctatatccgacaagctgtaggatntngatgtgaagatgatgctgcgtttcgcgcatgatcttcacgagactcacattatnggcanctattagcgncatctcgtctcgcgctctctctacctatccgacgatgangntcgacgctgcagagatatggctgccggtcacacacgcgacgcgcctcgacgcaccgatcgacgcaccctgctaaccgagaccgcggtncctatcgtcaatanntcgctcgtctccacacttgntatactctcaccgagtgtctgtcatatatttatctcattcttgtcgttttntcatctacactcatccgaacttgttctccgctgattataccgtatccaacagctgcaatgctgtgacgacgacgatatctactacaccgcttactacacttcctgcgantatgcgcatgngtantngttctctctatggancntgcgtcgcgtatataccatcagtagatctgtcagatacgctacacggcgccgtccagaagngngtctacgacggtgtcgtcgcgcttagtcacatacttgcgttagtctcctaagcgataactaagtcgctgcgactgctctccgattactacactcacacgttactcgcgtcgcacgtcgctgacctaacaagtaccctaacggtatgcncactcgagcgtacgagagccacgagcttcgaggagctcgagtctacgtcacgtccacctactgcgtctccatacgatgcctacactcgtacattcgcagctcgaatattacgagaccgcctgaagatatgtgcgtaagataatattcttctgagtatcaacgcgctcaacgacgtagtgcgctagcgagctacangcgacaccatgcagngccgcagntcgctctcgcatatcatatattccttcttcgtctatcgaggcgggcggggagaaaataacgagagagcgaggcaagaaagacgctgagcacaagacgccgactaagactctcacaacgctcggtaatctcgtatatacacaacatgctatgtatgatcataggaatagatcgttatgacgctggcgtccgcatcactacggcatctacaaaataaattagattaacaacgacagcgctagtacacataatctaaccaacactcgtgaatgcgcggggagatacaaaacagtacgcagcgcgcgagcataanaaaacgacgcgcgcgagatantgnggntagnaagcgcgacagaatgcgggcataaggtcggcggcatacgccgcccatcatctcacctcacgcagtcttagcgtgtcgcacgcgtcagatgcctgttcagtatccttatgnatatcacttcatagtatgtctgtatattgcacgataatgagaaactatctcaagacgctgtatcctgtgctatataatctgtgtattgcaccaggcgggnccagntggcgtgngtgttgcgtctcataaccagtgcgccgatcacgctcaccgcgcgcgtacgcgcgctacaccagatgccacgtaggagacgtccagcgtagcaggcgttgcctagatntagtgttagngtggagcgggtatgtgcgaggtggggggggggagngngtgaganacacgacgattatcaccgccgctcgtcaggtgacgacgagtggagtcggtatagtntgtgagaagagagnannttgatcgtgcatgaccagtggcacagttctcgtgtgtgnggtgnggngnactatcacatcganatgaggnnngcccgtactggtctgactggtcgcggtgtcga

SEQ ID NO: 1664 - DNA, 1386 bp, Glycine max
  misc_feature (16)..(16): n is a, c, g, or t
  misc_feature (156)..(156): n is a, c, g, or t
  misc_feature (210)..(210): n is a, c, g, or t
  misc_feature (362)..(362): n is a, c, g, or t
  misc_feature (691)..(691): n is a, c, g, or t
  misc_feature (1164)..(1164): n is a, c, g, or t
  misc_feature (1291)..(1291): n is a, c, g, or t
  misc_feature (1295)..(1295): n is a, c, g, or t
  misc_feature (1319)..(1320): n is a, c, g, or t
  misc_feature (1340)..(1340): n is a, c, g, or t
  misc_feature (1353)..(1353): n is a, c, g, or t
  misc_feature (1365)..(1365): n is a, c, g, or t
  Peptide Sequence Number=SeqID_8869
  Probeset Number=SeqID_11443
ggtccttattgcgtcncagcaagtagagagtggatgtgtgttaggtcgagtatattagagatacacgcagcagttgcgagcactgcgatcctcgcggcagtacagacagagtaagagatactatgcggaataggtgctatatagtgagtgacacantatagtgtgagagttgatattggtagttggcgtatgtttgtggatatgcgagtnggaagtgagggccggaggcgcgctgtacgtgagaccgtgtctcctagtagcgatgtaaaaggtatgccggcgactgcacggtaggcgcggaggtcgatgcgcgcgctagcgtgtgagtaacgggcgtcgtatgcgcgtggagcgtacgccancaacacgtagtatacagtagtggggatggatcggtctagtatcgcgaagatagcatctattctatctcgtgcacgattgtggcgctcgtagtgtgctggcgcgtttgcgtcaggttctcgcacgtagaacaccaccacgtaacagagacacaaagagcagcacgcaggagagagtgaaaacaagagcaacacatgtatagtagccgctctcaactattcgcgcgccggaagaaatagggtataggaggacggacgtgaggggacgggcgcgcggcatagattgagtcgtatagctctgtccttggtggcattcatctcgtgctcatctntttatagatgcgacatataaaatgtgagtcataacgccgccacctaggccgcgcgggcacgcgcacgctccgcgcacccaccagagacagacgccgtgcgagacggggtaggggagtgaggacaacaatctaagagtggtattgtatttatatcctcatggtttcaatcacccccagacccccgcacaatcaaccacaaggacggagaagacaaaaaacagcagacaccagtggtaagggcaataggaagaagaaaaagcgcgcgtattgactgcgatactcagatcaaaaaacaaatcacagcagaaaaacataggaataaaacggggggagcgcagaaaaaagaaagatgtaggtacgacggagagagaggaagacattaaaagagatatgaattgagagtgggcgcgaatgtagagaaagaaaggaggcgtggtgtcacggggttcagagaggagaacaaaacgaatacntaagggtaaaaaaagcgtaacacaatttggaaagtagccacacctcctataatccctctctccccctactaggaggaagtgagtcgctatcgtagaacacaacaaaaacacaacagacgaggagggncgcntccgcggtttttgtggtggtgggnngggggttttttttgttattntgtgggggtggtntggagggaaagnaaaatagaagaaacccaaaaa

SEQ ID NO: 1665 - DNA, 755 bp, Glycine max
  misc_feature (755)..(755): n is a, c, g, or t
  Probeset Number=SeqID_11444
aaccagaattaagatttaaagtgtgcacactaaattaaattttcgttttgtttcgatatttctcatgagtttaagtggcctctttagaacccaatttcttcaatgtgtcagcagcactcctttgagaaaaaaaatccccaaggtctctgctaaaactctcagaaaaagaaaggaaaaaaagagactctcttacatcaacgtctattctagtgaatataccggagaagctcctcttcatgcttggatggaccctaaaagagtcaaagccttaatgaccgcataccaagactctagaaatactcacagattcaatagaattgttgatcctaaagataaagagattattgaagaaaagaataaggaatttggtgacttctattatcacaaatggagagcagaactcctcagagaaaaccaacttttagccaaggctcgtgaagctttagatgaaataaacaaccttccttattatctcagagatgaaatgaatgtgaatagaggccccaagcttgatactgtcatccctgaaaaccatcactttataaatatgtataatgagcaaattctgagaacacatcctgaagaaatcgcaatcagaatgcaactcggtgaaagaattgagaaaattgttaatgatgaacttgagcaaggtgaataaaaattattgtaaggatccagagaatgtattggtagtattttgtaatgttattgttgctgcttactgtctttaacatcaaaaaaattatcatctcttn

SEQ ID NO: 1666 - DNA, 573 bp, Glycine max
  Peptide Sequence Number=SeqID_8870
  Probeset Number=SeqID_11445
gaaagggatctccggtccccaggccccggctcctccccttccgattccaatctggtctcgccgggcctggcggcgagggagagatggggaagaaccaggcgtacaaggcgatgcagcgggcgcggttggggtcctcgtccggcgcgccgggcgccgccgacgcccccgaagacggcatggaagaggaactgaaaaggggcgagctggaggctgacccagaccaaatgatgagagagtatagagctcaactggatgctgaaagagctcaaaagctagccaaccggaagaaatccactcaggggcaaactcaaaatcatcatcttccacgaaaagaaagcaaccataaggacgcaaagaaaagcaagcaaacggagcaccaagcccacaagttcccccacagcccaggatccaagatcaatcttcagaatctttcaagcagcctaccgatggaggcctagggcgctcccaggaaagtaccagaatgccggcggcgaagatctaggcggcgtccccgggcccagggaaaaaaagccaccagcccggtccccacgggcccccaaaacccgccgatcg

SEQ ID NO: 1667 - DNA, 372 bp, Glycine max
  Peptide Sequence Number=SeqID_8871
  Probeset Number=SeqID_11446
attcaatccttatatatccatgagaaggttttaccacgtggatacgttcttgaatgcaaccttagcttgcattggacgtgaccagttatcaaccggtttcgatagaggcctgagaataactagatatcaatttaccaggctcattattagtgcgcccatgtaacccacaccggattaatagtatatgggccggagtgcatcatcctttttgaagtggatgaattaggaaccaacgaagtcgcatgtatgaacaaagagtaatattccttccccatctagccaatataagttagagggtgggtattctgaggggaaggtagcgacaccatcacataattaggtatggagagagtctgttaatttcttctgcag

SEQ ID NO: 1668 - DNA, 1609 bp, Glycine max
  misc_feature (41)..(41): n is a, c, g, or t
  misc_feature (43)..(44): n is a, c, g, or t
  misc_feature (50)..(50): n is a, c, g, or t
  misc_feature (52)..(53): n is a, c, g, or t
  misc_feature (55)..(55): n is a, c, g, or t
  misc_feature (57)..(57): n is a, c, g, or t
  misc_feature (60)..(60): n is a, c, g, or t
  misc_feature (62)..(62): n is a, c, g, or t
  misc_feature (69)..(69): n is a, c, g, or t
  misc_feature (90)..(90): n is a, c, g, or t
  misc_feature (235)..(235): n is a, c, g, or t
  misc_feature (390)..(390): n is a, c, g, or t
  misc_feature (473)..(473): n is a, c, g, or t
  misc_feature (524)..(524): n is a, c, g, or t
  misc_feature (568)..(568): n is a, c, g, or t
  misc_feature (629)..(629): n is a, c, g, or t
  misc_feature (700)..(700): n is a, c, g, or t
  misc_feature (708)..(708): n is a, c, g, or t
  misc_feature (747)..(747): n is a, c, g, or t
  misc_feature (810)..(810): n is a, c, g, or t
  misc_feature (835)..(835): n is a, c, g, or t
  misc_feature (883)..(883): n is a, c, g, or t
  misc_feature (893)..(893): n is a, c, g, or t
  misc_feature (898)..(899): n is a, c, g, or t
  misc_feature (927)..(927): n is a, c, g, or t
  misc_feature (939)..(939): n is a, c, g, or t
  misc_feature (996)..(996): n is a, c, g, or t
  misc_feature (1016)..(1016): n is a, c, g, or t
  misc_feature (1040)..(1040): n is a, c, g, or t
  misc_feature (1075)..(1075): n is a, c, g, or t
  misc_feature (1111)..(1111): n is a, c, g, or t
  misc_feature (1125)..(1125): n is a, c, g, or t
  misc_feature (1159)..(1159): n is a, c, g, or t
  misc_feature (1182)..(1182): n is a, c, g, or t
  misc_feature (1206)..(1206): n is a, c, g, or t
  misc_feature (1235)..(1235): n is a, c, g, or t
  misc_feature (1280)..(1280): n is a, c, g, or t
  misc_feature (1283)..(1283): n is a, c, g, or t
  misc_feature (1291)..(1291): n is a, c, g, or t
  misc_feature (1341)..(1341): n is a, c, g, or t
  misc_feature (1372)..(1372): n is a, c, g, or t
  misc_feature (1415)..(1415): n is a, c, g, or t
  misc_feature (1538)..(1538): n is a, c, g, or t
  Probeset Number=SeqID_11447
tgagtggtatccttcttttttcctgttaggaaagaaagccncnncaaccngnnantnttntntcgttcntccgtgcgagtagcggccccncaagaggcggaggatggcccccacactccgagggagggacaggtccgcctatctaaataaacaaaagaagacgatcacctctccgaggggtctagtgaagaggagctagctgctgctcatttttatcttctctctctcttctcgnctatctacgaaaacaaacgtgctactaccccatctctcatcttatccttaattagtatagtatcatctgctctgtatcacacactcgcccagagacaagacccgtctctctcctgactatgctaaataataaataagacgcatcgtcctgtagancgccatacactcaacatcaacctcgcgctctatctctataccttatattacgcaacaccacgaagatgctataatgtaagcanctagacatacctcagatagcgtgagcaagctattatcgttggtctagggcncacagcagcctcatctcaaaatcaagcacgccctcgatagctanaggctccttaaacactcgataccctatgagtgagcaccggaagctacagtcgtcgcctacncacgtacgctcgtggatatttcatctctagcgcatcatctccaccgtaggtcgcaatatgagactgcgtgntatatatntcagctccgagtagcactccttctgctcttgagcctctnactgaagctggctggatacgtgcgcctcttctctgtggagacagtacacagtcgtgtagagtntattaattcctcactctcacacggntacgactgcctgctccgtattgcactatttatgtcatattagttaganatataatatnaccannatatgtcgtgtcacactcacccccaccnctcgtctctgcnaatacgatactctatcataggagggtatgaatggtacgtcgctgtgtagtatgagcnctgtgtcagatacctctctncacgtgccactactacgagacgcntgctctcagacggctcatgcgcgtcactcgatgcncactcactcatctacacaggcgtctaggaaggcacngcaggcgactatcntcatacgtatcggcatgttctcgatcgtatagtngcgttgcgtcgtctcctcatagngtaggtaagacacgatgctttctncacgtcaactctttctgcagagatagatngtgtgtggagccgagcgctcacactactacgacactctctcctcngtnccgtcgtncactatacgtatcgctgcttctagtgcctttgtcttatctgtgcatgagncaacgcatctcacgcgagatatgacgtaaantgtccatttatcgcgcgtctccaacaggcactagctctcgtantacgctcgtcgccttctatgacgccaccatcgacgagccgttgatatcgatagtgtcttccttctattacacaacacgacataggcaaatataactatacacgagcaagttcacatcccctangtcgcgtcggcgtgatctatatcgatctaattcggctgaggcgaactacgcgcgcagttctcgcacaccaa

SEQ ID NO: 1669 - DNA, 1448 bp, Glycine max
  misc_feature (1)..(1): n is a, c, g, or t
  misc_feature (49)..(49): n is a, c, g, or t
  misc_feature (52)..(52): n is a, c, g, or t
  misc_feature (154)..(154): n is a, c, g, or t
  misc_feature (219)..(219): n is a, c, g, or t
  misc_feature (362)..(362): n is a, c, g, or t
  misc_feature (436)..(436): n is a, c, g, or t
  misc_feature (454)..(454): n is a, c, g, or t
  misc_feature (1195)..(1195): n is a, c, g, or t
  misc_feature (1241)..(1241): n is a, c, g, or t
  misc_feature (1245)..(1245): n is a, c, g, or t
  misc_feature (1263)..(1263): n is a, c, g, or t
  Peptide Sequence Number=SeqID_8950
  Probeset Number=SeqID_11448
ntccgtcgcgcggcattcgcgcaataacgagcggcgcacacaacgtaanacnccccgagcatcaaccatcacatcgtgtggtccgcggtcacgtgtacacgacagcatcgagaagtatcacatccaccaaatcacgcacctccacacgcgcgcncccacgcccacagatctatcaccgatacagtcacagagtgacgcgccgtatagcgcagcgcacgnaaacgcacgcacacagtgagcgcgcgcgcgcgcctcacgtccacaacacagagagacgtagtactcaagacgcgcgccgcgtcacactatgtcccgtcgcgccggaaattgatcatatgcatgtgcgaatagagaatatcatngagtgatacgaggtcagcacccgccgccggccacgagacgttacacacacgtactccgcgccccctccacacanacgcgcaacgcaaagcgnctacgacggcacccaaacaggactccccgcaatcaggcggcgttcacacaccgacaccggcgcgactacagcggtcgagcaccagccgctctctgccgacacaggaaacgcctacatcacgaaccaaccatctgctactgaagtggaggtggacgggcgacagcaccacaccgcgcgccatcaacacagagacagacaacacacggcgagcgcgacaaaagcgaggaacgcgacatcatcagcacacaccggaagacaacgaggcgagacgcgcgcaacacgaccgaagccaaaatacagaccggcagcgacacacaccatccagcggcgtgcgccaacagcagaacacagacactcccacgcacccacacgccgccgataaaaaaacacacaagacgggtccgcaacgatgcggacacaccatcagcacaggcgcgcacatcacgccgaaacataaacacactctaaacaccaacatcagagcgggccggggcgaatgtcgccgccaccacacgcgcaatcagcattcagcgctccgcaccacactaacgaaacaaacagccgggggccacgcgagaaatcacacaaaaaacgcaaacaacaccgcatacgcgacgtgaggccgccgcgcgcgagtcgggggagagaaacatactacaaaagtaaacggcgcgcgaggagtcagagcggcgcgatggagataaaatatagaatgagaagaagaaagaaggagtgaaggcncgcgcgcgcgcccgacattaaaaccgaccgcgcacgcagcagcgcnctcncaacaccaccaacgtgtngtacacgagaccaacacgcaatactatatcagacacacattacacagacgatagagaggaataacatcgaggacgcagcgaatcggcccgaccagccacgtgtgtacaatcgaaaagaaaacaaaaactccaaccagtcacaacagaaatcagagaggaacgatagagaatgcacacgcaccacc

SEQ ID NO: 1670 - DNA, 1553 bp, Glycine max
  misc_feature (1)..(170): n is a, c, g, or t
  misc_feature (1469)..(1553): n is a, c, g, or t
  Peptide Sequence Number=SeqID_8951
  Probeset Number=SeqID_11449
nnnnnnnnnnnnnnnnnnnnnnnnnnnnnnnnnnnnnnnnnnnnnnnnnnnnnnnnnnnnnnnnnnnnnnnnnnnnnnnnnnnnnnnnnnnnnnnnnnnnnnnnnnnnnnnnnnnnnnnnnnnnnnnnnnnnnnnnnnnnnnnnnnnnnnnnnnnnnnnnnnnnnnnnnngaatctctgtgtgtcatcacacttcgctagatccagccccatcatggcttcagagaagcaagcggctcttgccgtcactccctctgatgctgatgctcctaccatatttgacaagatcatcaataaggagattccttctactgtggtttatgaggatgacaaggtgcttgccttcagggacataactcctcaagctcctacacatattcttatcattcctaaattcaaagacgggttaagtggtctatccaaggctgaggagaggcactttgagattcttggccgccttctgtacactgccaagctggttgcgaagcaagaaggactcgacgacggcttcaggattgtaattaacgatgggccgaaaggatgccaatcagtttaccacattcatgtgcacctcctcgggggaagacagatgaactggcctccaggctaaagtgtatgagagtaataatctgcttgtgctatcttttaataatggtatagacgattgggagttccccccgcgtgtccgtggctaggcggcaggacccgatggagaaggatgaggcaaggtcgccggtgaccatggcatcaaaactggtgtgagggcggaccatggaaccaccactcgaggtcgcggcgacgatcttgacacggcgtcgagtcgccgagtttagggcgtcatacagtgcgagcaccagccgcttgttgctggaatcagcgtccgaaccacttgcctgagagttagccagttcgagaaaagaattccgcgttgcggtttaataatcaaatacaaattaagcgattcgaggaaattcgagcaagtaaccaaaccaaacaatgtcttatttttaaaccaaacaattcctcgggggaagacagatgaactggcctccaggctaaagtgtatgagagtaataatctgcttgtgctatcttttaataatggtttaagacaactaataagttgctacattgaagtgacaccatgtagttaaagataatcagtgttgaatgtgtttaaacactttatgttggatgtaggctactgctactactaagttccaaagtcgttttctagattctaattgtggatggtgtcactctcttatgctatagtttaaactgccactctaacattagtggcatcaaccaatgcttgtagtgggtgtttaatttagttcacaggcatggcaaattccacctaactcagccccaccccacatggggtgggttaaaggacacagcaagacaaggtggagttcaggagtagtgattgtggagtatggtaaatgtaccacaccccctatataannnnnnnnnnnnnnnnnnnnnnnnnnnnnnnnnnnnnnnnnnnnnnnnnnnnnnnnnnnnnnnnnnnnnnnnnnnnnnnnnnnnn

SEQ ID NO: 1671 - DNA, 1432 bp, Glycine max
  misc_feature (1)..(1): n is a, c, g, or t
  misc_feature (25)..(25): n is a, c, g, or t
  misc_feature (29)..(29): n is a, c, g, or t
  misc_feature (32)..(32): n is a, c, g, or t
  misc_feature (34)..(34): n is a, c, g, or t
  misc_feature (144)..(144): n is a, c, g, or t
  misc_feature (527)..(527): n is a, c, g, or t
  misc_feature (756)..(756): n is a, c, g, or t
  misc_feature (758)..(758): n is a, c, g, or t
  misc_feature (774)..(776): n is a, c, g, or t
  misc_feature (783)..(785): n is a, c, g, or t
  misc_feature (787)..(787): n is a, c, g, or t
  misc_feature (795)..(795): n is a, c, g, or t
  misc_feature (802)..(802): n is a, c, g, or t
  misc_feature (827)..(827): n is a, c, g, or t
  misc_feature (852)..(852): n is a, c, g, or t
  misc_feature (1041)..(1041): n is a, c, g, or t
  misc_feature (1092)..(1092): n is a, c, g, or t
  misc_feature (1259)..(1259): n is a, c, g, or t
  misc_feature (1276)..(1276): n is a, c, g, or t
  misc_feature (1298)..(1300): n is a, c, g, or t
  misc_feature (1314)..(1314): n is a, c, g, or t
  misc_feature (1354)..(1354): n is a, c, g, or t
  misc_feature (1357)..(1357): n is a, c, g, or t
  misc_feature (1359)..(1359): n is a, c, g, or t
  misc_feature (1362)..(1363): n is a, c, g, or t
  misc_feature (1377)..(1377): n is a, c, g, or t
  misc_feature (1387)..(1387): n is a, c, g, or t
  misc_feature (1412)..(1412): n is a, c, g, or t
  misc_feature (1417)..(1417): n is a, c, g, or t
  Peptide Sequence Number=SeqID_9022
  Probeset Number=SeqID_11450
ngacagtatacacataagtagatantatngcntngatgtgacaatagacatcacgttctatcacagtttcaatgatatgtactgatatatttacattatatgatattgtagtgatactattgatgtagcgtgacagtagagtcngctgtgagagttgagtatagagtgtgccacgaagtaattgatgtgagcccgcgccgcggggcgctgtacgcgtccatcgcgctatatgatacatgccggtcaacgtcatgcgtacacgtcgcctacagtgaagatatgtataggatcatagcgagagtacagcacagacagtagaatgaatacatcacgtagcactcgcacacagacagtgagagtatcacgtgtagacgtctgcatagtctcaagattcatggtagcagtgcatatgtgacattgtcagagtaacagcaatgatagaggaggtggtgatgaggagcagtgactaatacaagatgtgagcaggtgtaatagtggacacgccgagacaacgcaggtaagcacanagatgtgcagttgagtgtgggcgcggggagagtatataatcaacatatgttaatctcgtcatgttgactaacagccacatatcgtatggtcgcgagttcacagtaccactttctatgtagaccgtagtgtaggccagtcgagacagcgagagcacgtgagcacgatgtagtatggatgcaatagacacacatagatgatacattacagctctatcatatatcatgttcntntctccccacccttttnnntttttcnnntnccctcttngtctgtntagtctattgctgtatgtttggtgntagtcgacagtcaggacgcgagtantaacagcgcactatatatatgttgttgtcatcggcagttgtgtacgtatcagtgagtgacgccagtgtgttctcacgatcatctcatacataataccatgatgtcgtgtgtgacactgtcgagatgtgagtgttgatgtcgcgtcagacgatctacataatgtgagacgaccaacagtgcgacacatcnataccaccacaacgacaacataatctaaaatatatatgtaacatatacatnaagatactgtgacctacagcgagtattacacgaggctgcggcgagagagtacgcgcagcatcacgagtcgacgccagcaggcggcgtaccgagagcgagacgaggtagtatgatcgttggatgatgctgagaatagtggcgacgtaccagactaatcactatcgcanttcgtgcacacaccacncgcaccacactaccaagcgccnnncgcgcacggtcacntcccattccgcatctttcatattattctttcctccccccnctncnccnnttataccaccacantgtatataanaacaatatctctcacaccacccccncccancccaccacccaaaca

SEQ ID NO: 1672 - DNA, 270 bp, Glycine max
  Probeset Number=SeqID_11451
ggaaagtctgcagtgcgctgtgttttcggatcaaatcgaagggatagtctaagtctttaaaatggacatcacgccaggcccggtccgaggtccatttaggaagaatcagcccagtgtggcaggtcaatcgtctctaatatgcagatttgttgcctatggtcccctacataaaccggtccaagccacccagtcttcgggtcaaggtggtcgcctgaaaaaaaaggtagtcaataaaggtttggactatcaatatttcactctgcatagttt

SEQ ID NO: 1673 - DNA, 1626 bp, Glycine max
  misc_feature (70)..(70): n is a, c, g, or t
  misc_feature (73)..(73): n is a, c, g, or t
  misc_feature (264)..(264): n is a, c, g, or t
  misc_feature (432)..(432): n is a, c, g, or t
  misc_feature (848)..(848): n is a, c, g, or t
  misc_feature (1004)..(1004): n is a, c, g, or t
  misc_feature (1016)..(1016): n is a, c, g, or t
  misc_feature (1137)..(1137): n is a, c, g, or t
  misc_feature (1141)..(1141): n is a, c, g, or t
  misc_feature (1144)..(1144): n is a, c, g, or t
  misc_feature (1255)..(1255): n is a, c, g, or t
  misc_feature (1257)..(1257): n is a, c, g, or t
  misc_feature (1326)..(1326): n is a, c, g, or t
  misc_feature (1339)..(1339): n is a, c, g, or t
  misc_feature (1516)..(1516): n is a, c, g, or t
  misc_feature (1565)..(1565): n is a, c, g, or t
  Peptide Sequence Number=SeqID_9023
  Probeset Number=SeqID_11452
cccatctcgcctcatttgatattttattattgtattctatttatgccatcaatcacccccacacaccacncancgtacacgatatgaagaatctctgacggaggtggtggcgcgcggtctggctccatcgtatcatatgtgtgtatttcactcagcggccgcgagtgtgtaatgttctttagaaatcaggatgctatgttgagtttgcatccgacgccgctatcttgcggagagagctggtagtggaggggcggcatcgcgttngacgcatctaagaagactattgataacacatccttatgattcattatcctcttgtctcctcttgtatcgccgacgggcgcatctgccctgtatttctgtcgttcggctctcctctctccctcgtgtttttactggttgttcctgcacgactagtatacgcgcgccgcnagtacatgtatctcttcttccattcttagcgttgatcctcactcgctccccatccttcttgatccgtcagtggtcgtgcgcggccgtggtcagttatatagtagttgtattattttattatgatttatatataatgaccgcacgcggcgtgtgtgatttagacgtgttgagtgttgcacgcggcgcggcgtcgttggtacgaggggtgattagatttatctgcggcaggagatgtattagaacgatgccattataacttacacacagattgtaatcgccgggatgtttactcatccagcgccccagcgccagctcctatactcttgcgttctacatatatatatcgcgagccacgtcgtcaggcaggctaccgacagtagtatccgatacatactccgcccgagcgggtggtgtcngtgcatgtgaaagatagctgtagtgttggttgtcgtgtacgctcggcgtgagagttgttgatacgaccacagccagctgcgctgaaatcatcgctgttgcttgcgtttacacgttctcgttgagcttggtattgctgttgtcatgtctcactatcnctgcgtctactngcctatacgtgaatgatttcactagatgtgtgtgtcatcgcctgtgacgttcaggattggtatacgtctactccacgtacgccctcgtgcgctgccgccttattcgtctcgtcctcatctnctcnatnatctgttatgtcgtcgcgttgcttcgatgtgactcccgcgcgtctcatgcatcactcatcactgcgagcgctctgctctctcttctctactgtattctcttcgctcatcgntntttgctaagaccgatacttgcgatcatgcgatgtgattatgtcgcatgagtagtggtagagcagactgncgactcagtgtcnattctacgattattgatatgtcattagagctatgcttatatatatgtcatgcactcatctatgatagaggcatagtgtatgcggattcaccatgtatggtgggtgctgacgtcgacccgctagctgttatcgagcatacacactctctgggctatgtcataatgtgcatcgtaaagngcacaccgcgccggcggcgacacgcagagctagtgcgacgatgaggtantgctacagtgtagattcgtatatacgtagcgtcgcatccctcacatttactacgtttgtag

SEQ ID NO: 1674 - DNA, 1363 bp, Glycine max
  misc_feature (1252)..(1252): n is a, c, g, or t
  misc_feature (1329)..(1329): n is a, c, g, or t
  misc_feature (1356)..(1356): n is a, c, g, or t
  Probeset Number=SeqID_11453
actggtggttggatgcatggtgtatgtactcacccgcgttctgaggcaccagtgcatcgctacacccgcgcggcggtcggggactcacctacgtatacaatataactagatatcactcaccaaaccacctccccccatcactcatatcatccggtcactgatccacgtgcatttcctctacttcctgtacttacctattaagtgggctctcgtacgcagtttgtagtatctcatgtgcaaccaggcgggaaatgcggcggacgcggtgtgtatagaggtggtgattcgaggatgcggaggttgatgccgatttctgtgcccgggcgctcgttttgtatcgcatttcgtgtctcatctcgagctcctgtctgagatgcttcttcgcgtgtcgttcttttgttcttctcaccgcccgctattctcgagcgcgacgtgacacgtccctggcgctgacggaacgcgcgcgcccggcaccgccttggtcgtgtacggcgagagtccggatgaagcgccagaccgataactacacgactattagcgcagctggatttgttagacctaacgcgcgtgcagtacgtgtatgttattctagtatcatgaataaagtttgtgttaatatatgataattattcatatttctaatacttcctgatctgtgatgtgtttgtgtccggcgaagggcagtccgcgatctgttatttgcttcccattgacttattcctccgcttgatatcgtactgactctcacgctgacagctattggtataacgcctgtaacgcaacccacagctgattcaccatcgagacattaatagtattagttgccttcgcgcgtgtgtattgtatgactgggatttgtacataggtgtgtgttattatcgccatgcaccacgcacgctttatgagcaaaccgcgacaaagatatgctacaactacacctatctattctcgcccatcgttacgtagaaacgtcgacttactttctgactttaaccttacatgtaatcagtgtatgttatggtctaggcgcttttccatctccttcatgcgacgctgagtgttttgactcatactgctcggccccgactgtcaattatattattgattgaaataggtggagcatacgaactccagttttaccagagcggccacttagtctgcttatctgcactacattcacatcgccgcttatgtttgtctccctgaatgcataacacacagtatagttagaatcttcacgcctattctctcngctggtctcatcctatgcgccaacctcgttcgtctgcaatatttacgcaagtgtccgacttgaagatcgatagatgnatcgtgtaattatacactcgtttgagnatctgtg

SEQ ID NO: 1675 - DNA, 429 bp, Glycine max
  Peptide Sequence Number=SeqID_9024
  Probeset Number=SeqID_11454
ctaatgcaaagaacttgaacggagaaaacgaatctgcccctcaaaccactctgaaaaataatgaaatagcttcaggtttttcagtctcaccaaatctttcaagccaaagtcaatcagctagcgtccgggataaattcatcaaccttgaattgaataatctgaaatcttacggatattactatggcatctattgtgttccaagacactttaagccttacatttgggatggaataatcattatcagagcaggcttatacaaaaatgcaaaactcaaattttatctcgaactcccccgtggattccctaaaactaaaccagaactttacttcgtttccaaagtttaccacccacttgtcaactatgaaactggacacctcgatacaaagttgttgagtccagactggaaagggaatagcactatatcataca

SEQ ID NO: 1676 - DNA, 564 bp, Glycine max
  misc_feature (56)..(63): n is a, c, g, or t
  misc_feature (68)..(69): n is a, c, g, or t
  misc_feature (118)..(118): n is a, c, g, or t
  Peptide Sequence Number=SeqID_9025
  Probeset Number=SeqID_11455
cccctttgctggatctctttttttcttcttctcgtccttcttcttttctctctctnnnnnnnnctccnncatcgacatcctcagtcttttggacttcctggtcggcctgagtatgatncgtcatccaagtctttcaaaggggtctttgggccacttccatctgatgttgcaatggagctcagtaatgtccttaacaatctgaatggtacaaaagaatccatcaaaggtgcaaaactttggttcatccagagatttgcatttgcggcagccctagcagaggctcttagagatagggtctttgcattggatgaaggtgagagacaatttcacataatatgccttgccaatgacattatttgggtcatcttaaataggaggacaatcagtaatgaccttggccatgaagctacttgcctttagagatgttttaggttccattcttggaagagtttatcatgatgcataaagtaatgcgggattcaggaaaagcaatcacacgggatggctggagttgtaatattataagaaggtgttaaacacaataaagttggaactggagggggg

SEQ ID NO: 1677 - DNA, 1466 bp, Glycine max
  misc_feature (76)..(76): n is a, c, g, or t
  misc_feature (249)..(249): n is a, c, g, or t
  misc_feature (256)..(256): n is a, c, g, or t
  misc_feature (283)..(283): n is a, c, g, or t
  misc_feature (507)..(507): n is a, c, g, or t
  misc_feature (557)..(557): n is a, c, g, or t
  misc_feature (600)..(602): n is a, c, g, or t
  misc_feature (674)..(674): n is a, c, g, or t
  misc_feature (685)..(685): n is a, c, g, or t
  misc_feature (697)..(697): n is a, c, g, or t
  misc_feature (888)..(888): n is a, c, g, or t
  misc_feature (925)..(925): n is a, c, g, or t
  misc_feature (1100)..(1100): n is a, c, g, or t
  misc_feature (1102)..(1102): n is a, c, g, or t
  misc_feature (1109)..(1109): n is a, c, g, or t
  misc_feature (1118)..(1118): n is a, c, g, or t
  misc_feature (1120)..(1120): n is a, c, g, or t
  misc_feature (1122)..(1122): n is a, c, g, or t
  misc_feature (1150)..(1150): n is a, c, g, or t
  misc_feature (1222)..(1222): n is a, c, g, or t
  misc_feature (1301)..(1301): n is a, c, g, or t
  misc_feature (1386)..(1387): n is a, c, g, or t
  misc_feature (1397)..(1398): n is a, c, g, or t
  misc_feature (1404)..(1404): n is a, c, g, or t
  misc_feature (1406)..(1406): n is a, c, g, or t
  misc_feature (1413)..(1416): n is a, c, g, or t
  misc_feature (1418)..(1430): n is a, c, g, or t
  misc_feature (1433)..(1435): n is a, c, g, or t
  misc_feature (1438)..(1441): n is a, c, g, or t
  misc_feature (1443)..(1443): n is a, c, g, or t
  Peptide Sequence Number=SeqID_9026
  Probeset Number=SeqID_11456
gcgtgatacgagtgatagtggtgacgtgtaacactaccataagcaaagtagatattgtgagcagagtcgactagcngcagtgatctatggtacatattctgtagaatctgtaggtcgggaacatgggagatggcagtcgtccttctccccccgtccaccgaggtcgcgccgggtgcaggtaagtcgtgcagtgtagcatgtacatactagccacgtcatccgtgatgcagtagtaggaaagcggggcgnggatgcnccgcagatggccgcgagcccagatacncggtatcctgtaatggtccgcttgggccagtgagcagatctctcctctcgcacccacgtccaacaccggactctgaacacgttcatgatactcataccacccaattaagcggcgcgcagcagtgtgagagcgaaccacattacatcgacacagaaattgacagcacactcttaacacgcccgtggagatgtgcggccacatctactccaaactctggtgggagnggcgcttgagagcgcacatgattggtatcggtgcatggagcgggcgcggnctttacaccaccctactacagcgagtcgttgcggaggttgttnnntccattcatgtgatgtttcgtaaaaacatcactcatataactcgagtgaatagtcttgttcatagttgttcnttatatgtgtntaaaccacacgnaccaccacacccccaccgacgtgcatcagagacggatgtgctcccgactgggcttaacttcacacgacgccctaacactccttctagtctgcgttctatgacgtggttattttgagactggcacatcacgagagtcgtgctttacatacccaaatcaacatacctcactctcaggctcaggcgtctgtctntccttatatctctgtagtctatggcgctctctatatngagtgtctccatactgatatgcgtctattagttctaattgtagtccgacatcatgattaacgcctacagctccagttcaataccgagagccattcacgcgctccggggcgttttatatatattcgtcggcacgattactctcgaggaactcacgcgtacggtgtcgcggtcttgncngaggatntgcgtatananantgagttgtttatagtgggagtacgtggngagggatctaatgtatttgagatagagatcctcgctttcgacatagagtgtctcgatgagagtcctctctantacctgtcgcgctcaaaccacataagtaagggaattcacaaggaggtagtgcgttcccttatatattattgggtggtgngggggggacgaccccacggcagacaatagtacactctcgtcgtgcggcgcccactgcgctgtcatctttttttgtgtcccctctnnacacaaaaannaaaaananaggggannnngnnnnnnnnnnnnnaannnaannnngncggcgggcacaaaaaacacaacc

SEQ ID NO: 1678 - DNA, 1537 bp, Glycine max
  misc_feature (14)..(14): n is a, c, g, or t
  misc_feature (18)..(18): n is a, c, g, or t
  misc_feature (36)..(36): n is a, c, g, or t
  misc_feature (42)..(48): n is a, c, g, or t
  misc_feature (53)..(53): n is a, c, g, or t
  misc_feature (55)..(55): n is a, c, g, or t
  misc_feature (64)..(64): n is a, c, g, or t
  misc_feature (67)..(67): n is a, c, g, or t
  misc_feature (72)..(72): n is a, c, g, or t
  misc_feature (81)..(81): n is a, c, g, or t
  misc_feature (131)..(131): n is a, c, g, or t
  misc_feature (168)..(168): n is a, c, g, or t
  misc_feature (176)..(176): n is a, c, g, or t
  misc_feature (328)..(328): n is a, c, g, or t
  misc_feature (518)..(518): n is a, c, g, or t
  misc_feature (573)..(573): n is a, c, g, or t
  misc_feature (616)..(616): n is a, c, g, or t
  misc_feature (884)..(884): n is a, c, g, or t
  misc_feature (904)..(904): n is a, c, g, or t
  misc_feature (945)..(945): n is a, c, g, or t
  misc_feature (1030)..(1031): n is a, c, g, or t
  misc_feature (1035)..(1036): n is a, c, g, or t
  misc_feature (1038)..(1038): n is a, c, g, or t
  misc_feature (1041)..(1041): n is a, c, g, or t
  misc_feature (1113)..(1113): n is a, c, g, or t
  misc_feature (1243)..(1243): n is a, c, g, or t
  misc_feature (1447)..(1447): n is a, c, g, or t
  Probeset Number=SeqID_11457
tttttgtttggttntgtngttgtggtgtgttggagngatacnnnnnnnccacncncccccccanacncacgnaactagatnccaagcgacctaccacaccacatacacacaaccgacacacgcaccccccnctcgccgctgctgcaccacgctatgacagagcagaanaacgcagnggtgtattgtctcacgaatataagcgagcgccgcatcactcccaccatgagttaaacggttatttgtcctcctctctgtctgtacgtaggtagcgtcggtggttgctgctgagtgtaggcgcgtgtgacgccctgacacgctagagaaatanacaacaccataactgagcaatcatgtattgttgatatatgcactctccatcgtccctgctatagataagacatgtgagtcataactagactcatcgagatatagaacactagtatacagtagactcgacagtcgcgctgtgtggtgtggtgtggataatatcatagaggtatgtacgtgagccagtatcnaagagtacgacgactcgtgagcagacagtaatgacactatcggcgaacgatgtcntagctgtggtgatgtaattgtaatctacttctactatgctgtncattctctctgttgatatgttgccacgcgctgctcgccatatgcacggcacgcgactcagggcggacgacgcgcatcggagatatcatgagtactcaatatactaaacttcactcgacatgtcacgtccgactcttcgtccttgttatcgcgttccgccctacccgtccgcactgtgcttcatacccagctatatgatacaatgctgactgtcgtagtcactatcgtgcgcccgcgtgcgagctcgcactgtgtacgcgtcgcgaccngacgacgcgcgactggcgtntcaacagatatacgactctagcgtatgacgccgccgcgctngcttcaaccgcggtcagcgtccagtcgcggacgctgcgaggacgcatcgatgcgcactatacacacgtacagatagagtagtgannaaannanaanccatacgtcgatcaacgcaacaccagcgatgtgtcaatcaaccgtctatggatatatgcactctaccagacncgacacagatatcatagtggtagtgtgctcgatgcagcatctgtcacgacggcacggagagcgtgacgagcgacggtacactgcgcagactcaccgcgagccgagtagctgatacgagagctcaccatanactctgatgaggcgtgcgacagacatgcgtgacatctaccgctctagactctgtagtctgcacggcacgtcgtgtagtgcgcactgcgctccactctccccatactcagacatcacgatgactacttcgtacggtcggcacacgccatgctacgggactctgctatggtctgactcgagcgtacatccttcagtcacgatgcantgaccgcggcgctcagccacaccgcgagagagaggcgagacggacactcagaacaaacgacaacatgcaagtcgcgcgacgatcatagag

SEQ ID NO: 1679 - DNA, 1932 bp, Glycine max
  misc_feature (1)..(1): n is a, c, g, or t
  misc_feature (20)..(23): n is a, c, g, or t
  misc_feature (33)..(34): n is a, c, g, or t
  misc_feature (38)..(38): n is a, c, g, or t
  misc_feature (40)..(40): n is a, c, g, or t
  misc_feature (56)..(56): n is a, c, g, or t
  misc_feature (124)..(124): n is a, c, g, or t
  misc_feature (150)..(150): n is a, c, g, or t
  misc_feature (202)..(202): n is a, c, g, or t
  misc_feature (220)..(220): n is a, c, g, or t
  misc_feature (259)..(259): n is a, c, g, or t
  misc_feature (261)..(261): n is a, c, g, or t
  misc_feature (263)..(263): n is a, c, g, or t
  misc_feature (265)..(265): n is a, c, g, or t
  misc_feature (369)..(369): n is a, c, g, or t
  misc_feature (463)..(463): n is a, c, g, or t
  misc_feature (544)..(544): n is a, c, g, or t
  misc_feature (650)..(650): n is a, c, g, or t
  misc_feature (800)..(800): n is a, c, g, or t
  misc_feature (837)..(837): n is a, c, g, or t
  misc_feature (903)..(903): n is a, c, g, or t
  misc_feature (905)..(905): n is a, c, g, or t
  misc_feature (937)..(937): n is a, c, g, or t
  misc_feature (955)..(955): n is a, c, g, or t
  misc_feature (1013)..(1013): n is a, c, g, or t
  misc_feature (1137)..(1137): n is a, c, g, or t
  misc_feature (1270)..(1270): n is a, c, g, or t
  misc_feature (1381)..(1381): n is a, c, g, or t
  misc_feature (1441)..(1441): n is a, c, g, or t
  misc_feature (1458)..(1458): n is a, c, g, or t
  misc_feature (1480)..(1480): n is a, c, g, or t
  misc_feature (1501)..(1501): n is a, c, g, or t
  misc_feature (1504)..(1504): n is a, c, g, or t
  misc_feature (1522)..(1522): n is a, c, g, or t
  misc_feature (1549)..(1549): n is a, c, g, or t
  misc_feature (1562)..(1562): n is a, c, g, or t
  misc_feature (1645)..(1645): n is a, c, g, or t
  misc_feature (1691)..(1691): n is a, c, g, or t
  misc_feature (1714)..(1714): n is a, c, g, or t
  misc_feature (1718)..(1718): n is a, c, g, or t
  misc_feature (1736)..(1736): n is a, c, g, or t
  misc_feature (1739)..(1739): n is a, c, g, or t
  misc_feature (1758)..(1758): n is a, c, g, or t
  misc_feature (1837)..(1837): n is a, c, g, or t
  misc_feature (1842)..(1842): n is a, c, g, or t
  misc_feature (1853)..(1853): n is a, c, g, or t
  misc_feature (1865)..(1865): n is a, c, g, or t
  misc_feature (1870)..(1870): n is a, c, g, or t
  misc_feature (1877)..(1877): n is a, c, g, or t
  misc_feature (1885)..(1885): n is a, c, g, or t
  misc_feature (1894)..(1894): n is a, c, g, or t
  Peptide Sequence Number=SeqID_9027
  Probeset Number=SeqID_11458
nttttggtttgggtttgtgnnnnggggtgtgtnntttntnttaattatttttttanatacatatattataattatacacgtgatgtgtgttaattgctcttatttagattgctcataaattccncacgttgtgtttatactctcaccaangagataattgataagaagagttatgcgacatagcacacatatccatacgacncacacacaaagacaagancaacatatatgataagaagatgattacgagatagtttcncncncncccgcggccgtgagtgcaatgacgacgttcgagcgacatatcggtagaagtagtgtagtcgacctgataatagtccgatcgatatcacaacacgctcagcgtgntatactgtaatacgtaatcacacatatgaatagcaaacccacgcgcctcaaccgacaaacataaaatagaaatgacataacataacacacacanacactcgagaagagactaaatagatagcatatgagaaaatgacaagatactacggcaccacagtaccgcacacttcacatncgcacatcgacgacagagtaatcgtcagaatcattgtgagcaagagatacttagcaatcgagaacatagacaggacgagactcgtgagcgacgtatcaccaggacncgagactcgagtgtgcgtgaggacgtgcatgtcgtattattctcgtgacgatacactgtagccgctcgcgcctatcgactcgtcattgcatctacgcgtgagtatacgaacgtacatgagagacgacagtgtcgcgtcgctcgaagcaangcgagtatatctgatatgcatgtcgagcgtcgatgcnatgtgacgattatagtacttgctgtgagagaacgctgagcgcgagtgatgcgacgcataatgcgtngngcatgcgcatctcgcgcgcagagtctataccnctcgctgcgacgtgcctnctatgtgtatgagcagaagagagttacacgaatatacagactacgtcgagtacagaanagtaatgagatagtattgagcatacgtatcgaccggtgacgtcgctgcgtatcacgacagtcgtcgatgctagtgcgctaacgtcagtatcgatcgataatgaatagtcgagatgtacgtagtntgatatgtgatgcgaaaagacgtgggttagagtgcgacacacgagaagcatattcactcatgacaagatatcgtccatactcacactagatacgtcgtcatgtctgacgactacactaacttacgaaccagcncgtgcctgatgcgagtatgtgtaacgggtctcgtcgtataagagcgaacacgagaactctatagtcgcgatgacgacatcactgatattactcgccgcacacgaagcgatnctgtgcatgtgagtagtatcatatatgtatgtgagcagactacctgtgtgccgtagatantgatgcgcgcgtatganagcatcagcgctcataggaacngagtacataagctcagacagnctnatatagagttgtgtaganagacatcatagtgcagatacacgtaantcgaatagcatanacgatagtatgatgtgtgtgacgataactcgagtgtagtgtatcgtatcgtagatgtcacgcatatgatatagtcgtatcaancatatagcatgcataggcggtatacacgagacgtatcgctagatgntgcgtgcatgacagacagtaggnaggnagtttactagataggcgncgncgcacgatagcgtcatcgntcgatgtacgatcgaccgacgtcgcgagacgagcgatccgcatgtatctgtgatccgactagagtcgttcggacgaagntagtnagcaggagtgngtactggatcgncgcancgcacgntgagccanctcattagncgtacagtagtatgatgctataactgatacgacgtcgg

SEQ ID NO: 1680 - DNA, 1695 bp, Glycine max
  misc_feature (39)..(39): n is a, c, g, or t
  misc_feature (66)..(66): n is a, c, g, or t
  misc_feature (174)..(174): n is a, c, g, or t
  misc_feature (180)..(180): n is a, c, g, or t
  misc_feature (268)..(268): n is a, c, g, or t
  misc_feature (526)..(526): n is a, c, g, or t
  misc_feature (535)..(535): n is a, c, g, or t
  misc_feature (542)..(542): n is a, c, g, or t
  misc_feature (1464)..(1464): n is a, c, g, or t
  misc_feature (1681)..(1681): n is a, c, g, or t
  Probeset Number=SeqID_11459
cacagtgttgtcgaacgtatggtcgtcatgagtgttganatgccaactccgtatacatgtgttacnagatagtagtgatcgcagcagtatctatatgcatgttgagtattacatacattcgtaatcaaatctactacacgcaatcttgcacttgtcaattaatgtcatcataantcgacntttatctctgtccagtatcacttgctcatatgtagtatgcagagttatctaaaacaagataatgcgtggagtagcagcagatgtactnctgcgtatgcttcaattatctactagatactcgtatctggttgtctcacatacaatcgcttctcgctcgtcgtaaggatacaagtagtcattatgccgtgcatgtatcatcatcgtagactagcggtgtcatatgttaagcacatcgtatacacaggcggcagtgacataatatatcacctctatagatccagagctagcatagagatctgctatcagtctattagtagcggccatctactatattaatatagcgatntctgtgtanctgatancgcgtaaactcacacataatatagtctacgtgactgcgtcgctgaagacacgaataaataattagaggttgggttgtggaacggtaaatgtcaataaggtggcgtcggcgactgcaatatcatgactgtgtggtatagatcgcactatatcaaacataatcacataagtagaaggtataatggtaaaacaataacagtagagatacgtccgacctgttatagtgcatcagactcgtctctgcgtagtgtagtatggctcctagaatataagaagtggtcggtccagagacatttataacagatcgtgtcgctcgaacacgttaactgataaaggcgttgaagttacatatgcttactagtaggcgggtacgagtgtacatagacgtcaagttaccaattgtatatgccattgcgtcgtctcggcaggtgaccgaatatcaaatgtcgcggcgcttaggagaagatagtataatggtagaataaacttcaaagtggggctgcagatgtgtgaagaaagtaacgtcgggtggctcaataataaaatatttctatatgtatcggtgttttgctgtggtaggcaacacggtctcgtgtggagaaagcactatggtctatgaatacatagaatacacgggtgctagcaaccggataatcttaaattctgacttctacacatctttaatacaacttgaatcgatgcaaaatctcacgatatattcgcgagtacgaccgcggaatgcagctggaggaatacaattactgcgcgtccgatgcgcgttgcaggcgggagaaaccaatgcgcggcgggcgtctggcgtatctcaactgtgtgcttcacagactatactatatatgtcgattcgatagagcctgctactattgtattattaaatagataggtacatgacatgcgtagaggccnaaatagtggtgggcaggcgtcataatacaagttgccgtggcgcgatcacaactacatcattgtatctccttgataatgcacttgttacaaaatatgtggcatgctccctatgtatgcgtaatgcctattgatactttctatccacacgacgtagttatcactgagtaggcggctgtagtctggtataacataatataaaatgagttggcggagatanagttggttcgggaa

SEQ ID NO: 1681 - DNA, 2071 bp, Glycine max
  misc_feature (1)..(1): n is a, c, g, or t
  misc_feature (21)..(21): n is a, c, g, or t
  misc_feature (44)..(44): n is a, c, g, or t
  misc_feature (62)..(62): n is a, c, g, or t
  misc_feature (83)..(83): n is a, c, g, or t
  misc_feature (85)..(85): n is a, c, g, or t
  misc_feature (105)..(105): n is a, c, g, or t
  misc_feature (116)..(116): n is a, c, g, or t
  misc_feature (140)..(140): n is a, c, g, or t
  misc_feature (188)..(188): n is a, c, g, or t
  misc_feature (297)..(297): n is a, c, g, or t
  misc_feature (316)..(316): n is a, c, g, or t
  misc_feature (327)..(327): n is a, c, g, or t
  misc_feature (452)..(452): n is a, c, g, or t
  misc_feature (496)..(496): n is a, c, g, or t
  misc_feature (502)..(502): n is a, c, g, or t
  misc_feature (541)..(541): n is a, c, g, or t
  misc_feature (594)..(594): n is a, c, g, or t
  misc_feature (643)..(643): n is a, c, g, or t
  misc_feature (676)..(676): n is a, c, g, or t
  misc_feature (751)..(751): n is a, c, g, or t
  misc_feature (972)..(972): n is a, c, g, or t
  misc_feature (1153)..(1153): n is a, c, g, or t
  misc_feature (1172)..(1172): n is a, c, g, or t
  misc_feature (1203)..(1203): n is a, c, g, or t
  misc_feature (1330)..(1330): n is a, c, g, or t
  misc_feature (1339)..(1339): n is a, c, g, or t
  misc_feature (1446)..(1446): n is a, c, g, or t
  misc_feature (1570)..(1570): n is a, c, g, or t
  misc_feature (1580)..(1580): n is a, c, g, or t
  misc_feature (1732)..(1732): n is a, c, g, or t
  misc_feature (1868)..(1868): n is a, c, g, or t
  misc_feature (1958)..(1958): n is a, c, g, or t
  Peptide Sequence Number=SeqID_9028
  Probeset Number=SeqID_11460
nactggtgagcagcatcgtgnaatcatgcacatgtacgccgcgnccatatactgactgacgnaccacagtcgatccatacgtncngcactttcgcatcgtctgtncacgcagtcanatctacagcacgatacgcagctcnatgcaacgactgtcggttactcgagttctccggatgtaagagagacgnaccagtgcagctgtcatctagtgcgatctgcatcatagtccatactctgactacacactctatgtgcacacatgatgatgagtcatggcgagcaactagggcgagtagntatgagtcagtgatgagcngacgagtgtcnagctgcagcgaatgtcatgacaacgtaggccgagctgagggaaccagttagagtcgcgacactatatgtgcttgcgcgcgtcgcgtatggcagcggttcacatcgactatagcacactgatctcncgacgtcagcgtcctgccgcacgagtagtggagagctacgctgngacagnatagagatgatatatcagatcatgtagatcgaccatcanagcgatgcagtcgtatgattcaccgtcgatgagtgagagatcgatagtagatnagtgctcgatatatcagacatgcagaggtataggtagacagtatcgcgntgcgaagtgtttaagtcatatatggattctgtngatcatcatgaatgtgagtatcatcaagagcgagtatcgcgacgtgtctcagcattgcagtgtcgcatacgctcncgctgtcgcatacacgagcacatgcagtgcgtatcggttctgacacacggacgctgagatagcgtcgtgttcgcgtatatgagaagacgcatatctagtcagtcgtaggagattgtaagcagtcgagagagtgcagacactagacgacgatgagtagatcgccaggtccgtagcacttctcagagtcaccgtatctagccgcatctctagtctatcagaantacgtcagagcgtcgcgatatatctcatcagtgtcagtagatctgcggtgacaccatactgtacgagatacaggcgcgtgagaggtcgtggatacatccgaacattacgaccaacaggctagtactgtgatttacggaatagtgaatctgtaccgtgtatatagatattaatagacgaccnatccactgacgttgtgcgnggtgtgacgcttacgctatacgtaactagtngcctgctgtgacgagagtggtataggcgtctcacgagagtgctgcctagcacagcagttatcgcactcgtctacacatagataggaatacggccaatgatgctctaccatattacagcagatgcgcnttatactgnggagactgacgtgcacctctgtgttgtccgcatcgttggctccggatgctcgcagcagagtgggtatctgcgagcgcgtatccagtgatatcgcggatatacatgancttgtaacaccgagattatataatagcaccgatgacgcagacacgcatgtcctgcgacacacgacatcacgcaaggcaggctgagcatgtagcgtgcatgtactcgctgcggagcgccggaggngcagtgtgtnccaagaaagcaccagcttaaaccggcgtaacacgaataggtcgtatacctcgctagtctgcgctctgatactctggctcgctgggtagcgatctacaagtgagcgtacgtgacgccccgctcacaacgcatcgtctgtcttaagaaagacgngagggccctcgcacgtccagcgctacgtgcgcttcagacgcagatagatacgcacatctgatataaagacttcccgactatgtctatgagaccggatctgcgcgagcgatggagacacaggttcttccccagaganagagtgtctctcattctacatctctcttagtgacatctttaataatagaaatagaagggcttggagctgatatacactctcccccccttnttgagcggcgaagaagcgcggtacatattataacgcgttattataagttgagttattgatatgagtgtgacgccgcgcgccggcagaggagggaggtgggggaggcgacggca

SEQ ID NO: 1682 - DNA, 650 bp, Glycine max
  misc_feature (1)..(1): n is a, c, g, or t
  misc_feature (599)..(599): n is a, c, g, or t
  Probeset Number=SeqID_11461
nttttttttttttttttattcaaatcgtttattgaatcaatcttttagtaaaaaacaataataaatagtcagagcaacatagcttaatcaattacaaatagaattttggtaaattattgacacacataaatggcacaatagtatgtagttttaaaaaagtgcacaactaaaaaaaattctcaaatacaaatttcgtactgaaacttttattgattaatgtccttagtttcttgccagagttctatcatatttgatgaccatattttttgatatttctccaatacatcatactcaggattttccttccattcttcactatccttatgcacgtcacttgctgcaaacactgcctccttattctgtaccgacactgtcttctcaaaatccggaacaaacatattcaaatgtctatagttctctttactgaattttaaggcttcattaggttgctgtctctgttttgttagcttctccttaaattcttttttatagttcactattcttgcatgtgctatctttttaaaagcctcaggatccccaaatgccttcatgtccttgtataaagtctcagcaaagggcgaaatccacttgtctcttancattaggatcatcttcctcttcggttgaattcttagcgcccatatccttag

SEQ ID NO: 1683 - DNA, 1878 bp, Glycine max
  misc_feature (373)..(373): n is a, c, g, or t
  misc_feature (526)..(526): n is a, c, g, or t
  misc_feature (533)..(533): n is a, c, g, or t
  misc_feature (813)..(813): n is a, c, g, or t
  misc_feature (836)..(836): n is a, c, g, or t
  misc_feature (904)..(904): n is a, c, g, or t
  misc_feature (935)..(935): n is a, c, g, or t
  misc_feature (986)..(986): n is a, c, g, or t
  misc_feature (1002)..(1002): n is a, c, g, or t
  misc_feature (1052)..(1052): n is a, c, g, or t
  misc_feature (1074)..(1074): n is a, c, g, or t
  misc_feature (1135)..(1135): n is a, c, g, or t
  misc_feature (1160)..(1160): n is a, c, g, or t
  misc_feature (1207)..(1207): n is a, c, g, or t
  misc_feature (1223)..(1223): n is a, c, g, or t
  misc_feature (1246)..(1246): n is a, c, g, or t
  misc_feature (1293)..(1293): n is a, c, g, or t
  misc_feature (1355)..(1355): n is a, c, g, or t
  misc_feature (1358)..(1358): n is a, c, g, or t
  misc_feature (1418)..(1418): n is a, c, g, or t
  misc_feature (1420)..(1420): n is a, c, g, or t
  misc_feature (1428)..(1428): n is a, c, g, or t
  misc_feature (1435)..(1435): n is a, c, g, or t
  misc_feature (1500)..(1500): n is a, c, g, or t
  misc_feature (1509)..(1509): n is a, c, g, or t
  misc_feature (1521)..(1521): n is a, c, g, or t
  misc_feature (1533)..(1533): n is a, c, g, or t
  misc_feature (1547)..(1547): n is a, c, g, or t
  misc_feature (1558)..(1558): n is a, c, g, or t
  misc_feature (1563)..(1563): n is a, c, g, or t
  misc_feature (1583)..(1583): n is a, c, g, or t
  misc_feature (1633)..(1634): n is a, c, g, or t
  misc_feature (1641)..(1641): n is a, c, g, or t
  misc_feature (1656)..(1656): n is a, c, g, or t
  misc_feature (1671)..(1671): n is a, c, g, or t
  misc_feature (1674)..(1674): n is a, c, g, or t
  misc_feature (1699)..(1699): n is a, c, g, or t
  misc_feature (1701)..(1701): n is a, c, g, or t
  misc_feature (1704)..(1704): n is a, c, g, or t
  misc_feature (1731)..(1731): n is a, c, g, or t
  misc_feature (1779)..(1779): n is a, c, g, or t
  misc_feature (1783)..(1783): n is a, c, g, or t
  misc_feature (1798)..(1798): n is a, c, g, or t
  misc_feature (1824)..(1824): n is a, c, g, or t
  misc_feature (1836)..(1836): n is a, c, g, or t
  Peptide Sequence Number=SeqID_9029
  Probeset Number=SeqID_11462
cgcgtggcgcagatacgagtgccgcggcgcgatattataatattatcgcaacctctacccagttatactatctacttatccgacaatctatcagcggtccacagcgcggataggctcagttatgtcgcatgagtttttagtgagtggtatttgtagacgcacgacaataatcacacgactgcgagcggatcagatgatatattggtgccgccgccgactgatatactgccagagagcacagagcggtagaggatatatagtataacccacacagcgcatcgctgtcatcgcgacggacgatgtattttgacaggcgtcggtgtagatatgtatatctgggccacacgcagtgcgagtgtagcgtggcggcggntcatgtgggtgttgtcgacgtgtgttctctccaccagttttgttgtgcgcctgtggagagtggtttgatacagccgtgattaacactcagaattatgtattgaacttctatatacatgctatctccctctcactgtgcgacgcaacgataganccttgancacgactatgtcgctcctcgcactcagtttattgtgcacccagtcatacacttaatatctcttcgcaacgccatcctcatactcatgaggtgacacagatatattagcatcgttggcgaacatgcctatattgtgtatatgatcgcgcgaatagctatcgccacgataggtttctgcgtcgcatctcacgcctcgtgtctactctcagctcccggcctagtagcgacgagtgttgtactgatcgccctcctgagttatatcgttttggttgttatattantgagatatatcacaggatatatnctacgcgcgctccactacactctcacactcaactatgttcatcgacgatctcctcattgagcttgatncgatagcttgcgaacgacacgcgcactacantgtcttgtgtcaccgtcacccaatctttatattctgatcagagccaacaanactactcgttgatccntgaccggaacgcgtgcgtcgcgaccgacactcagctgccgctgcgtcacncgtgcgacacagtaagtcgtcntatgtgtgactgtcttattcgtgtagacttacacgccgcgcgaggcgcacgcttattattntctagacgcgtgctaggtctgaacncgttcgtcgttcgtagtacgacgtcgcctcgcatcgtgtgttgtgangtagctaatagcatangcgacccgcgtcgacagtcacancggtgacagactgacattatctgtaccctcatacaccgtaattttantcattattatgacgtgtcggcgacgttacactatgtaggctgcgaatgacacagtgcacatncanatctgactactatatagttactgtgtcatgagactagctacgacacgcgtcgtgcagttngntctgtgtncgaggtntatagattctatgtacgcatgtcaggcacgatctgcgccgcgtcacatgatgtcgtcgtatgtgncgcagtgcnctagcacgttancatgtgctcggncgggatgccgcggnaccggatgttncgcgnagacactcgtgcacgctcgncagtatgacgctagagcgatgagccgccgtgatcggtgacggacgagtgnnctcgctncttctctaattatgncatgatctcgcgtangtncggtgtcgaatggtgcgtgatgagngnatngaagcagcgatcttcagtgcatctgancgacgtgcctcgctacgcgtgtcgatgagctaagcagactactaagtntcgncttgatgtgcactgnctcaacagtcatcgagatcatatcgncacacagtatantctattgctagacgacatactgtaatgaagtcgtacatctgg

SEQ ID NO: 1684 - DNA, 430 bp, Glycine max
  misc_feature (417)..(417): n is a, c, g, or t
  misc_feature (420)..(420): n is a, c, g, or t
  Probeset Number=SeqID_11463
aaaacaaacaaagatgctgaatgaacttagaaattctaacctgaccctcgtcgttttgatttgctttgtgcttatagcttcaaggctgcgttccgtcagttcttctgtgtacaacccacacaacaccctaaagaagcagtttgggaagtggcttcaataccacggaaaatcatatggaggaaaggatgagtggatgttcaggtttgggatattccagtctaatctccagttcattgactacatcaactccctccacttgccctttaagttagcggagaacagatttgcggacatgaccaactccgagtttaaggcccatttcctcgggttaaacacgtcttcctcgaggttacacagcaaccatagttgtgacccatcagcatcaggcaatgttccggacgctgtggactggagganagnaggtgctgtg

SEQ ID NO: 1685 - DNA, 1921 bp, Glycine max
  misc_feature (1)..(1): n is a, c, g, or t
  misc_feature (98)..(98): n is a, c, g, or t
  misc_feature (140)..(140): n is a, c, g, or t
  misc_feature (142)..(142): n is a, c, g, or t
  misc_feature (196)..(196): n is a, c, g, or t
  misc_feature (198)..(198): n is a, c, g, or t
  misc_feature (227)..(227): n is a, c, g, or t
  misc_feature (321)..(321): n is a, c, g, or t
  misc_feature (323)..(323): n is a, c, g, or t
  misc_feature (450)..(450): n is a, c, g, or t
  misc_feature (507)..(507): n is a, c, g, or t
  misc_feature (611)..(611): n is a, c, g, or t
  misc_feature (692)..(692): n is a, c, g, or t
  misc_feature (729)..(729): n is a, c, g, or t
  misc_feature (816)..(816): n is a, c, g, or t
  misc_feature (1311)..(1311): n is a, c, g, or t
  misc_feature (1437)..(1437): n is a, c, g, or t
  misc_feature (1439)..(1439): n is a, c, g, or t
  misc_feature (1543)..(1543): n is a, c, g, or t
  misc_feature (1616)..(1616): n is a, c, g, or t
  misc_feature (1618)..(1618): n is a, c, g, or t
  misc_feature (1637)..(1637): n is a, c, g, or t
  misc_feature (1660)..(1660): n is a, c, g, or t
  misc_feature (1737)..(1737): n is a, c, g, or t
  misc_feature (1742)..(1742): n is a, c, g, or t
  misc_feature (1887)..(1887): n is a, c, g, or t
  misc_feature (1897)..(1900): n is a, c, g, or t
  misc_feature (1910)..(1910): n is a, c, g, or t
  Peptide Sequence Number=SeqID_9100
  Probeset Number=SeqID_11464
ngcactgcgcggtatgtgctcaaattagcagcgtcattcacacttctgatgcgtgctgagccatgggcttggatgcgtgagtaagcctgcgagcgacnatataagcacatctagactgcacacatcgaccgtagaccgcngncgcgttcacagccgcgacctcctgtaagtgatgcagcatcatcgcatatctacnanctcgatcctctcgtactccgtctatctcntatacatccaatcttcttagagtcatgatattactttagtatatctcatcgttgctcgcgccgacacacgacatacactcacacgctactatgntntcgagcgtcgatatactcatctatagtatcgatgtacctatgctcgccagcgatgttatggtcgcttatgttcatgcgcgacgactggctactcacgttgctgcactaccatgtctcgatattttanctcacgcacatctctatctctcgacatgttcgtatctgctgctagatcatcatcttntgaccatgttgctatagtatgaaaatggagacatcgtaggtaggcacctacagactacactgcgcacgcgcagtgtatgtacagttgatgcgcgctgcgtacgnttgcgcgtgtctacgcactcatctcgctctcacactccctctcttcgatcatcattctgtcgcttgtctatctcttctccntccacgcatcgcatcaccgcaatctactctagctacnctaacacgcatattcagttcgttcgcacacatacttctctatatctcacgtgtgcgcactgtgcgatgttaaacagcaacgacacgnagcagcatgtgatcagagactactcgtacgttctatatatcctcatcagctacacagcgtgcagctcttcgtatcagagtcacagccatcaagctgtctcagatcacgtacacagtcgccgacacgccagacatgaggctagctcgcgcacgtgtcacacgcaacttcctctcccgtctcccgcttctattcgactgtcaccgccgcaccagtacggctagtcgcacagactctgctcatcgacacgcctaataactaagatcatatcattttagcacaagcatcgcacactctatcctatactatcaatctactcaatcactcatgctccactcctgtgtctctatatatctcctgtatatcgcactctacctcatcatatagacgtatttatctattacaattacactcacgcatatgactctcgttcgtccaccgcgcagcacctacatcgccagtgcacactacacaccgctcgtgctctgttgtactatnctctctcatcagctgccgtaccatccatatacgtctcctacgctcgctcacacacatacacgaacaccacgcactagtccatctcgtacatcgcggattgagataatcgagagagatagatgacanangtcgacactaaggacacacacaccagcagctgagattccgcatgacatctctctacgactcatgtgcgactatacctctgatatttcaccatagttgtctacgntgctagtgacactcgcgacactatctctctctgtcgtgaggcgctatagtaacttctagccgctctagataananatatacatgaggcatacanaacactagtgccacatttcatangcaccctcactacctcagtcgaagacatacacgctcgtagcacatagacaaactacatcaagtctcctccgtctagncatcncctacagcgtctcaccatagagagagaaaaacgacacagcacgagacacctcagccgtctaaagcatcattgttatctgatccacactcgtcggttcctgcttgtccgatccgagtgccgtgacctcagcttgggtgtgtttttntgttgtggtnnnngcctctcctncctctccttcc

SEQ ID NO: 1686 - DNA, 551 bp, Glycine max
  misc_feature (496)..(496): n is a, c, g, or t
  misc_feature (509)..(509): n is a, c, g, or t
  Probeset Number=SeqID_11465
agattccccacattctatctgcaacatcagatttgtccttcctaaaaaatctcacattctttcacctctgatgtgtctccaacaataacatatacctgttagcgtgatctactgagttgatgacagaaaaatgtgagtaacgactgctctaggaatctcacctcctggcccttatgtacttagccaacatgctgctgggaaagaattcccgacgtgacgccaggaagttgtccaactactgttcaacgacctctgtcgctgtgtacgctgcattgatgtgtaaaagccgtgatgcatagcaacgtcaatccattgttccaaatatgcactttatcccttccgggatctagagacctgaaaccccttaatggcgggtttaacaattggcacaacaatgttcgataaagccccttcaaatgtgggaaaaaaaaaaaaaaaaatcccgccccccgccccaatatttacagtctctttttttcctccaaacccccccccnccccccacccatncaaccctaaccccctacaaaccaaaaataaactcctttattt

SEQ ID NO: 1687 - DNA, 549 bp, Glycine max
  misc_feature (146)..(146): n is a, c, g, or t
  misc_feature (165)..(165): n is a, c, g, or t
  misc_feature (336)..(336): n is a, c, g, or t
  misc_feature (382)..(382): n is a, c, g, or t
  misc_feature (441)..(441): n is a, c, g, or t
  misc_feature (452)..(452): n is a, c, g, or t
  misc_feature (457)..(457): n is a, c, g, or t
  misc_feature (467)..(468): n is a, c, g, or t
  Peptide Sequence Number=SeqID_9101
  Probeset Number=SeqID_11466
cgctttttcaaattacactctttgcctggcgcctggaacgtagcctttactactcataatcttaacaacttgctagaagaagataaagaaagagaaaaagtgtgtgtgtgtgagagagagcaatggctggctcgtgggcacgccgntctctgatttttttttttntcatttccttcggttgtgtgtgggcggtttccattgctaaggaggaagccacaaaattggggacggtcatcgggattgatcttggaacgacctattcatgtgttggtgtttacaagaacggccatgttgaaatcatagccaatgatcaaggtgaccgtgtcaccccatcgngggttgctttcaccgacagtgggagactaattggagaggctgccgngaatctggcgggtgtcaacccagaaaggaccatgtttggtgtcaagaggcttgttgggngaaaggtcggngatgnggaagttganngagatgtgaagcttggtccttgttggattgtcgacatgggtgggaagcctggcgtgcggggggggttgtgggttggggggg

SEQ ID NO: 1688 - DNA, 1561 bp, Glycine max
  misc_feature (1)..(1): n is a, c, g, or t
  misc_feature (32)..(32): n is a, c, g, or t
  misc_feature (109)..(109): n is a, c, g, or t
  misc_feature (392)..(392): n is a, c, g, or t
  misc_feature (412)..(412): n is a, c, g, or t
  misc_feature (419)..(419): n is a, c, g, or t
  misc_feature (611)..(611): n is a, c, g, or t
  misc_feature (614)..(614): n is a, c, g, or t
  misc_feature (664)..(664): n is a, c, g, or t
  misc_feature (772)..(772): n is a, c, g, or t
  misc_feature (815)..(815): n is a, c, g, or t
  misc_feature (844)..(844): n is a, c, g, or t
  misc_feature (847)..(847): n is a, c, g, or t
  misc_feature (1005)..(1005): n is a, c, g, or t
  misc_feature (1303)..(1304): n is a, c, g, or t
  misc_feature (1318)..(1318): n is a, c, g, or t
  misc_feature (1320)..(1322): n is a, c, g, or t
  misc_feature (1367)..(1367): n is a, c, g, or t
  Peptide Sequence Number=SeqID_9102
  Probeset Number=SeqID_11467
nctatctcgacacaggcgacactagatgtgantagctgtgtgaacatatgtactcttatctatataagcatcaacggcaccgcagcgagctacggagcgtgtgtggatntgtgagtcattgtaacatctgtcgtcgacgtatgatgtatgtgattgttggtgtattcagcgttgtgcggtctttttcgtctttactaaatgactatctatcttattagctcgattatacaagcacgactttcgtgtatgacagtcatcagaaagatgagcgggagggaagcgtggtgccacatatcacaatatcatctcggcactggtccggatgacgtactctcacacataaccaaacggcctatattttacaacacatctacgcgatcaccctatggcanatgacaaaaacgagaagatnaaacaangatgtatgaactaatatacgcaggtcagacgtcttatagaacacaaaggtagagtatttacattatatatagttaacatcctatattcgtgttctcatgtgtatcttgttatttctatcacatactcgacgcacctcttcattactgctccgttcttgattgcgagacgggggggggctacatccgacaganacncgtatagtgtgtaatgcaaacaccaaagcgaagacaacgagtcgtgagantacaagaggtgagtcgagagaggcatagatatacacgacagcgagcgagcagctcgcgtcgcgacgacagaagagagcgagacaagagagcagtgagatgatcagatngattcacgtgagtagccgcacgatagagtacagttatttaatncattataatacctatatataacatgtttngtnttatctcaactcatcccaccgcccagagataatgatagtggttggtggtgacgggggcaaaaataacattctcattctatatatctgcgtaattcgcatggttgggcggtgtgtatagatataatatataagatatactatacctaactcatatcctnctatacatttatattgtagctatgaaagatagggtgatatactcaatttattatatacagaccagaggataaatgagaaagtaatgtaagaatgaaagaggcagagtggtagtaatgtggggggatatcgtgttatggtatattgttgttgttgtgtttattcttcttccggtctgccgtgtggcgccctcacccccgtttgtgttgtgtttctttcactctgctcactcgcctctcttttcctgcgccccccttgccgtgctcccgtggctcctcttcctcctgtctctcctcttcnnttagattataacangnnnatagagtggtccaaagagagataacacaaccataacaacactctnaattgcactcaaaggaaggacagcccagtaagagacaaccaaagaaaaaacttagcaaaccgacaaggtcgaaggaggagaaaagacgaggatgtttatgttgtgtatatgcttattatacttcgatccttatccacacgaccgcctgcccgtcgcaccaatagaagatagaaaagaaacaaaaagcaacaaaa

SEQ ID NO: 1689 - DNA, 1396 bp, Glycine max
  misc_feature (1)..(1): n is a, c, g, or t
  misc_feature (7)..(7): n is a, c, g, or t
  misc_feature (24)..(24): n is a, c, g, or t
  misc_feature (83)..(83): n is a, c, g, or t
  misc_feature (180)..(180): n is a, c, g, or t
  misc_feature (231)..(231): n is a, c, g, or t
  misc_feature (250)..(250): n is a, c, g, or t
  misc_feature (305)..(305): n is a, c, g, or t
  misc_feature (326)..(326): n is a, c, g, or t
  misc_feature (432)..(432): n is a, c, g, or t
  misc_feature (514)..(514): n is a, c, g, or t
  misc_feature (564)..(564): n is a, c, g, or t
  misc_feature (588)..(588): n is a, c, g, or t
  misc_feature (601)..(601): n is a, c, g, or t
  misc_feature (640)..(640): n is a, c, g, or t
  misc_feature (827)..(827): n is a, c, g, or t
  misc_feature (881)..(881): n is a, c, g, or t
  misc_feature (946)..(946): n is a, c, g, or t
  misc_feature (951)..(951): n is a, c, g, or t
  misc_feature (1217)..(1217): n is a, c, g, or t
  misc_feature (1318)..(1318): n is a, c, g, or t
  misc_feature (1347)..(1347): n is a, c, g, or t
  misc_feature (1357)..(1357): n is a, c, g, or t
  misc_feature (1363)..(1363): n is a, c, g, or t
  misc_feature (1368)..(1369): n is a, c, g, or t
  misc_feature (1374)..(1376): n is a, c, g, or t
  Probeset Number=SeqID_11468
ncagcgngagtcgctgagaggagnggacagtgatagtcgtcgccgcaacacacgcacaagatacctcaagaacgcatcgagcngacgaccaatccacccagtcgcactcgtaagataagaggcggcagcgcaccaccgtaagcagacacgacgcgacagcacagcacgccgtacaagagngaacacagcatccgatcaaccgcgagggcacagagtcacgcacaccgcacnccaataatcatagacacantgatcgcagccacgcaacgcgggcgagcgccggcgacagcaccacaccacacacnagacgagtgcaggacgcagancgaagcgcgacgcaagcgagcacggaagcggacacgacaacacccgcacgcgaccgcctcacgagagagaggctgcgccagcgccgagcgcatcccaacacaccanaacaatagacatagctgagagtggaacgaggagacaaacagacaaacgagcaaacagcacacataacggcagagcagacacngggccacacggcatagtccacagcatacagaaagctagcgcaagaacagngcacagcggagcagcgcgcagcgncccgcacagcganacgtagagggagagggaagcgtagagagaagcagggcangagcgcgcgaggcggcgcagacacaagagacacggcagcggagcgagcaagacgcggcacaacaccacccagacatagccagcatcacgcgcacactagaaaagcatacaaacatcactcagcgacgaggccggcacctacagggaggaacgaacacacagaagggcgacaccagcagagacacaancacacaacaaccaacacacacacggcgccaccaccaccggagacgccgcccgcncacatcccgccacaccacaaagccggccgagagcgcggctaccgcgcaacacagaacacgaccanaagcnggaagcagagaagaggagagaggaagaaaaagcaggaagggcagaagagggggcagcgaagagcggcggctgcgcgacagaggagggggagcgccggagcggacgaggcgcagcgcgccgccgagcccaggcgcggaccgccgcgcgtgaagcgggacgactaaacaaaccacgccaacaaacgcgagagagaagaaagaaacagcggcggcgggcgacgacgcgcggcaccacgccacactaagcagaactaggagagaaggtangataggaggaaataccagaaccaaagaaaaaaacgagggaacaacaaaagacaaaacaactcgggagcacccacagacagcaaaagattacaagacaaggngagagagagataagcagtaaaaaagcaangagaaaaganaaaaanaaaannaaaannnaaggagacggagagaaaaac

SEQ ID NO: 1690 - DNA, 643 bp, Glycine max
  misc_feature (530)..(530): n is a, c, g, or t
  misc_feature (611)..(611): n is a, c, g, or t
  misc_feature (643)..(643): n is a, c, g, or t
  Peptide Sequence Number=SeqID_9103
  Probeset Number=SeqID_11469
tcgagtagcccacgtaggccccccccccatactcgtttgggcagagtcacgtagcagccaaccaacaataaacttacaaaattttctacacacatttacttgtgttttagttttgggatttttattcatctgttcagttcagtacccaataaaacggccgccattttgaaaaattcaatacaaaaccgcagtcgaggcaaaacggaaagaagaaaaaaaaacgaaataatagaaatctgtatagtcagtcaaaaaataaaatttgtgaaaattcaacatttaagtgcagccaaattttaaaaaatcggcatcaatttctttctttctcagttggaacaaattttaatttcgttctgtttttttacgtaattcacattaaattaacacaaaaaaccataccaaaatttcatcaaacgtggtacaaaattttgaaattccaaattacaaaagagtgaatagagtatagtaaaaaaaaatcatttttttaatataactacaacacaatacaacgtaaaaaaagaacgttcttngtttctacacatccaatataagcatttcttcgggttttttcgatcaaaaaaaaatatctaagaactgtgactcaacgaatngagatcccgtcaattcgagatcaatagactan

SEQ ID NO: 1691 - DNA, 565 bp, Glycine max
  misc_feature (489)..(489): n is a, c, g, or t
  misc_feature (492)..(492): n is a, c, g, or t
  misc_feature (496)..(496): n is a, c, g, or t
  misc_feature (515)..(515): n is a, c, g, or t
  Probeset Number=SeqID_11470
aggtactggcttcatttgcatcattcacagtgttttcacctcgtacttcagcgttctcctcccattggtggtatccgtcactgttcttttgctcacggtatcccacaacatcagcgtttagagcggctcgatatcagaatatgtctagtcaaccattgcttgatcggagcccagaggaggggtcaggagacagctatgggagcaaaaaccggcgtcagcgcggtttcctatcgcctttcgcagccatgtcgcacatcagcctgttccaaggctcaacgaccacctatgaagctataagcttaatgcttaatgccgaagactcggaccagcaggacgagctgaccaggacttggcgtgatcacaagcttgaggagctcaatttccttggcacggtgggtgctctattcgctagctgtctcagcacaactggttcctggcccgatgtgttgaacaacggaaacgacaagccatggtctgtccgcgccttgnggntcancgggctcgtcctcgccctnttcgccgtggtcatcgcaggcctgcaaagcatgcgcctccaccgactatc

SEQ ID NO: 1692 - DNA, 505 bp, Glycine max
  Peptide Sequence Number=SeqID_9104
  Probeset Number=SeqID_11471
ggagagacaaggcgagaattcgagaagagaaggaaaataaataaaaaggagcagcttgggatgcgaagaagaagcaatgggtggtggaaagcggaacacggtggagacattcttgttagccactctcattctgtggctcgcttccctttgttcccagattttcttcaacaaacgttgggagcttctctctgttatcgcgggttgtttcttctatcagacatctaactgcctcattctacttttcttgtccacccataaagaccctctcttcgttaacacctctgtctttcttctccactctttcttaacctccgcttcagtgatcttcatcttgcccaccgagttattcaatgcgccctgtggactgttgcccactcaaacttggttgacaatgttttgcccctgctcactttaagcgttaacctcttcatccgcatactttgtatttgatcagtgggattttgtttctgccctcctttccaatggccgcatctcatcccttctt

SEQ ID NO: 1693 - DNA, 663 bp, Glycine max
  Peptide Sequence Number=SeqID_9105
  Probeset Number=SeqID_11472
atggagggtcagagatcacaacgctggggttacttgaaagacaaggctatagccaccagccttgctgaagaagaaatggaaaatagcatggatggagaggaggatgatactggagatgaagacaaaaggaagagagtgatggagagagctagaggtcctaacacagaacgtgttcccttgcggctgtgcctggtcgataggtgcactgctaacttaactgaggccaagcagtattaccgcagacacaaagtctgtgaggttcatgcaaaggcatcttctgcaactgttgctggagtcaagcaacgtttttgtcaacaatgcagcaggttccatgagctagcagagtttgatgaaactaaaagaaagtgcaggaggcgcttagctggacacaatgagaggaggcggaagatatctggtgacagttacggagaagggtcaggccggagagcggttagcttgacacagactcaagaaagaaacaggatagacatgaaacttcctatgactaactcaccattcacgcgacccacggatcagataaaaccaacatcaaaacacccaaccgactctctctcctctgtcatccacttatgctcaaatatccccgcctcctctagctatcccaaaaacggacctcttagatacctcggttcaagaaaactg

SEQ ID NO: 1694 - DNA, 698 bp, Glycine max
  misc_feature (601)..(698): n is a, c, g, or t
  Peptide Sequence Number=SeqID_9106
  Probeset Number=SeqID_11473
gagtgacctaaaaaacaaaagaatccgcctggttgcctgcggcgatagcggcgctccgctccgcggcgaggagggtcctcggcggccaggcaccgcggacggtctacagggcgaccttcgcggaggagcgacagcgtctgtcgccggcgttcatcaaggccgcttcgtccgtccatcctcgccgcttctcatcgcagggtggcgatgatgatccgctcacatctgaagagaaaatgagactatttaaaaggggcgctcacttgatcttcaggatgacaaaagccatctccaccgttgtggcctgcggaatagtcatcaagtggtcagtaacagaggtgttccgtccttacccgacaagcgattgtgcacgtgctgttcgcaaatgccgtgagatgctacagggtctacggggcaaccctccagcattggaggttggtcctgtgctgggtgatgagatgctggcggcggaggtggcggagttcaagtccatggtgaaaggatatgaaagcggcgagccagcggaagagactggaaggattgagtccagcttgggaaaaatatgcaccctggtttctcaaggctattcatgacccattgtggnnnnnnnnnnnnnnnnnnnnnnnnnnnnnnnnnnnnnnnnnnnnnnnnnnnnnnnnnnnnnnnnnnnnnnnnnnnnnnnnnnnnnnnnnnnnnnnnnn

SEQ ID NO: 1695 - DNA, 613 bp, Glycine max
  misc_feature (613)..(613): n is a, c, g, or t
  Probeset Number=SeqID_11474
tcagctacgtaggccccccccccgatactcaattgactggtgaaattgaactcttgaaacagaaacttagctctaatatctcgaccatcaatgaaataaataataaacacaaacaagttttatcagagaaagataacttaaataagcaactagaaaatgtgagaaatgaattagaaaaagtaaatagagagctagaaaatgccaagagaggacttgaagccaatgagcatgaaaagaaaaagagacaaaccgagcatgatagaacaatcgcatacctcaaagacgaactagaaaatgctgaacaatctcaaaagagagctacagagactcttcaaaaagaaataacaaacttgaaggagcagcttgatgaagtgaattcatcaaatttaacaaaggatactgagatacagagcctcagaggaacacttgaggagctgacacaaggtagtaagtcaagtaaaggggttctgcagacattggaggctcaagtgaaagaactgaagacgacttgtgatatcaagaatgatcagatccaatcattgaagagtattcaagcgtcgttgacttcagaattggctgaaaaatcaaaggaatgtactgagatgacacagan

SEQ ID NO: 1696 - DNA, 612 bp, Glycine max
  misc_feature (168)..(168): n is a, c, g, or t
  misc_feature (296)..(296): n is a, c, g, or t
  misc_feature (330)..(330): n is a, c, g, or t
  misc_feature (336)..(336): n is a, c, g, or t
  misc_feature (422)..(422): n is a, c, g, or t
  Peptide Sequence Number=SeqID_9107
  Probeset Number=SeqID_11475
atttggttttctgaattgtttggattgcgagaaaaaaaaaaaaggaaaatggcaaggatattcgattcttcgacctcaacacgggcgccaagatcccttcagtcggcttgggaacttggcagtccgatcctggccttgttgctgaagccgtcgcggcggccatcaggnttggttaccgccacattgattgtgctcaaatctatggcaatgagaaggagatgggctcttttgtagaagaatctgtttgaggagggtgtattgaagcgcgaggatttgtggatacatctaaactctgnaatactgatcatgctcccgaaaatgtaccactgncactgnacgggaccctgaaagatttccacctggataatgaaaatttgtatcttatccactggccctgctccaatgaagaaagaatcagctgncttttaaacctagaaattcttggggcaaccaaacataccctaaccccctggaaagggggatggaaacccctccttatgaattctgggcagaggctcgcgaccaattcgggggtaaagcaattttttcccccccaaaaaaaacttcctcggaattttgcttgctaaaattggcccgggggttccctccccc

SEQ ID NO: 1697 - DNA, 564 bp, Glycine max
  Peptide Sequence Number=SeqID_9178
  Probeset Number=SeqID_11476
gctggagctccaccgcggtggcggccgctctagaactagtggatcccccgggctgcaggaattcgcacgagaccattacctagaacatcctaatcgaaaattctctttctttctctcttcccctttctattactattcagaaactctattgtgtgtgttgtgtcatttattttgcgtcttcgttaatcttccgttcctccctctttctcttcctcatcttctcctcttttcatccgcttaagggtcttctttgttcgatttttttttcactttggtttttatattgcttttgacagaaaaaggtgtgacctttgtcttttttattccttttttttgtctaattttttgtggtgatttttgggacaggctaacggcggtgttgaaggtcacgacgctttgcccatgcaaggaccttctttgctcgatttttttcccctttggtttttatattgctttggacaggaaaaaggtgtgacctttgtctgattctgacgaggttccacggaaaaaaggctaacggtggtgctgaaggtgacggcgctttgccatgcaagggccttcttt

SEQ ID NO: 1698 - DNA, 1677 bp, Glycine max
  misc_feature (14)..(14): n is a, c, g, or t
  misc_feature (20)..(20): n is a, c, g, or t
  misc_feature (22)..(22): n is a, c, g, or t
  misc_feature (24)..(24): n is a, c, g, or t
  misc_feature (32)..(32): n is a, c, g, or t
  misc_feature (38)..(38): n is a, c, g, or t
  misc_feature (44)..(45): n is a, c, g, or t
  misc_feature (55)..(55): n is a, c, g, or t
  misc_feature (60)..(63): n is a, c, g, or t
  misc_feature (67)..(68): n is a, c, g, or t
  misc_feature (73)..(77): n is a, c, g, or t
  misc_feature (92)..(94): n is a, c, g, or t
  misc_feature (101)..(101): n is a, c, g, or t
  misc_feature (108)..(111): n is a, c, g, or t
  misc_feature (134)..(135): n is a, c, g, or t
  misc_feature (137)..(140): n is a, c, g, or t
  misc_feature (152)..(152): n is a, c, g, or t
  misc_feature (176)..(176): n is a, c, g, or t
  misc_feature (234)..(234): n is a, c, g, or t
  misc_feature (276)..(276): n is a, c, g, or t
  misc_feature (282)..(283): n is a, c, g, or t
  misc_feature (397)..(397): n is a, c, g, or t
  misc_feature (399)..(399): n is a, c, g, or t
  misc_feature (471)..(471): n is a, c, g, or t
  misc_feature (582)..(582): n is a, c, g, or t
  misc_feature (584)..(584): n is a, c, g, or t
  misc_feature (624)..(624): n is a, c, g, or t
  misc_feature (795)..(795): n is a, c, g, or t
  misc_feature (824)..(824): n is a, c, g, or t
  misc_feature (856)..(856): n is a, c, g, or t
  misc_feature (914)..(914): n is a, c, g, or t
  misc_feature (927)..(927): n is a, c, g, or t
  misc_feature (936)..(937): n is a, c, g, or t
  misc_feature (941)..(941): n is a, c, g, or t
  misc_feature (976)..(977): n is a, c, g, or t
  misc_feature (979)..(979): n is a, c, g, or t
  misc_feature (981)..(981): n is a, c, g, or t
  misc_feature (1007)..(1007): n is a, c, g, or t
  misc_feature (1026)..(1026): n is a, c, g, or t
  misc_feature (1040)..(1040): n is a, c, g, or t
  misc_feature (1229)..(1229): n is a, c, g, or t
  misc_feature (1248)..(1248): n is a, c, g, or t
  misc_feature (1260)..(1260): n is a, c, g, or t
  misc_feature (1266)..(1266): n is a, c, g, or t
  misc_feature (1299)..(1299): n is a, c, g, or t
  misc_feature (1312)..(1312): n is a, c, g, or t
  misc_feature (1334)..(1334): n is a, c, g, or t
  misc_feature (1387)..(1387): n is a, c, g, or t
  misc_feature (1395)..(1395): n is a, c, g, or t
  misc_feature (1401)..(1403): n is a, c, g, or t
  misc_feature (1411)..(1411): n is a, c, g, or t
  misc_feature (1414)..(1414): n is a, c, g, or t
  misc_feature (1432)..(1432): n is a, c, g, or t
  misc_feature (1592)..(1592): n is a, c, g, or t
  Probeset Number=SeqID_11477
tgtgttgtgtttgnggtggngngncgcgggcnccctcnctcctnnccacgcttcnccccnnnncccnnccccnnnnncacccatagatacgnnncaaaacnccaaaannnntgtagaggaggagaaaatataannannnncgctcccacttnctatcctcatccattatgtggtgngtgccctcttcctttctccagagcaaacgaagtgcatacattagttatggtagtgacnagaacagccgacatatctttccacaggccttaacccaacaanatagtnnattagtggccatcgccggtcagcatccgcccagaatcaaaactcatatctatacaatcactagagtgtgatcttctcctcttcttcttcaccgtccttgtacaatcgccatcanancacacacctcatactttatcatacatttatattagagcactcctttaacctgttagtgctaacgcgctcccncatctgtgtgcacgacccccgcactgatacaggcgacaagagcaaccgtggtagtagctgtgtgatgtgcggatcatatagtaaagaacatatgaatagtagtaactatananataacaataatatcgcagtgagagaactcccgtttgtttnatctgcatttcttatcttagtcactatctgcgagcgtgataggacgataataataatacaaatagagttgatatatctagatctaggtgtagtaaaggcaatgagaaggacataagtagacaatattcatacatcacgccaggagatagaaagagcccatctatcttactnaccaaataaatacatagtgtaagacacgngctgttatgacatgatcacgtggaatgtaatncgacgatctattaggctgacgagttagtgtatgtagatagtaagttaagggtagaatnaaatatataacantcacaccanncacncacagatactacaactctctctatagacaaggtannananacatctactacacacaactcctactncattttatgatgttagtgnatgtgtctgatacntatgtctgacagctactcaccttacattacacactctctgctctgccctcacacacacacacagacacatagagagatgacatgtgcacaggcttgttgtatccgtgtagtgtgtcgttttctgattgtctgttgtcgtcgcgcactagtgcacgtcgcccagatccgagcttctacgtacagcgttcncatcgcatagacgctagtnctatctggacgnatctcncctagccaacacacacacttacctcgtatctantgcgacgcgtgcnactccgccacgaacgctatganctagtgtctgttgctccgcttgactggtagagtgatgatatgatgatatatancatgttgnactggnnnaaacaccntanaccacctgtgtacagcgntactgtgcatcagtgctgtgcgatgcgtgtcacgctgtattagttctcgatactctgtttactagcatactctgtcatatcagtcctggctcaatgatccctactgtcctcgctcctagctaaacggggcacgctgttcgggacgcagaagctagagaanagagatctatctggcaactcaaccgactacccataaccgtatctaactgagaaattatcgaagcagagacagttgctatgtgata

SEQ ID NO: 1699 - DNA, 673 bp, Glycine max
  misc_feature (673)..(673): n is a, c, g, or t
  Peptide Sequence Number=SeqID_9179
  Probeset Number=SeqID_11478
ctgcattccatatggcagcagcctgtggaatgtagtgaaaaaatcatagtagaaatccttacaatcagactagactcagttcaaagtcaaaagttatatcaaaattcaaataactactctgatgctttatatgttgtttttttagttgtttattactattagtcattctgctcctagatgtagtctcaattccataagcatgttataaatttacgaacggggattgatgcgcatatttgagtttatttttgtgactgtatttttatttcttttggtgtttcctcgtatttggtgcagtcgagaaaagtttggggagatgcatgctagactatggtgggaagagaaccgtgccagaatacatgaacaatacttgtgagctagatgcctagatttatcaaaggggtggctgctgatgtttcacaaaatgtggaggtggtgtttctcatcaatttgcttaatcaatgtttttgttatataaagtctccttataggcaagatgtcagaacgagtgctactatacatccctagaccctagcgctcgtgtttcatcttcatgcaatcaattctggttattctcttgactctacggagtaaatgtagcttctgttagtcaggttagcaattgttttgtcgaaacttacaagtaatgggtgtatattatatagctgttgan

SEQ ID NO: 1700 - DNA, 1203 bp, Glycine max
  misc_feature (1203)..(1203): n is a, c, g, or t
  Peptide Sequence Number=SeqID_9180
  Probeset Number=SeqID_11479
aaaactccttcgttttcgtcgtctttagtaattttcactaccttcttctttacctcaccttctccatgatcctctccgtcatccgcaaatcatgactctcactcctcctccctcgcagcaaacacctaactcacctcatcgccgagtcctcatcgtcggaaactactgccacgacgttctaatccaaaacggcaccgtcgtggccgaaaccctcggcggcgccgcctccttcatctccaacgtcctagattcctcctccgtctcctgcgacctaatctccaaagtcggccgcgacttcaaatacgacgtcgcccaccctccgatcgtggctccggagaaggagaccacggtcttcaaagcctatttcgatctcgcagccgatcgggtcctgaaacgcgtcgctgcatgcgacccgatcctcccgtcggacatccccgactcgaggttcgacatcgggatggccgtcggcgtcggcggggagattctccccgagacgctcgagaagatggtggagatctgcgacgtggtggctgtggacatacaagctctgattagaggtttcgatcctgtcgacggagccgtgaagcttgttgatttgaaggagagtgggtttcgtcacctcatgggtaagatcgggttcttgaaagcttcgtcggacgaagctttgttcatggatgttgaagagatgaggcgtttgtgctgtgtggtggtgactagtggtgaaaaagggtgcaggatttatgacaaggatgatgagacggtggttcctccgttcgtggcgaagcaggtggatcctacgggcgctggagatagttttcttggaggtttggtggttggtcttgtggagggtttggatgttcctgatgctgctttgttggggaacctctttggttccgtcactgttgagcacattggtcagcctaagttcgatttgacgatgcttcagagagtaaaggatgaggtacagaggaggaagaagcaatgtaatctctcaagtagccacaacaatgatcatgacgagttccatgcgcgtctaagtccagctcggtttcaggagtctccacttcaaccaaagatattggtcaatggtcacttgtgtgaccggtcatgattggttcctgcaaatacgaatcttttaatcactaacaacgctcttctgaattgtgtaaactttctacgtttatgaattttggaaatttatcn

SEQ ID NO: 1701 - DNA, 478 bp, Glycine max
  misc_feature (151)..(151): n is a, c, g, or t
  Peptide Sequence Number=SeqID_9181
  Probeset Number=SeqID_11480
gtatttcataggagtgtaagacaaaaagtatttcttttgttgttaagaattttctcattttcagccatgagactcagtgttattttaatggtttcttgtgttctcacatttctcattttaaataatggtaaagtagaggtggaagccggcntgagaaaacttggctgcgaaacattaccaagcaattatcttggaacatgcggaaaaaatggaattaatttatgtgtagatgacgtaaaaaaaatgattgtcaaaaatactggaaaagctgtgccaaaaggttatggagtacgttgtgacaaatgtattgatgaacctcccaagccaggttatgctcgcatgcataaatgtgtatgtcgatatgattgctaaattttaaaatatctatataagcataatctctttactaataaaaatcattgtaagggagagttttttggcgtagatctggctggaaaaacagctcatgtcttactaa

SEQ ID NO: 1702 - DNA, 1673 bp, Glycine max
  misc_feature (17)..(19): n is a, c, g, or t
  misc_feature (21)..(29): n is a, c, g, or t
  misc_feature (34)..(35): n is a, c, g, or t
  misc_feature (171)..(172): n is a, c, g, or t
  misc_feature (184)..(184): n is a, c, g, or t
  misc_feature (187)..(187): n is a, c, g, or t
  misc_feature (469)..(469): n is a, c, g, or t
  misc_feature (942)..(942): n is a, c, g, or t
  misc_feature (999)..(999): n is a, c, g, or t
  misc_feature (1075)..(1075): n is a, c, g, or t
  misc_feature (1135)..(1135): n is a, c, g, or t
  misc_feature (1155)..(1155): n is a, c, g, or t
  misc_feature (1185)..(1185): n is a, c, g, or t
  misc_feature (1223)..(1223): n is a, c, g, or t
  misc_feature (1295)..(1295): n is a, c, g, or t
  misc_feature (1310)..(1310): n is a, c, g, or t
  misc_feature (1331)..(1331): n is a, c, g, or t
  misc_feature (1374)..(1374): n is a, c, g, or t
  misc_feature (1510)..(1510): n is a, c, g, or t
  misc_feature (1512)..(1512): n is a, c, g, or t
  misc_feature (1524)..(1524): n is a, c, g, or t
  misc_feature (1642)..(1642): n is a, c, g, or t
  Peptide Sequence Number=SeqID_9182
  Probeset Number=SeqID_11481
tttttttttcttttttnnnannnnnnnnnaaccnnaacaaaaaaacaaacaaaccctaacaaccacaactacaacaactaacaacaccgacatcactaaatcatatatatcactcaaatattacaaatacacccgctcatacaatcgaggacgcctcaccccatcactatnntttgatctgttnttntttagtaatggctctgccttcccagtgtgaatgcggaaggagagtaggtggactacacagcggtagacgccgtatatgctttgttggagtgtgtgtgtgtgtggactgaataattgggtgggctggagtatagtgtttggtggtagtttaaatctggttgattgtgaagaacatgcgagtgcgctaagatccttctgtctggtctttcttagacgttttagtttgcgtcgtaggcgcggcacgagtatgtcgggagccacaatacttgaggcgtcctccctncgctagagctcgatgtgggcgggtggagctgcggtgcgggggcgcgagggggcggcgtgcgaagtggcatgacggaggggtagagtaaactgatatttagtgaatttaaagagcgtggcgggggtgagacaacaatcacgatggtcgtcctccaacctaatgaagaagatcattaacaggttgatctcgacagtcaaccaatagattatcaaagaagactgacgcgactcgtctcacgtgagtccgtgacgcctacacatatatctatccccgcgcggcgcccgccgagtacaatgtttcgtttcgtgacacttcacacctcaacgagtctgcacacaccaccacacctcacctatcgaactctctactaatcaattgtacaactatgacaagatacgctgcggtacatattttattttaagcgatgtgaataataagatggcgacacacgattacataggtggttgcgatgngtgatgcgctgcgtgactgcgacgcattgcgtcgctgttggtaattacactttagtncaccccgcgcgtcgcgtggggagtatgttggaggagctctgctgatctatctcgctctcacatatcgtatcctatntgactcatatactcatctacacgcagcagaggactagacgacgctcaaatgtatcaaagngtatagacggcgcgggttgntactgtatctgtcgctcccatcactaaccnacctctaacttatacgatgtatctccagcggtctccangcactagctctatgaagcgtagatttacgcagaacagtcgtggtcgtgacgttctaatgctcgaccacaccncgacgcgtgaactcntgcggcgtcgttaccgctccngcgactgaccaagccacgcgcgcggcctgcgccacgacacgcngacactcaagagacgcagatgaagctatattatccgataatcttgagcgtatattctatcatctctacaccagtcacgacgaagagacatgacgacgatacacctgctctatacgtcaatataaacgacaagactnanatactcaacacncgctggacgagaaccatagtgacataagagtatagttagagtatatcaaacgacgaaatctagtagacatgcgcgtgcacagagacagtaggatacagcacacgatgattgtagcatnacgagagagacactaagtgatactcactcgg

SEQ ID NO: 1703 - DNA, 1387 bp, Glycine max
  misc_feature (13)..(15): n is a, c, g, or t
  misc_feature (17)..(20): n is a, c, g, or t
  misc_feature (22)..(27): n is a, c, g, or t
  misc_feature (29)..(30): n is a, c, g, or t
  misc_feature (32)..(32): n is a, c, g, or t
  misc_feature (48)..(49): n is a, c, g, or t
  misc_feature (51)..(51): n is a, c, g, or t
  misc_feature (84)..(84): n is a, c, g, or t
  misc_feature (104)..(104): n is a, c, g, or t
  misc_feature (186)..(186): n is a, c, g, or t
  misc_feature (366)..(366): n is a, c, g, or t
  misc_feature (390)..(390): n is a, c, g, or t
  misc_feature (1387)..(1387): n is a, c, g, or t
  Probeset Number=SeqID_11482
ttttttttttttnnntnnnntnnnnnntnncnttttttttttgctctnncntcgctctaccacgcgcaacgcatcatgcttatnatggttaatatatttttttnaatatgctctatatccctccttctgcaatagtttgcgttcgctcttctattatatgaatatatagatataattcttgttttnctctgagccggtacctctccaccatttttctgttatatgagtagtggaatattactgttctgatttgcatattgatttattatattgattatattatcaataattctctcaaattattctgataaatctaatatcttctccacacactattaccttctctcccggggtagttgagttttnacgagctctgagggaaggcggcangggtcgcgcccgcgcggccgcgcccggcccgcgaagcgcgcgggtatcggtgtgcggccgggccccataccccgctcaacgggggggggctgtgtaagttagagtattgtttcgggtgggggagggaaaagatagattatagtttagaggcggaggggaggggtgggtggggagagattttaataccgtctgcgtgccaccacaacctcgtcaaaacacccacccctaaaagttactattaccacagcaccacacacgcctgaccgcctcaccgcccgcccgccacgcccccccgcctgcttcccttatactattctattatatatatttcacgcttctcacgctgctggagctctcgtgcgtctacccgttttagtactcgcctcacctaatcgaaagtcagtgagcgatggtccatcacacgtgattctactagtaaagagatagatgcttgcattaacaatgtaggtattgtcgttattactgtgcatcgccgtcttcgtcagctgctacccgcccgcgcgcgctctctccccgccgaccgccccgatcacgcccccgctcctctcccacccacccgcccaccggcccgccgcctatcgctctacccacgagtcgatatgaagttaaatgacattggtctgctctactctactagtttatgcgcgctatgatgaccgacgaaaggatgaatgtgagacgtctcgaacccgacatgttagccctcgacaccacacaagcactagacacgcataactaccccaccacttcaccacccctccacacccactcacgcctcgccccgagcctattcgatgtggcacgcgctctccgggatcaagtggacaacgggagtgagatatgtcattgagtcggtcggtagtgctgagttctcagcgatcatacaccgttctgccaccgtccctctccccttctctgtcggctttcgaggcatatgctgagagcccgccgcgctccactcgaaagcgacatacan

SEQ ID NO: 1704 - DNA, 1608 bp, Glycine max
  misc_feature (1)..(1): n is a, c, g, or t
  misc_feature (6)..(14): n is a, c, g, or t
  misc_feature (19)..(22): n is a, c, g, or t
  misc_feature (27)..(35): n is a, c, g, or t
  misc_feature (41)..(43): n is a, c, g, or t
  misc_feature (48)..(51): n is a, c, g, or t
  misc_feature (54)..(55): n is a, c, g, or t
  misc_feature (168)..(168): n is a, c, g, or t
  misc_feature (245)..(245): n is a, c, g, or t
  misc_feature (395)..(395): n is a, c, g, or t
  misc_feature (560)..(560): n is a, c, g, or t
  misc_feature (624)..(624): n is a, c, g, or t
  misc_feature (714)..(714): n is a, c, g, or t
  misc_feature (788)..(788): n is a, c, g, or t
  misc_feature (833)..(833): n is a, c, g, or t
  misc_feature (863)..(863): n is a, c, g, or t
  misc_feature (949)..(949): n is a, c, g, or t
  misc_feature (996)..(996): n is a, c, g, or t
  misc_feature (1100)..(1100): n is a, c, g, or t
  misc_feature (1102)..(1102): n is a, c, g, or t
  misc_feature (1117)..(1117): n is a, c, g, or t
  misc_feature (1141)..(1141): n is a, c, g, or t
  misc_feature (1153)..(1153): n is a, c, g, or t
  misc_feature (1155)..(1155): n is a, c, g, or t
  misc_feature (1186)..(1186): n is a, c, g, or t
  misc_feature (1235)..(1235): n is a, c, g, or t
  misc_feature (1322)..(1322): n is a, c, g, or t
  misc_feature (1333)..(1333): n is a, c, g, or t
  misc_feature (1362)..(1362): n is a, c, g, or t
  misc_feature (1370)..(1370): n is a, c, g, or t
  misc_feature (1374)..(1374): n is a, c, g, or t
  misc_feature (1494)..(1494): n is a, c, g, or t
  misc_feature (1568)..(1568): n is a, c, g, or t
  misc_feature (1608)..(1608): n is a, c, g, or t
  Peptide Sequence Number=SeqID_9183
  Probeset Number=SeqID_11483
nttttnnnnnnnnnttttnnnnggggnnnnnnnnnaacccnnnaaccnnnnacnnaaagtgctacggaccttcatcaaatagagtgctaacacttctcaccgtcaccatgaagcgccacccccctcctcaacaaactacataagcaaaacacacccacgcggcctggnaagaacaatataccgcacatacgccgtccatctcaccttaatttaattatacccatcaaatactgaaaccacaattncaccataatactatgaccctctcctttattcctgtcgcctcgcagcgttcggagactattgccgtcacgtctcgctccttcctgcctccttttgtgggtgtgctatgtccgggacatgtgagcgtcagggccgccatccgacctacatcnaaacacaaagtattaaaatactgtgtagcactcgcggtgtattgtatagcttctcctcccacgagatctttcccgtccctcacgctctcacttctctcttcctctccgccgcgcactcaacacagttggtgttgtagggtgcaccacacggcacaagacacccanctcgctatatcttctcatctctctgcgatctccgcgtttttctctcaaagtaaacctacaatanacattagatatatataggtaacgtccacagtacacactcccacggtgtacatctcgatgttggtattacatatcaccctccacaacagcnccggtcaacagggcgcttcttgggctcccactctcactaaacgcaatctcaccccacacacagctttcgcgaanacactacagcactcctccttgcgcacttcggcgctgtatcgggtnctcgcctctactatataaagtcgccacgcncacgaacgcgcaatttcgtcactcaacttctgctgtacgcgcgcgtactctactagacacctgctactcctctcgcgcgcgtagangttcgttccactacgctatacacacaactctgatattatctgtctcntaactctacatgaatgaacatatatatataagcgcggtccctctatcgacgcgatactctcaacactatctcattatcgactcatcacccaccaccgagacgancncagcaaaggagtctnatcacagacactcgctcactattntgctcgcttcantntattcgacttactccctcacattagttacantcctgtatactcacacactctctacgacaccatcactagatacaacatncactctcctctctcactccatcacaatcgatctacgctacggactatgcatacgacctatcacgccgtgagtgtgttcgattattcncattctctacntgatacatgagagcgcgctgccccgcacntcctccanccancacgacttaaataagaccttatcactgaatatatatatgacacgtacatactcacacttgcaaacactcccgtcacactctctctttatgatacttccacacaaacatctcctacagagntaaagtcccacgcatctcatctccgtcgatcactactctcccagtacacacacactgcctactactccttctcnctgctcgtcacttctctcctctcaccatagcgccacctcn

SEQ ID NO: 1705 - DNA, 383 bp, Glycine max
  Peptide Sequence Number=SeqID_9184
  Probeset Number=SeqID_11484
gatctttaggcacaccttctatttatactcttctctcttgcctttcctttttatagactttcataatggacctatcatataactagcaaaacatgttgatactttgaaactgttgcaaatttttaaatcctggatagcggagcttacgtagaagcggccagcaaccctgactcaggatgttgttaaatggcgggcatggcggcgccatggcggtttttcgaaaaaacgccaccgaatagcggtggcctggcgggtttgggatggcggcgccatggcggccgccatagccatggcggtcgtggcggttatggcggggtggcggaaaatggcgtccctcccgcaccccacacgcccacccagccgcgacagccgcatgcgcacgc

SEQ ID NO: 1706 - DNA, 475 bp, Glycine max
  Probeset Number=SeqID_11485
agcagcttcttccagggttctctcatccccatcctgggctggaaaggccgggaagctgggcccatcacccccaaaagggggaagggggagcttgaggaaaaccgtcaccaagcaggccccctcaggaagcccagggaacggcccaaaccgagtcaagaactggggccctttctcgggcgagcccccgtcctacctaaccggggagttcccaggcaactacggtggggacacggcggggctttccgcaaacccaaaaaccttcgccagaaaccgggaactcaaagggatccactccaggggggccaggctcggagcctggggctgcgtcttccgggagttgctgccccgcaacggggtgaaatcgaaaaaaccggtgggggtcaggccgggccccaaattctcggcgggggggggctcaaacaactgggcaaccccagcctggatccccccccgagaaatcccccgcatttggggg

SEQ ID NO: 1707 - DNA, 1705 bp, Glycine max
  misc_feature (21)..(21): n is a, c, g, or t
  misc_feature (27)..(27): n is a, c, g, or t
  misc_feature (30)..(30): n is a, c, g, or t
  misc_feature (39)..(39): n is a, c, g, or t
  misc_feature (42)..(42): n is a, c, g, or t
  misc_feature (68)..(68): n is a, c, g, or t
  misc_feature (72)..(72): n is a, c, g, or t
  misc_feature (90)..(90): n is a, c, g, or t
  misc_feature (94)..(94): n is a, c, g, or t
  misc_feature (107)..(107): n is a, c, g, or t
  misc_feature (112)..(112): n is a, c, g, or t
  misc_feature (129)..(129): n is a, c, g, or t
  misc_feature (142)..(143): n is a, c, g, or t
  misc_feature (147)..(147): n is a, c, g, or t
  misc_feature (166)..(168): n is a, c, g, or t
  misc_feature (179)..(179): n is a, c, g, or t
  misc_feature (184)..(184): n is a, c, g, or t
  misc_feature (207)..(207): n is a, c, g, or t
  misc_feature (241)..(241): n is a, c, g, or t
  misc_feature (257)..(257): n is a, c, g, or t
  misc_feature (262)..(263): n is a, c, g, or t
  misc_feature (266)..(266): n is a, c, g, or t
  misc_feature (275)..(275): n is a, c, g, or t
  misc_feature (307)..(308): n is a, c, g, or t
  misc_feature (314)..(314): n is a, c, g, or t
  misc_feature (324)..(324): n is a, c, g, or t
  misc_feature (337)..(337): n is a, c, g, or t
  misc_feature (339)..(339): n is a, c, g, or t
  misc_feature (349)..(349): n is a, c, g, or t
  misc_feature (352)..(352): n is a, c, g, or t
  misc_feature (361)..(361): n is a, c, g, or t
  misc_feature (366)..(366): n is a, c, g, or t
  misc_feature (387)..(388): n is a, c, g, or t
  misc_feature (398)..(398): n is a, c, g, or t
  misc_feature (414)..(414): n is a, c, g, or t
  misc_feature (417)..(417): n is a, c, g, or t
  misc_feature (435)..(436): n is a, c, g, or t
  misc_feature (475)..(475): n is a, c, g, or t
  misc_feature (478)..(478): n is a, c, g, or t
  misc_feature (481)..(481): n is a, c, g, or t
  misc_feature (498)..(498): n is a, c, g, or t
  misc_feature (552)..(552): n is a, c, g, or t
  misc_feature (556)..(556): n is a, c, g, or t
  misc_feature (576)..(576): n is a, c, g, or t
  misc_feature (591)..(591): n is a, c, g, or t
  misc_feature (596)..(596): n is a, c, g, or t
  misc_feature (647)..(647): n is a, c, g, or t
  misc_feature (706)..(706): n is a, c, g, or t
  misc_feature (814)..(814): n is a, c, g, or t
  misc_feature (883)..(883): n is a, c, g, or t
  misc_feature (934)..(934): n is a, c, g, or t
  misc_feature (976)..(976): n is a, c, g, or t
  misc_feature (1030)..(1030): n is a, c, g, or t
  misc_feature (1532)..(1532): n is a, c, g, or t
  misc_feature (1618)..(1618): n is a, c, g, or t
  misc_feature (1688)..(1688): n is a, c, g, or t
  Peptide Sequence Number=SeqID_9185
  Probeset Number=SeqID_11486
cctcacggtcgccgccatatncccctnctncctctacgnctnagccaatatactcctatgcctctgtncganctatgacatctgcatctngctnctcgtacagctancgcanctgccttcctacctcantctgtctgtactnncctntagtactacgctctcgctnnnataagcgtcanctctnctgccactctctcttctcctcangccactctctatctgcctgcactccatgctgctncctcctctactctctnacagnncantctgcactnagctcactcctctgcacgtgactcactcctanngtcatnctctccactnaatagcccatctngnctcatcactnctnctctctgcncgcantctcactcactctatctcctnnctgccgctantgacctctctcccctnttncactctcaccacacactnngctctcgcgcgcatcacttcatcatcgctacagccgcgnctnctngctctacacctgtgctntctctagcgcgctcctggctgctatctccatcactctctcactgcgctcctctncctntctctaactcctctcagctncctcactacccatgnctcgngctacagcctacacggctctcacgcgcgctggcttcttataattactcacnttcttcttcgcccactctactcctgtctgcagcgctgccttcctccgacgtgctcatancctgctcgtctcgccacactctactcctcgtcctctcactcctacgctcgcccttcatacgaccatagctacgcaccatccacatctctctctcctacacgcagtctnctgtctcagcgttcatacgtctcacacagtacatgacgagtacagcagtctacagctcgaagctctctntcgcgcacgctagtgagcacatcgaatgtcggcgtgtaaggttcgtcgganttcacacctcgttcatcaatgtgactgtacctcgccctcatncactcctccgtatgcgtcgctccacgcagaactccgcagttgttcatgcagatncctcttgtgatgttattccgtgaccacacaccttcggtatccgcatcacttagcataccgctatcttattaatgatattacacagtgtagtgtcaagtatgggaagcgacatactatgcacgtgatcactcccactacctctgcgagccagccccggcaacatcagcaggcgacggtgccgcgacttcgcatagggaggtgtcattgatgaacgtactgcaaccgtcgtgacgctgaagtactgcatgatcatcaaaacacaaatagagggcgtgacgaggtgtgagagtatcgtctggagtagcatcaattaaatataccgcgcgagcctcggatgaagtatgctcgtagcagactcgctagcgaaatgcgtctgcaccttcacgattgtctcttacttctgctctgagtgcggcactacacagctccacggtcgagccatgctcatatatctactaatagaatagagggtaagacgtgtatgcagcagctcctggacggnatctcctgcgagtcattagtgaggagaggatgagagcgcctcactataatagatgggagaggtatatgagaggagtggatcgtttnacaccacacctcgtgtccagtatcggttcgggcggattcgaagggactattcatgctggtctcacacganacaatgagacagtagaa

SEQ ID NO: 1708 - DNA, 369 bp, Glycine max
  Probeset Number=SeqID_11487
aggcgacgcaccgacaccggacccatctccggcgacatctcaccgatctccggcgaatccccggtccccactttcttccctcgaaatgaatcccgagtatgattatctggtcaagctccttcttattggagactctgggggtgggaaatcatgccttcttctgagatttgctggtgattccgacatcgagagcttcataagcaccattgggggtggtttttaaataacctcccggtgagccgggtgggaagaacatttaacccccgaacggttggatttgaatgggccttggggccctttattcattgggggacaccagccggccagaaccaattaaggacaatacccagtggttcctatcggggggcc

SEQ ID NO: 1709 - DNA, 1956 bp, Glycine max
  misc_feature (20)..(20): n is a, c, g, or t
  misc_feature (22)..(24): n is a, c, g, or t
  misc_feature (41)..(41): n is a, c, g, or t
  misc_feature (77)..(77): n is a, c, g, or t
  misc_feature (367)..(367): n is a, c, g, or t
  misc_feature (491)..(491): n is a, c, g, or t
  misc_feature (524)..(524): n is a, c, g, or t
  misc_feature (684)..(684): n is a, c, g, or t
  misc_feature (717)..(717): n is a, c, g, or t
  misc_feature (838)..(838): n is a, c, g, or t
  misc_feature (1030)..(1030): n is a, c, g, or t
  misc_feature (1046)..(1046): n is a, c, g, or t
  misc_feature (1082)..(1082): n is a, c, g, or t
  misc_feature (1140)..(1140): n is a, c, g, or t
  misc_feature (1212)..(1212): n is a, c, g, or t
  misc_feature (1235)..(1235): n is a, c, g, or t
  misc_feature (1257)..(1257): n is a, c, g, or t
  misc_feature (1453)..(1453): n is a, c, g, or t
  misc_feature (1455)..(1455): n is a, c, g, or t
  misc_feature (1474)..(1474): n is a, c, g, or t
  misc_feature (1476)..(1476): n is a, c, g, or t
  misc_feature (1482)..(1482): n is a, c, g, or t
  misc_feature (1552)..(1552): n is a, c, g, or t
  misc_feature (1647)..(1647): n is a, c, g, or t
  misc_feature (1675)..(1675): n is a, c, g, or t
  misc_feature (1692)..(1692): n is a, c, g, or t
  misc_feature (1705)..(1705): n is a, c, g, or t
  misc_feature (1724)..(1724): n is a, c, g, or t
  misc_feature (1739)..(1739): n is a, c, g, or t
  misc_feature (1815)..(1815): n is a, c, g, or t
  misc_feature (1827)..(1827): n is a, c, g, or t
  misc_feature (1846)..(1846): n is a, c, g, or t
  misc_feature (1869)..(1869): n is a, c, g, or t
  misc_feature (1881)..(1881): n is a, c, g, or t
  misc_feature (1891)..(1891): n is a, c, g, or t
  misc_feature (1922)..(1922): n is a, c, g, or t
  misc_feature (1942)..(1942): n is a, c, g, or t
  misc_feature (1946)..(1946): n is a, c, g, or t
  misc_feature (1956)..(1956): n is a, c, g, or t
  Peptide Sequence Number=SeqID_9256
  Probeset Number=SeqID_11488
ggtgtatgtgtgttgtgtgntnnntatcgaaataacggccnggtactatgatatcgaatgacatagtcgagtcacanagcacacagagctggtcatgtagcgcgagagaggcgcgatagtagacccgagacacacaaatatcacaatactagacaataccgtctacctcgacctacacatctatcctcaccaatacaaggcgcactcacagccgttcacaatgtcaccgcatatacatcacactaacacacgcataacagagagagacggagaaccatatgatgatacatacgattgtccgtctgcgtcccggagtgcgactgatgcgagaggcgtcggggcgctgctgactgatgcacgaatacgngttgtgcgcaccatgttacgagcgaggtggcagctcagcagtgggctcgacctctcatcggccgccgcggtctatctcgttctgcgtctacctcatagccgcatctcgctcgtctcgcgtatgncatataacattgtcgtctgtataggtggacganagccgcagctgcgcagtctatgcagtccgcggcctgaggcacggctgcgtggctagcagcgcgcacaccgtctcctccggtctccttcgctccctatccatagataacttatctcgacacctattcgtcaactacgcctcactatcatatatatatatantatctatatgtgtggagtacatatgattgatgncggatagtgactaataatagtcttgcgctaacatccgacattcttcttcgcgtctcactattgtctcgtgtggtatatgacttctaagagtactgatactgaattatcaagatgataatgngaacgagtatatgatgtatagtccgataacggattgagctgtgagtcgcatagatagagatggatgatatggatgtacgcgtagcgcgcgagcgtgtcgtacttgtgatatcacaatgatatatcaatgacacgacatcgtcctatctactgcagtgatgtgtgatgtatgatctagtcgatgcatggcagnattcactcgatgtaanctattatactaacatcgatcgtcaccacgtctgctntatctcgcatattgctatactgagcgcgacgtgcgactcctatctagttgagtctgtnactcgactctacgccaagcgcactatatcgtctaatgaatagatgtagctgagtacctattcactagcattngatatgactacgtcgagtactcntgtgtgcgatctcgctgcgtgnctactgatagactctctaagcatcacactcgtatctgtcgatatgtacgcatactgcaccactgcttagatgtctccgtccgtgtcgtatttacgtgtctcggatcttcgttctgatctctatactgatactttactcggacgcacatacagccgatgtgtgcagatgatacgatcgcagacgtgtgagtgatctngncgacgattgacgacatatncnagcgantggatgtatctagacataaatactagatgactacgcatacgatctgctagtatactcatcgatatgctgngatactagatcgatagcattgcgctgatgacagatgcgtcatatcatgacatctagatatgcaagatgttagcatatacaaactcatatacgctnattacgactatgttactagcatctctantggtctcttacagttcntcgtcattctgcntctactgatctgtctactntctatgactaatgtnatataacttaagctatgctcgagctcatgatcatatgatcgagccatgtagcgtgcgtcacgagagtgagtgttantgctgatgctangatgtgaagtagcacagtnataaggacgctatgagctactangagtgatcgacngacgacgtcnagtagtacgtatcgacgatcattactgttgnagatgctgacgacgtccatncatnttgctcgtgn

SEQ ID NO: 1710 - DNA, 401 bp, Glycine max
  Probeset Number=SeqID_11489
gaagactcatgaagtctactaggctgttcgagcactctagtgagttagggtctgaagagctaatgcagagtcactattctccacttgaagatgcccctctcatttaccgagctggagaatctgctctggcagcgatagatgatatgagagctgatggatatgaaccatcaagagagatgctagatcaggtcagacagccatgcacacgagagatggtacaatgaaagcgatgccagagagcactcagtgaataatgccttgaattaccagcagggagcagataaccgacgggacatatctgcctaatcttagtatacagagttggagatgctgcaatggaatacctctgcctattataggctgctgcatcaagtcggcgggttcgtgaggttacaagaaca

SEQ ID NO: 1711 - DNA, 1595 bp, Glycine max
  misc_feature (23)..(23): n is a, c, g, or t
  misc_feature (135)..(135): n is a, c, g, or t
  misc_feature (333)..(333): n is a, c, g, or t
  misc_feature (388)..(388): n is a, c, g, or t
  misc_feature (492)..(492): n is a, c, g, or t
  misc_feature (818)..(818): n is a, c, g, or t
  misc_feature (955)..(955): n is a, c, g, or t
  misc_feature (1065)..(1065): n is a, c, g, or t
  misc_feature (1068)..(1068): n is a, c, g, or t
  misc_feature (1164)..(1164): n is a, c, g, or t
  misc_feature (1301)..(1301): n is a, c, g, or t
  misc_feature (1499)..(1499): n is a, c, g, or t
  misc_feature (1518)..(1518): n is a, c, g, or t
  misc_feature (1546)..(1546): n is a, c, g, or t
  misc_feature (1571)..(1571): n is a, c, g, or t
  misc_feature (1580)..(1580): n is a, c, g, or t
  misc_feature (1591)..(1591): n is a, c, g, or t
  misc_feature (1595)..(1595): n is a, c, g, or t
  Peptide Sequence Number=SeqID_9257
  Probeset Number=SeqID_11490
ggccgctcctctcgcctcgtctnctctcccgtcggtcatcctcctctctctacaccacccaccacccgcacgcaacgacccagcgcactaccattatacacaccccatcactcccaggtctccacgccgctactncaccgccataccatattaactttctacgcgacgacgcgttcatgcaggctgcgagcagagttcgtcgtgcgccacacgatggatgtctattgctctctactttagcacttcatatagattaataacacctcgacaatctacgggctagtgattaaattgactctcatccatatgtggatataactgcacctctactcntctacgatgatggagcccatatcgtgtctcaccactatatccacggcgcgcattncgctctctctcactcactcgagtgtcgcgttctgtctagtcatctatgatactcagatctatgatatcttcctcagtcataatcacagctatgatatgtcatantatgaatatatccccacaggcgcgaccagcgtctggccccccagcactatacacatcctcagacgccccctgagcgacatctccctacgcagtgcgcacacactccccggtcacgatcagatcaatcttacctactatctcaactctctctgtacatcgttccttctcagcattcactgacgctcaccgttctctttccgcgagatatcgacccgcgcgcccttagacactccctacacgtcgactcgccctcttgagcatccactccgagcaccacggtccgcgcaagatacgtatatgccttacgacaccgccacacgcatctncctaccctgctacatgtgtctcccaccctcaccgcttatggcgaccgacgcgcactgctccattgcgtgccacgctctcttctcatctctttgtctcaccatcagtcatgcgacctactatcatcgacacatacgantcgctgatctctatcttatgatctatcactgatcacacatcgtacacaccctacaccacatatccagcttgatcacactctagtcgcgcgcagttctcgtctcactctgnctnagactgagtcatggtactcatcgcggtcacacacgtcatgacgttacgactcgataacaacactatggacctccacacacacatacacactctacngctatgtaccatactctctcaaccctcgcgacgtctccctctcgccgcgactcgcctctagagtagcacatagcctgctctccacacacacgagcgtctcagtacacactctcactgcggatatactcatgcacganttcaatacttacctcatcaaccatgtactcctatatgatcgcttgtatctacaacacacgcatgatcaacacaaccacactgacactcaacgtcgaacgacaccagcaccctatacacatacacaacgactgatatgagtagagactagaccgcagcgcacacttatcgctgtctccgcgcacatacactcggcgatncacgctgctcgctctcaanacgacacacgcctgctgcgactcgtatnacgcacgtctgtcacgtcgatgacnaatacatancacaccatgcntacn

SEQ ID NO: 1712 - DNA, 476 bp, Glycine max
  Probeset Number=SeqID_11491
aaaacaaagagttaagagagagaaagagagacatggttagagagagagagagagagagagagcagagacaccgttcggtgctccgctgaatacagttgtggcgccagcgctccgtttcgtagctgctccattttttccacaccccattataaattttagttttttctttttaaatttttaatctttttgggttttgctgaatacccatttaactttgatgatttagttgcaatgatttcgacccaccgggtactattaagggaagatggaggctttagaattttgttgggttgaggagttacttactattaagttacaaaaaccaatatttatgtcagaatctctgaggataggcctgaatagagtacttgttatagactattaaatagtaatgtgtttgattttttttgtatttacttgtaaggaaatcaytggcccktatttttaggaattaacggtatawgtagtagttttgg

SEQ ID NO: 1713 - DNA, 391 bp, Glycine max
  Peptide Sequence Number=SeqID_9258
  Probeset Number=SeqID_11492
ccatgctgctgttaattttggacaatatccttatgggggcttaatcctgaaccgaccaactctagccataaagtttatcccaactgaaggaacccaagattatgatgagatggttattaatcctcaaaaggcttatctgataacaatcacatccaagtttgagacccttattgatctttcactgatagagatattgtcaaggcatgctttagatgagatatatcttggatagagggagactccaacttgcactattgataataatgcattagaagctttcaaaacgttcggatgcatactgactggaattgaacgactagtcatcgcacggaacattgatccaggtcttgataaacctagatcgggccagttctgcgtgacatatactatt

SEQ ID NO: 1714 - DNA, 752 bp, Glycine max
  misc_feature (4)..(8): n is a, c, g, or t
  misc_feature (10)..(10): n is a, c, g, or t
  misc_feature (12)..(13): n is a, c, g, or t
  misc_feature (18)..(18): n is a, c, g, or t
  misc_feature (20)..(24): n is a, c, g, or t
  misc_feature (26)..(26): n is a, c, g, or t
  misc_feature (32)..(35): n is a, c, g, or t
  misc_feature (37)..(37): n is a, c, g, or t
  misc_feature (41)..(45): n is a, c, g, or t
  misc_feature (47)..(49): n is a, c, g, or t
  misc_feature (51)..(53): n is a, c, g, or t
  misc_feature (55)..(55): n is a, c, g, or t
  misc_feature (57)..(58): n is a, c, g, or t
  misc_feature (60)..(60): n is a, c, g, or t
  misc_feature (64)..(64): n is a, c, g, or t
  misc_feature (70)..(72): n is a, c, g, or t
  misc_feature (76)..(76): n is a, c, g, or t
  misc_feature (82)..(82): n is a, c, g, or t
  misc_feature (84)..(86): n is a, c, g, or t
  misc_feature (88)..(89): n is a, c, g, or t
  misc_feature (92)..(92): n is a, c, g, or t
  misc_feature (96)..(96): n is a, c, g, or t
  misc_feature (108)..(109): n is a, c, g, or t
  misc_feature (747)..(747): n is a, c, g, or t
  Peptide Sequence Number=SeqID_9259
  Probeset Number=SeqID_11493
cgannnnnanannacaancnnnnnanaaacgnnnnanaacnnnnnannnannncnannancccnaaaatnnngtcnccgcgngnnncnntcnaaantatgatccccgnntgcagcattgtcgccgcttgatttctggcgctgggcttcaaaagcgcataaagtgaaaactgaaacccggtcaccagttttgcacataaggctgtatccgtttcggggctttggccgttagcttatatttgttttcatggcaaaccgtttaaaaaagaaaacgccatcaccgcccagcccggagcaactaactccagataaggaaacacaggtaactgttaccgaagtggtgaaagatgaacgtactgccaagatcattggagcggtgagcctcttgcttacagtctttcttttcgtagcattcacttcctatcttttcacctggcaggaagaccaggataaagtataccgtttcggtattaaaatttttgctacggatgatgtgcacgtcagcaacctcttgggtgtactaggggcttatgtagcgcacctgcttttttacaaaggattcggactggcatcctatctcttttgtactttcttctttgtgttgggggttaatctcctgttcggaaaaaaaatattcaacctggtacgcaacctcaaatatgtactcgcaggtttactggtattgagtatgggctttgcatttgtagcgagaaacagcagcttctcgggggggcccggtacccaatcgnttcaa

SEQ ID NO: 1715 - DNA, 1576 bp, Glycine max
  misc_feature (251)..(251): n is a, c, g, or t
  misc_feature (589)..(589): n is a, c, g, or t
  misc_feature (690)..(690): n is a, c, g, or t
  misc_feature (1255)..(1255): n is a, c, g, or t
  misc_feature (1269)..(1269): n is a, c, g, or t
  misc_feature (1276)..(1276): n is a, c, g, or t
  misc_feature (1324)..(1324): n is a, c, g, or t
  misc_feature (1362)..(1362): n is a, c, g, or t
  misc_feature (1398)..(1398): n is a, c, g, or t
  misc_feature (1400)..(1400): n is a, c, g, or t
  misc_feature (1519)..(1519): n is a, c, g, or t
  misc_feature (1523)..(1523): n is a, c, g, or t
  misc_feature (1549)..(1549): n is a, c, g, or t
  misc_feature (1552)..(1552): n is a, c, g, or t
  Probeset Number=SeqID_11494
cctccacccacactcttctttttctcttccatgagggggcgtatacccaaactaccacatctggccgctctggtgtcccgggatttattacccttcttggttgtgactcttgtattcttcacctgtatagtgatatgttggttttcctcgcatcgggtgttgcttagtctcttctattctataggctacgtcgctagtggttatagtttgattttgtgtgctgtgtcttcgctcgtgccgtggtgacggtnctcacgcttccattctcgtccacatcgtccgatctgttaccctcctattatgcctagttcgcgatgcatccgcactctacaccctacctcctgtagttacggcgagtatggtctctggttggggtttgttgccttctcgctattcttaataataatccttactgtgacatgcttactctctttacctgtgcgtatacaattattgcctcccgtgcgcgagacgccgggggtagtgtgttaatcaactaacggtgtgagatggggtgggtagagcattgtctatcgccctgcttgacgcgcaccatcgttatgtagatccctctccactaggctttcgntctgtcgtttagaattatgttattacagatatagtgttttactaaggtagttccctatgttcggatagagtatttatatcgtcgtccatgatgcgtcttcncatctccaagtgtcacaacactgtacgtcctaattgtcttccatacttgcacagcacacggctcgctcgccatacggcactgcttgtctcgtgttgtccacatgagtcagagtattacatccagatagtccacatgtcgttaccttcgcccataagcgtcacatcttctcaagcttcggttttaatctcgttgcgtacgaccgaacgttgagatcttttttctcacatacggtatagtacaagctgacaacgtccacgggacatgcacgctcccgcaccccgtaatacgcgcgaaggtggtgcgattcatatcatgctgtatcttcactaacggctacatgtgctctcatactccgcatctgacaatccgtgcgcggacagagtgtaagagcgacgcatacgtcctatagagatgagtctcgccgatatcgttctgaccttgcggtacttgtgttaaccgacgtaatacttctcacacagcgataagtaatgtacatagatgcgtggctcttatcatacgagtaccgtacttcgtcgatggacctcttcataatccattagatcnaccgagtagagcgntccgtcntctcgtcatgtatggagcatactgcgacgatgtctgtgatgtcccgcngtccgcagtgtgtgaataggtggtgtctagcatcagtnagtgtgtccgcactcgcgtcgctgttggaagtcttntntatatacatgagccactggatcgacgtgctcacatatactcactcatctatcatcgatgcacgcgtgttaatgtgtatgctcatatgtgctattatcactatacatggatagtgcaaanctangtacgtgacacgcaccgctctcagantangtacatcgccgccgatataatact

SEQ ID NO: 1716 - DNA, 1849 bp, Glycine max
  misc_feature (1)..(1): n is a, c, g, or t
  misc_feature (15)..(15): n is a, c, g, or t
  misc_feature (19)..(19): n is a, c, g, or t
  misc_feature (37)..(37): n is a, c, g, or t
  misc_feature (43)..(43): n is a, c, g, or t
  misc_feature (58)..(58): n is a, c, g, or t
  misc_feature (94)..(94): n is a, c, g, or t
  misc_feature (158)..(158): n is a, c, g, or t
  misc_feature (165)..(165): n is a, c, g, or t
  misc_feature (266)..(266): n is a, c, g, or t
  misc_feature (289)..(289): n is a, c, g, or t
  misc_feature (296)..(296): n is a, c, g, or t
  misc_feature (325)..(325): n is a, c, g, or t
  misc_feature (334)..(334): n is a, c, g, or t
  misc_feature (377)..(378): n is a, c, g, or t
  misc_feature (401)..(401): n is a, c, g, or t
  misc_feature (467)..(467): n is a, c, g, or t
  misc_feature (555)..(555): n is a, c, g, or t
  misc_feature (596)..(596): n is a, c, g, or t
  misc_feature (601)..(601): n is a, c, g, or t
  misc_feature (619)..(619): n is a, c, g, or t
  misc_feature (663)..(663): n is a, c, g, or t
  misc_feature (744)..(744): n is a, c, g, or t
  misc_feature (904)..(904): n is a, c, g, or t
  misc_feature (927)..(927): n is a, c, g, or t
  misc_feature (1016)..(1016): n is a, c, g, or t
  misc_feature (1092)..(1092): n is a, c, g, or t
  misc_feature (1094)..(1094): n is a, c, g, or t
  misc_feature (1121)..(1121): n is a, c, g, or t
  misc_feature (1192)..(1192): n is a, c, g, or t
  misc_feature (1203)..(1203): n is a, c, g, or t
  misc_feature (1265)..(1265): n is a, c, g, or t
  misc_feature (1441)..(1441): n is a, c, g, or t
  misc_feature (1446)..(1446): n is a, c, g, or t
  misc_feature (1527)..(1527): n is a, c, g, or t
  misc_feature (1543)..(1543): n is a, c, g, or t
  misc_feature (1656)..(1657): n is a, c, g, or t
  misc_feature (1664)..(1664): n is a, c, g, or t
  misc_feature (1666)..(1666): n is a, c, g, or t
  misc_feature (1673)..(1673): n is a, c, g, or t
  misc_feature (1723)..(1723): n is a, c, g, or t
  misc_feature (1729)..(1729): n is a, c, g, or t
  misc_feature (1731)..(1731): n is a, c, g, or t
  misc_feature (1742)..(1742): n is a, c, g, or t
  misc_feature (1745)..(1745): n is a, c, g, or t
  misc_feature (1747)..(1747): n is a, c, g, or t
  misc_feature (1809)..(1809): n is a, c, g, or t
  misc_feature (1819)..(1820): n is a, c, g, or t
  misc_feature (1823)..(1823): n is a, c, g, or t
  misc_feature (1843)..(1843): n is a, c, g, or t
  Peptide Sequence Number=SeqID_9260
  Probeset Number=SeqID_11495
nctgctcggtcgagntgtnacacgctgcattaggtanagccgncacagtgcgtattangactcatgtgagacaggagatgtgggtctgatagantactattacacatcgtcgacatcaccatcatacactcatctcgtgcgtaggtacgtgctcgctngcgtgcntgatgacatcatcattattacgtctgtgtacgtgcattgctgctgtagcaacaacagatatcacaaacagagatagacttgggatacgtagtgtcattccncggtatgcgaatgtgttattagngacgctncgagaatgatcgatgatatgcgttagagntacgtgtancacgtagtactgatgggtacgagtagctaagctgcgtcgatgnntttgatgccgtgtgcgtgcgctngtcgtgtgactcgtgtcacgtgattactcatagagtgcgcgctcgtgcatcagtacatcgagtgangatgacatcacgatccgctctggtcgtacgatctgagttagaggctagatatgagactcagttgagcagatcgcacagtcgtggatcntgagacgtacgctgcatagagagtatgtgaggtcgattagntcatnttgcgtatcgcatcgcantctggtatagagctgaagccgtggatgtgctgcatgaagtcaantgctatatatgcagtatcgatgttattgtcatccagcactatgctgcgcacgagagcgcctgcgcacgctgtacactacangcgacatcagggcagtcgttggtgtctcgtgcgtggcgggctgagtaccagacagacgagtgacgcgcgtgttcgatgtcgacgcagatcgtgtacgctcgtggatggcgaggtattgttgcagtcatatgaacagcgagatctggcgatgacggcagantcgcgtgtggagcagacagctgngttcgactgcgctgtcatattagtaagtcgcgagacgacatcatcgtgtatgcacgtagccgccagtcgatcagtgaacagtgcgtgcntcgtgcacacgactatgccgtccttgctcgtcgacgtgtggtcgattgctctctctcgcgcagtcccacgactgtncngcgctgtgcgtgttcatgtgtctgtcncatctacgtgagcgtcgcggtgcgtcgttgtgtgggtctatggggtgtatgttgctatctctctgtgtatngatgtggtagntttatcatatgaattcatagtgttagtatgatgtgtgattctagtctagtgtgttgggtcgntgtgtgttgttcagttgtatgctagtgtttgtgtatacgctgtgtgatgtcgtcacgtacgagtctcacgagcgtgctgtgcgatactatcatcactaccgtgccagctgccacgctcgtgccgcaacctcacgtaatatgtcgtgcgccggcacagagatcactgagttgatgcnaccgnagtgtcgacgagtacgaggtcgagtgatagtcaggacggagctgcggtgacgatagatgagtagtgcatggacatagagtntgcagtgacgcagtgnacgagtacgcgtacttcatatatttcgatcgcgtgtggcgtgagtacgtgtatagtactatagttagtgtattaattactgcatacatgtctatccgtcctctcgtatcaganntctcgcnanatgttcntcttgtacatataatgactattaacatctctgagaagatgagtagagctntattananatattggttantantntataagctcgactgctacagcacctgctactgattgctgtctacgtacatgcactaataccncacgactacnncancacacagaggtctcgcagcnccgatt

SEQ ID NO: 1717 - DNA, 495 bp, Glycine max
  Peptide Sequence Number=SeqID_9261
  Probeset Number=SeqID_11496
gcccgactccgccgagctcatttccctcaccctctctctgcgtcgccgtcgccggcgccgccgcgacgctgtactccgtctccctggacccgatagttcctcgaccctagttcgttcgacgagggaattcttcgggtggctgcaggagatggcggcgttcctgaggtcaaagtgctcctcagttgggcgtacgttgatgggaagcgttggaaacaatctgaatgggggtatcaattcctctgctgaaactgtgacaagaccatctcactgtgatgctatcagccagcaaatcaggacattcatccagatgagaaccaacctcaaggtggtagacaactctggagccaaacgggtcatgtgcatacagtccttgagggggaagaaaggagcaaggctaggggacatgataattggttctgtgaaggaagcgcaacctcgcggcaaggtcaagaaaggtgatgtggtctatggtgtggttgtccgtgtccgctatga

SEQ ID NO: 1718 - DNA, 509 bp, Glycine max
  Peptide Sequence Number=SeqID_9262
  Probeset Number=SeqID_11497
ccaaaccctgttccacaagcccactcctactcctactggacccaccgaactcagcctaccagcgcagaagtacacgcgcagtcaggttggagcaggggaggtcgatctggtagcggagccggtcgaatgccttttggcggagggcctgacggaggaggaggggacgctgcaggggatgaggggctgcgtcgtagacctcaagctccgggccgtagggccgcggtggctcacggggatcgagggatccatcgcctgccatcactctaggcccctcatgatgaccagcgtcggtcgcatccacgccaggcttcacgctcaggccctcacacgttcaggattaggtttgttcggcgctgctggagtactatgaccaccagacagactcagcaaaaaggactccgtgtagaagaggcagcaagttataatataggcttccattagctgatatggcaatttgttgatgttattttctgagcaaacaatctggcatttcacatgccgttatcaag

SEQ ID NO: 1719 - DNA, 1277 bp, Glycine max
  Peptide Sequence Number=SeqID_9263
  Probeset Number=SeqID_11498
gaatttttaaattaacttaatgcaatttgcatcggaagaaaacatgagcagacctaacacttccatcacccaagaagaaaagaaaaaggaaactccatggaagctagttatcttctgctttttattcgtcttccttttccttatggtcatgttctggcctcctgcaaagcaaattctcctcaatactgaagcttatcttcaagatcaaggctggtatggtagaatcctcatgaccctcgttataggtttcattattgtgcctattggtctcccatacagcatgttccaaatgcttttcgctttagttgttaaaggatactggttatcattgcttttgacctgtgttgcccaaacaattggagcaggcattgcttatatccttaccaaatatgtcatgagggaccaaatcagaggatggttccataaacataagatgttcagaggagtagaagccatattaatgaaagacccagtaaaattctctgtcatccttaacttgacaaatattcctaccattattaaaaactacgccttggctatgccagaaaacattggtgctaaagtatatatgtctactgctatccttggaattgtttttacctctgctccacaaatctacgtattccaagaagcttctgaattaggagaactttttgaccataaaagaagtactttaagtacttgtttcacttgcattaccactcttttatctattgctgttattgtctatgtcatgtggtataccaagaagattctcaatgatcttgataatgaagttgttcacctcaataaatctgttgatcatcatcatgatattcaggatattgaatcaggtattcccgttgagaaaaaagaaactaaagaaactgcaagttctgaacgtaaaagtgctgacagtaacagccctccaagagtggatcaatttaaacttataaaaaaccaaagaggatcactcgagatggtagaaccatatcttgataatttagcttgctaatttcagctaaaattgaaaatgaaaaggatctgaagaccctggtttaatatctacatcaagatatctttatatcaccttgcctttataatgctctctgggaaattttgactttaacagagagaaaaattgcattgagttgtgtcgaatgtatttttatttgcattgtttttatggatttatcaatgttatttatgaccatgagcctttgagattttaccttaaaggctctctggttaacttacaaagtctctgcttttttactgttttattcaaattaaaactc

SEQ ID NO: 1720 - DNA, 1424 bp, Glycine max
  misc_feature (2)..(2): n is a, c, g, or t
  misc_feature (59)..(59): n is a, c, g, or t
  misc_feature (83)..(83): n is a, c, g, or t
  misc_feature (91)..(91): n is a, c, g, or t
  misc_feature (109)..(109): n is a, c, g, or t
  misc_feature (141)..(141): n is a, c, g, or t
  misc_feature (159)..(160): n is a, c, g, or t
  misc_feature (164)..(164): n is a, c, g, or t
  misc_feature (178)..(178): n is a, c, g, or t
  misc_feature (188)..(188): n is a, c, g, or t
  misc_feature (201)..(201): n is a, c, g, or t
  misc_feature (216)..(217): n is a, c, g, or t
  misc_feature (241)..(241): n is a, c, g, or t
  misc_feature (312)..(312): n is a, c, g, or t
  misc_feature (324)..(324): n is a, c, g, or t
  misc_feature (343)..(343): n is a, c, g, or t
  misc_feature (397)..(397): n is a, c, g, or t
  misc_feature (404)..(404): n is a, c, g, or t
  misc_feature (407)..(407): n is a, c, g, or t
  misc_feature (446)..(447): n is a, c, g, or t
  misc_feature (451)..(451): n is a, c, g, or t
  misc_feature (501)..(501): n is a, c, g, or t
  misc_feature (503)..(503): n is a, c, g, or t
  misc_feature (537)..(540): n is a, c, g, or t
  misc_feature (545)..(547): n is a, c, g, or t
  misc_feature (582)..(582): n is a, c, g, or t
  misc_feature (590)..(590): n is a, c, g, or t
  misc_feature (644)..(644): n is a, c, g, or t
  misc_feature (694)..(694): n is a, c, g, or t
  misc_feature (710)..(711): n is a, c, g, or t
  misc_feature (725)..(726): n is a, c, g, or t
  misc_feature (755)..(755): n is a, c, g, or t
  misc_feature (786)..(786): n is a, c, g, or t
  misc_feature (838)..(838): n is a, c, g, or t
  Peptide Sequence Number=SeqID_9342
  Probeset Number=SeqID_11499
tntcggatcgtcgcatacgtactagtttctaactatttgttaacataaaagctcggcgnccgtgttgttacgggacgattatntacaagtntataattttacgtaatgntttggtttgttgatggggtgtggagagtgtgnttactctctggcacgcgnncgtngctacatctctatnatccgttctngctgtgctacagnatctttctacttcanngagcactacgcatgtagtgacgtncgggagatatgctatatagaacacaactatgtattattttaaaattatgcattcctgggtgttatcggggnggcaagcacggngtgtccggctggtcaccanagtgaagcaatgagtcagggacctagaattagcgagggtgggtcttaacaactnatagtgnacngtagtgctaggacattgtcaagtggtattatcaccttcnnaacngacaagacagtagattatctcgatttcctcgcgtgagaaggatgcaagancnaggggtggagatgattgttgagttgtcgggcgcnnnnaggannnggatacaaaatatctgagctccggactgtggtatnggacaaanaacagagttagggggggaggtaacataaaagacaccagacacatcacaggatgnttgggaggggctctttacgcgtcgttcgtcaacataaggggaacttaaanaaagataatgtcaggnngcccctatccacgnnggaccgagcacaccccatacctattcaanccatatgctgggctttgagaggcgagccggnccacaaggcgcgagtggaccgtaccacactccaaaagactaagcaaactctnccgtgctgccgcacaatacaatcagagagagacgcgacgctagaatacaaaaacatatacttggtctgtaggagcgccagtaggaataatagagaggtggggcatctactagtttttccctaatcgaagatagaaacaacacttataagtgtgaacatacagtataatacgacgtcgagcgtttggtgtgaagggtacctttatatatatatctagagccgatgagtggatatcgcatagtgttctcgatgtgatatcacgcaagcgagcagggagagatggtctatattgatctggtcatatggttgttaaataacaaagatgtattggtaatgtctttttcgagattttgtttttatgagtatataaggagatagtaatgaatgttgcgcggaaaaagaggaggcaataaacggaaattcgcccttctctccccagctcaccgggggagtatctccattaatttttgaggggggcgcgaccgccaacacaggggggggtaggctccttattttttgtttagggtgtgtcatcttaattacggaggtgaggtggtggaggggtgaagagaggggggggggggaaa

SEQ ID NO: 1721 - DNA, 1783 bp, Glycine max
  misc_feature (1)..(1): n is a, c, g, or t
  misc_feature (11)..(11): n is a, c, g, or t
  misc_feature (39)..(39): n is a, c, g, or t
  misc_feature (77)..(77): n is a, c, g, or t
  misc_feature (87)..(87): n is a, c, g, or t
  misc_feature (105)..(105): n is a, c, g, or t
  misc_feature (114)..(116): n is a, c, g, or t
  misc_feature (128)..(128): n is a, c, g, or t
  misc_feature (130)..(130): n is a, c, g, or t
  misc_feature (209)..(209): n is a, c, g, or t
  misc_feature (213)..(213): n is a, c, g, or t
  misc_feature (250)..(250): n is a, c, g, or t
  misc_feature (317)..(317): n is a, c, g, or t
  misc_feature (335)..(335): n is a, c, g, or t
  misc_feature (341)..(341): n is a, c, g, or t
  misc_feature (454)..(454): n is a, c, g, or t
  misc_feature (457)..(457): n is a, c, g, or t
  misc_feature (464)..(464): n is a, c, g, or t
  misc_feature (476)..(476): n is a, c, g, or t
  misc_feature (491)..(491): n is a, c, g, or t
  misc_feature (516)..(516): n is a, c, g, or t
  misc_feature (522)..(522): n is a, c, g, or t
  misc_feature (529)..(529): n is a, c, g, or t
  misc_feature (544)..(544): n is a, c, g, or t
  misc_feature (546)..(546): n is a, c, g, or t
  misc_feature (574)..(574): n is a, c, g, or t
  misc_feature (615)..(615): n is a, c, g, or t
  misc_feature (671)..(671): n is a, c, g, or t
  misc_feature (685)..(685): n is a, c, g, or t
  misc_feature (713)..(713): n is a, c, g, or t
  misc_feature (718)..(718): n is a, c, g, or t
  misc_feature (800)..(800): n is a, c, g, or t
  misc_feature (922)..(922): n is a, c, g, or t
  misc_feature (946)..(946): n is a, c, g, or t
  misc_feature (956)..(956): n is a, c, g, or t
  misc_feature (962)..(962): n is a, c, g, or t
  misc_feature (982)..(982): n is a, c, g, or t
  misc_feature (1009)..(1009): n is a, c, g, or t
  misc_feature (1046)..(1046): n is a, c, g, or t
  misc_feature (1075)..(1075): n is a, c, g, or t
  misc_feature (1077)..(1077): n is a, c, g, or t
  misc_feature (1115)..(1115): n is a, c, g, or t
  misc_feature (1141)..(1141): n is a, c, g, or t
  misc_feature (1154)..(1154): n is a, c, g, or t
  misc_feature (1184)..(1184): n is a, c, g, or t
  misc_feature (1201)..(1201): n is a, c, g, or t
  misc_feature (1227)..(1227): n is a, c, g, or t
  misc_feature (1240)..(1240): n is a, c, g, or t
  misc_feature (1249)..(1249): n is a, c, g, or t
  misc_feature (1288)..(1288): n is a, c, g, or t
  misc_feature (1352)..(1352): n is a, c, g, or t
  misc_feature (1359)..(1359): n is a, c, g, or t
  misc_feature (1370)..(1370): n is a, c, g, or t
  misc_feature (1376)..(1376): n is a, c, g, or t
  misc_feature (1380)..(1380): n is a, c, g, or t
  misc_feature (1389)..(1389): n is a, c, g, or t
  misc_feature (1391)..(1391): n is a, c, g, or t
  misc_feature (1406)..(1406): n is a, c, g, or t
  misc_feature (1410)..(1410): n is a, c, g, or t
  misc_feature (1415)..(1415): n is a, c, g, or t
  misc_feature (1432)..(1432): n is a, c, g, or t
  misc_feature (1465)..(1465): n is a, c, g, or t
  misc_feature (1484)..(1484): n is a, c, g, or t
  misc_feature (1486)..(1486): n is a, c, g, or t
  misc_feature (1488)..(1488): n is a, c, g, or t
  misc_feature (1490)..(1490): n is a, c, g, or t
  misc_feature (1519)..(1519): n is a, c, g, or t
  misc_feature (1527)..(1527): n is a, c, g, or t
  misc_feature (1539)..(1539): n is a, c, g, or t
  misc_feature (1547)..(1547): n is a, c, g, or t
  misc_feature (1549)..(1549): n is a, c, g, or t
  misc_feature (1559)..(1559): n is a, c, g, or t
  misc_feature (1710)..(1710): n is a, c, g, or t
  misc_feature (1720)..(1723): n is a, c, g, or t
  misc_feature (1728)..(1730): n is a, c, g, or t
  misc_feature (1732)..(1733): n is a, c, g, or t
  misc_feature (1738)..(1739): n is a, c, g, or t
  misc_feature (1741)..(1750): n is a, c, g, or t
  misc_feature (1759)..(1759): n is a, c, g, or t
  misc_feature (1762)..(1765): n is a, c, g, or t
  misc_feature (1768)..(1770): n is a, c, g, or t
  Probeset Number=SeqID_11500
ngtagatcacnggtaatatgtactgtatagtgagatgtngtgtgagtcgtgcgtgtgattgtcaggactagatcctncgatctcacntatgtcgtatgatgacgntagtgctgnnngtgtggtagtgntnagtggagttggtgtcgtgctctcgatcagtcggtcgtgtctgtgtgatagctatacgttggatgatcagtagtagtctngctncttctgtcttcttgtgcgagatgtgtcgtgttgcgcnggagcgcggcggcgagtgcagtcgcgtctcgttgtattataatcaattagtttcgtcttacgtagtnggcgctgtcgtcgatggngctacncggtgatatacgcggtgcgacgtgtggtcggagtcgggagcgcgagagctggagagtgcgtgctgggacagaagggaaggaagcagagatctgcaggctcgtgtgagatagtngcngcgatcncgtcagcatggngctgcgacgcgtganggtagtgagagcgagcaggcggggngggtgnggtagtntggcgggcgttgtgngngctagtcgatggtctcgcgacgtggttnggctgcggcgcgagctatggtgtggatgtgagcgtcgagtngcgatacggtgatgtggtagctgtcgcagtccacctcggtgcatgatgagagtctngggtggtagacgantgagagtgtatcggtgtggagacgacgngctgngtgtgatgtgtggcgagagcactttacttcgtgcccggtctggcgtcggcgggatgcgggtcgagagtgattatgttatggngcgtggcggtcgtggcgcgcgggacgtgtgtgtctcttgatcattctcgtgtgcagtgcgtgtacgagtggtggggagtagcgtgtcgcgtggcctgcgagctacgagtatcgccttggacntgatcctcgttgtgagatccactntgcccacgcngacatncggagcagaggcatgacatnttgtagtctgctctcgtttgtgtgtancgcgtggagcgtcatatggcagcgatgagtcgccgcngcgcgcgcagcgggagtcgtgacggcagngnatgatgcagggtcgctgtacttatgatgacgcacagcnagcaggatgatgatagtgctcgatcngtgaggtgcgacnctatggggcatgtggtgccgcgccgcagcngtggagcgtctgtgtgngtgcggtatgtctctcttattctatncttctggtgtgcntctgtgtgntgtggtatagtgtagagcgcgtcagtgtacacgatcgangctagaggatgtgtatattatctcgtattgagtaggactcagacaccgtgtggtccttctttcntatgtanagatatatganacatanagantaaatagananacataatactgatantcgngtganatagaggtactgagagngagggatgatagacagcgagacagagacagtanagatatacagatactcacnanancnacctagacacatacatagacgagagatanactggganagagagagaganatatcgtntnagtgagacanagtgatatatttctctcgtgcatctcgctgcgtgcgtgcggatgcgtcatacataggtgagcgatatgtagtgctgagatactgcagcggtggcgttcgtggtgtgatgattgcccgagtcctcttagcccgttccctccgctctaggtgngcccgccccnnnnccgcnnncnnaccanncnnnnnnnnnnggggggggntgnnnnggnnnggagggaccaaaa

SEQ ID NO: 1722 - DNA, 2067 bp, Glycine max
  misc_feature (97)..(97): n is a, c, g, or t
  misc_feature (105)..(105): n is a, c, g, or t
  misc_feature (186)..(186): n is a, c, g, or t
  misc_feature (188)..(188): n is a, c, g, or t
  misc_feature (239)..(239): n is a, c, g, or t
  misc_feature (261)..(261): n is a, c, g, or t
  misc_feature (276)..(276): n is a, c, g, or t
  misc_feature (278)..(278): n is a, c, g, or t
  misc_feature (280)..(280): n is a, c, g, or t
  misc_feature (396)..(396): n is a, c, g, or t
  misc_feature (404)..(404): n is a, c, g, or t
  misc_feature (503)..(503): n is a, c, g, or t
  misc_feature (619)..(619): n is a, c, g, or t
  misc_feature (632)..(632): n is a, c, g, or t
  misc_feature (644)..(644): n is a, c, g, or t
  misc_feature (722)..(722): n is a, c, g, or t
  misc_feature (1007)..(1007): n is a, c, g, or t
  misc_feature (1068)..(1068): n is a, c, g, or t
  misc_feature (1143)..(1143): n is a, c, g, or t
  misc_feature (1174)..(1174): n is a, c, g, or t
  misc_feature (1251)..(1251): n is a, c, g, or t
  misc_feature (1400)..(1400): n is a, c, g, or t
  misc_feature (1409)..(1409): n is a, c, g, or t
  misc_feature (1518)..(1518): n is a, c, g, or t
  misc_feature (1677)..(1677): n is a, c, g, or t
  misc_feature (1681)..(1681): n is a, c, g, or t
  misc_feature (1714)..(1714): n is a, c, g, or t
  misc_feature (1717)..(1717): n is a, c, g, or t
  misc_feature (1820)..(1820): n is a, c, g, or t
  misc_feature (1828)..(1829): n is a, c, g, or t
  misc_feature (1834)..(1834): n is a, c, g, or t
  misc_feature (1867)..(1867): n is a, c, g, or t
  misc_feature (1879)..(1879): n is a, c, g, or t
  misc_feature (1929)..(1929): n is a, c, g, or t
  misc_feature (1937)..(1937): n is a, c, g, or t
  misc_feature (1944)..(1944): n is a, c, g, or t
  misc_feature (1982)..(1982): n is a, c, g, or t
  misc_feature (2017)..(2017): n is a, c, g, or t
  misc_feature (2023)..(2023): n is a, c, g, or t
  misc_feature (2043)..(2043): n is a, c, g, or t
  Peptide Sequence Number=SeqID_9343
  Probeset Number=SeqID_11501
ttctactatatgttcattctccactgctcgctttaccactcgtgctctcacctccttaccctctagcgcatcatactcctctatcttataccccccnacccaccncccccgcctatagggtcatcctctgtacttagttcatgctctctacacagcagatatgcatacaggtagtctatagatcantnaggggtctactatcaccagctatctaactcatcctcttctaaagatcatantcaactcacactagcgatgctnccaatctgatgggtncntnactaacacatacatatatatatatctacacatacacacactctccgttgctatatatataagactctctctcttacacacccacacacacacacacattcatctatatccatatcnatatctcntcacatagatacacctatacatatagctacatccacatacacacacatatctatacctacatactcatgaatatacttctcgtccgtctctctcactcnctcttcgatatctacaccgtctctctcttatcaacacactatcacactgttatacctctcctcgtcactcctctcctctattcacatccgctctacttccgcctctacttcaactnctctacactctcntatacgtccctncatctacattgcactacgaactattccctacacattcacttcctctatctcataacatacactcttatccaacctctnctcatattctctcctcacactcttctctcatataaacacgcatctcagttttacttcctcgtactactacccactatactgctctactttcgatcacatgacaactgctccctacctactctaagtacactcactcgtactacccacacacatactctcactctcactaatccacatcgcactacaaccctctccactaactatcgcactcctccaactcactctcactcacaccatactcctctcctcacctacttaatcacacaatcgtaccacttcctactnactacgtcacccactcctcacttagaccataatctatactcttctatttactctctatcgnctcactcaactctcgttactatcaacttagtactaccatatctcgcctactctcctcatccctcgtcatactctntatcaatcactacatcgcgcacatcctctcngctccttactacccgacccacctaacagcaatccatatcctatacatacatcgctcatcatctcatcttcttcaccnactatactctctctacatatattacacctcctacatcctataattctctcatcactccctatcctctacctctcacgattctagatcaagccgaagtagtctctcgtctcattagcaacaccatcctcttactacctatcacaccatcnttacatctncatctcatatacaacatcactgctctcagctcctactcgccgaccatcacacatacacatcacatgactcgactatctacattacgctcacactcctactcatctatcncgattacacatccgcatcatcaccatagctatcaacacactccacactctacctatatctcactcactctactatatcgtcatatctctctcatctcttagattcgtcgctacatcactcatactactctacctacgcttctctatatatcatctcgcntgtncgtcactcttatctctctctcaccacatctctnctntctctacctactctgctcatcacactcctctctctactcctatgattcgtcttaaccacctctccaactgctagctgcgcgctcttagctactatgttgacancatgccanntaaangtgtcaactctcgatatcagactctacaagctnatctactatatnatccacactacctgtcatctcatgacgatgtactttcatgacatcactanctcgccgntcctagnacactgatgtatgacactcaacgtctactgcctttacntatccactctccgtcccgtattattttactgctcntacgtngatcccgcatcctactatgnactgcgactcacgtcatactcgta

SEQ ID NO: 1723 - DNA, 1574 bp, Glycine max
  misc_feature (19)..(19): n is a, c, g, or t
  misc_feature (46)..(46): n is a, c, g, or t
  misc_feature (71)..(72): n is a, c, g, or t
  misc_feature (80)..(80): n is a, c, g, or t
  misc_feature (938)..(938): n is a, c, g, or t
  misc_feature (948)..(948): n is a, c, g, or t
  misc_feature (1010)..(1010): n is a, c, g, or t
  misc_feature (1024)..(1024): n is a, c, g, or t
  misc_feature (1252)..(1252): n is a, c, g, or t
  misc_feature (1277)..(1277): n is a, c, g, or t
  misc_feature (1307)..(1307): n is a, c, g, or t
  misc_feature (1316)..(1316): n is a, c, g, or t
  misc_feature (1385)..(1385): n is a, c, g, or t
  misc_feature (1420)..(1420): n is a, c, g, or t
  misc_feature (1423)..(1423): n is a, c, g, or t
  misc_feature (1554)..(1554): n is a, c, g, or t
  misc_feature (1574)..(1574): n is a, c, g, or t
  Probeset Number=SeqID_11502
tttccttctctctcccccnccctcccctccctcctctccccacccngccgcgcccccaccgcccggtcaanntctatagngagcccaatttcccctcgtcgcaccctcccacacccaccctatctacagcatctcgccataacacccctgctacctctgtatactaagcattccctctctgcaaaaacgtagccttctcgcttctgacgcgtacactctcgggactccacaatcttccagccagcatcttctctccctcctaaattcgacaagtcaccaactccacacctaccggcacagcacatagcagctctttatacctctcaggacaccagtcacacacgctaggtctcctcgatcaatatctgcactcacagctgctacgtctgtctgagccgcactcgctcgtgtcacaaggttgtgttctcgccatagcttcccataccgatccgccgcctcgtagccactgtcccccctgctgcatcccgctcgatctcgcacaattcctccctaccaacactcatcaccaaagacatacatagtatctgacttattcatcactcgcactcatgcatttcttccaccttccatcccactcgccccttgcccgcccttgcctcagcaccccatctctccttccgcccaccctcgcacctctctctccctcatcgctctcatctatctcacctgccccatcgcaacaccgatccaggctctccctctttctattcgtccacctagttgcacgcatcctaccgcctgtactgccagtccgccctcctccactgtgtcactccacatcgctcttatctctcgtccacattgtaagcgcagcccatacacagcgcaccctctacaatctatccttgcacatcagccatcctcgctctatctctcactatcacgcggtgtcgccacactctctactcatctctccnctacacaccncaccctgcacactcaccctctcctctacgcatctaccgcactccagtcgtcatgtgcagctnccccccatacacanacacacagctctagcatcatcgtcgctatcgtgatcacacctcattctcacccgctactacttacaatcatcaccgaccacgcaaatcgtcgctcgtctccacactaactctctctctccatgtccatatgctactcatatatctcctacacagcatcaacactacgattcacaaacgaaaatatctcttagctacgactattatccacactacacccctaccgtgtnctagatgtctagcaccgaaaatctntagcactctgttgagagtcgctgtatcatntcttcactnttcgcttacgcagtgactcatgcattatcttctcctatctatcacacactctctctgttgcgcgacctnccccaactctcactatcacacacacactcacaccntcncacgcacacaccccgacaccgtatatatgactctaaccattatctctactaccatcatcatcatctacaccaccctgatcaatataataatattaacctcgtgaagcacacatatattcacactactcacncctatacctactctacccgn

SEQ ID NO: 1724 - DNA, 1671 bp, Glycine max
  misc_feature (1)..(1): n is a, c, g, or t
  misc_feature (50)..(50): n is a, c, g, or t
  misc_feature (87)..(87): n is a, c, g, or t
  misc_feature (94)..(94): n is a, c, g, or t
  misc_feature (97)..(97): n is a, c, g, or t
  misc_feature (130)..(130): n is a, c, g, or t
  misc_feature (148)..(148): n is a, c, g, or t
  misc_feature (239)..(239): n is a, c, g, or t
  misc_feature (273)..(273): n is a, c, g, or t
  misc_feature (320)..(320): n is a, c, g, or t
  misc_feature (339)..(339): n is a, c, g, or t
  misc_feature (358)..(358): n is a, c, g, or t
  misc_feature (563)..(563): n is a, c, g, or t
  misc_feature (608)..(608): n is a, c, g, or t
  misc_feature (791)..(791): n is a, c, g, or t
  misc_feature (921)..(921): n is a, c, g, or t
  misc_feature (1135)..(1135): n is a, c, g, or t
  misc_feature (1150)..(1150): n is a, c, g, or t
  misc_feature (1239)..(1239): n is a, c, g, or t
  misc_feature (1274)..(1275): n is a, c, g, or t
  misc_feature (1293)..(1293): n is a, c, g, or t
  misc_feature (1315)..(1315): n is a, c, g, or t
  misc_feature (1321)..(1322): n is a, c, g, or t
  misc_feature (1333)..(1333): n is a, c, g, or t
  misc_feature (1404)..(1404): n is a, c, g, or t
  misc_feature (1418)..(1418): n is a, c, g, or t
  misc_feature (1425)..(1426): n is a, c, g, or t
  misc_feature (1449)..(1449): n is a, c, g, or t
  misc_feature (1457)..(1457): n is a, c, g, or t
  misc_feature (1493)..(1493): n is a, c, g, or t
  misc_feature (1495)..(1495): n is a, c, g, or t
  misc_feature (1505)..(1505): n is a, c, g, or t
  misc_feature (1555)..(1555): n is a, c, g, or t
  misc_feature (1561)..(1562): n is a, c, g, or t
  misc_feature (1567)..(1568): n is a, c, g, or t
  misc_feature (1571)..(1571): n is a, c, g, or t
  misc_feature (1574)..(1577): n is a, c, g, or t
  misc_feature (1580)..(1580): n is a, c, g, or t
  misc_feature (1584)..(1584): n is a, c, g, or t
  misc_feature (1588)..(1588): n is a, c, g, or t
  misc_feature (1591)..(1591): n is a, c, g, or t
  misc_feature (1596)..(1596): n is a, c, g, or t
  misc_feature (1601)..(1601): n is a, c, g, or t
  misc_feature (1611)..(1611): n is a, c, g, or t
  misc_feature (1625)..(1671): n is a, c, g, or t
  Peptide Sequence Number=SeqID_9344
  Probeset Number=SeqID_11503
nacagctgagagagcatctcagtaacatcgcgatgatagatgtgcgtgcncagctctcgtaaataccatggtataagcagctcacangcatcgncancatgatggcgcgcgacacacagcactcgcacgnaaactacaccgcgactcncacctctccgtgcacaccacacctagctagtcgcacgggtggcgtcactcgcgaccacaagcgatctcagcgagctctagcgcgtcgtggngctagcgatagcgtcgtgtgtaatagcacatganctgtggtggcgctagtcagcgtctgtgccgttatgactacgatcggnccattcgcagcatgttacnttgtaatctctataatgtngagagtcgctcttgtatagtgtatcgttgtatatcgtatgtctcgttcagtcaaggtacatgagtatggtggcgcgcgcagccgcaaaatcatatcatatgatggcagtgagcgtgcacggcgctagtcctccgtcttgctgtgtgagccgacgctcaagagttctagaggcggaatcagtgatttcgtggtactacatagtctncacggtcgtgtagtcagtactccacccagagtagcataggatgcngcgaagctgtctcgatgatcgatgtcagagcgaaatatgtatatcatacctaggagcaccacctgccactggcgcgcagcggcgctactgtggtcggccgcgcgcagtcatgtcaactaccgtctgagagagtgcatagttgtgcgccagtgagttggtgatacagcacgtgaaagtcgattntatatttactctaatgagagtcgacgagcgcacccacacatcacagacattcacaaatgatcaagacacaccaacctgtgacactcacccggcacccatgttagatatcctctctcaccgcactacaagntcatagagtagaagattgagcttaggttaattacacgagagagatatgttattacttacatgagtgttcgtcatttatatatgagtgaataagtaggaataattgaaattagacactcaacagatgatatagtgagttgagatatattgatgttgggtatgagtggtatgtaggtattaatggtaatttattacttgtagttagtaagagttanatatataataagaanaagaagaagtctatagatgagaggagcatatgaagttgtctcgatggggttgtgtgtgttttatgttttatgtcggcgtatctacaatntttcttttatagatggtatagataacagatatganntcggtcaatataagatgnataagacaccaataacaagagnaatcgnngcaagatattnagaaattagaaaaaaagacgcaacgcgactagacgtacacgtctcgctgttctgtgattaatttttgcatnagataccctctgantctttanntgtgtgtgcacgggcgaggtgtngaggtggngtatagatactaggatgcgcttgagagggtgagacngnagcaagcagnctgtaccaggccaccttccgcgatataaaatgaatgcatagaatgtgtgngagtgnnaacannganggnnnncanaacntatnaancaaancccanataacactanatctaccaacaccnnnnnnnnnnnnnnnnnnnnnnnnnnnnnnnnnnnnnnnnnnnnnnn

SEQ ID NO: 1725 - DNA, 755 bp, Glycine max
  misc_feature (9)..(9): n is a, c, g, or t
  misc_feature (12)..(13): n is a, c, g, or t
  misc_feature (15)..(15): n is a, c, g, or t
  misc_feature (24)..(25): n is a, c, g, or t
  misc_feature (29)..(30): n is a, c, g, or t
  misc_feature (34)..(34): n is a, c, g, or t
  misc_feature (38)..(41): n is a, c, g, or t
  misc_feature (44)..(44): n is a, c, g, or t
  misc_feature (48)..(48): n is a, c, g, or t
  misc_feature (50)..(50): n is a, c, g, or t
  misc_feature (52)..(52): n is a, c, g, or t
  misc_feature (54)..(54): n is a, c, g, or t
  misc_feature (58)..(58): n is a, c, g, or t
  misc_feature (64)..(64): n is a, c, g, or t
  misc_feature (66)..(66): n is a, c, g, or t
  misc_feature (81)..(82): n is a, c, g, or t
  misc_feature (97)..(98): n is a, c, g, or t
  misc_feature (118)..(118): n is a, c, g, or t
  misc_feature (171)..(171): n is a, c, g, or t
  Probeset Number=SeqID_11504
gcacgcgtngtnncncgtacgtannctcnncgtnctcnnnncgntgtngncncnatgnatcagntntgttgaacaacacannccaccatagagagcnngcaacaagctctgccaaacnacaactcactaagaggtttggatgttgtgaacgacattaagacagcagtgganaaggcttgtcccggcgtggtttcttgtgctgatattcttacccttgcatccgaaatatcttctgttctgggtggtggtcctgattggaaagttccatgggaagaagagatagtttaacagcaaaccgaacccttgccaatcaaaaccttcctgctcctttctttaaactcactcaactttaagctgcctttgctgttcaaggtcttgacactactgatcttaatgcactcttaagggctcatacatttggaagagctcactgctctttatttctttggcgaatgttcaattttaatgggccaaggaaacctgttcaactttttggccaatttaattggaaaaattgggccaaaatttcccaatggggacccacaaaccttggaattttaccctttcactcctaaaaaaatgaaaggtctacttttccattcttaggtcaagaaggggtgcttaaaaggatcataactgttttttaacccgtgccgataccatccattggcataagtttagcaggaacaaaagttttctttatgccttggggttcaattaaagatgggataattggttgtcctggaacaaagaaa

SEQ ID NO: 1726 - DNA, 1756 bp, Glycine max
  misc_feature (8)..(10): n is a, c, g, or t
  misc_feature (17)..(18): n is a, c, g, or t
  misc_feature (22)..(23): n is a, c, g, or t
  misc_feature (25)..(26): n is a, c, g, or t
  misc_feature (28)..(28): n is a, c, g, or t
  misc_feature (32)..(35): n is a, c, g, or t
  misc_feature (39)..(39): n is a, c, g, or t
  misc_feature (42)..(42): n is a, c, g, or t
  misc_feature (47)..(47): n is a, c, g, or t
  misc_feature (51)..(51): n is a, c, g, or t
  misc_feature (56)..(57): n is a, c, g, or t
  misc_feature (73)..(73): n is a, c, g, or t
  misc_feature (92)..(92): n is a, c, g, or t
  misc_feature (94)..(95): n is a, c, g, or t
  misc_feature (104)..(104): n is a, c, g, or t
  misc_feature (122)..(124): n is a, c, g, or t
  misc_feature (126)..(128): n is a, c, g, or t
  misc_feature (134)..(134): n is a, c, g, or t
  misc_feature (136)..(136): n is a, c, g, or t
  misc_feature (138)..(138): n is a, c, g, or t
  misc_feature (176)..(178): n is a, c, g, or t
  misc_feature (183)..(183): n is a, c, g, or t
  misc_feature (187)..(187): n is a, c, g, or t
  misc_feature (192)..(192): n is a, c, g, or t
  misc_feature (201)..(201): n is a, c, g, or t
  misc_feature (212)..(212): n is a, c, g, or t
  misc_feature (219)..(219): n is a, c, g, or t
  misc_feature (221)..(221): n is a, c, g, or t
  misc_feature (231)..(231): n is a, c, g, or t
  misc_feature (253)..(253): n is a, c, g, or t
  misc_feature (268)..(268): n is a, c, g, or t
  misc_feature (279)..(279): n is a, c, g, or t
  misc_feature (283)..(283): n is a, c, g, or t
  misc_feature (286)..(291): n is a, c, g, or t
  misc_feature (305)..(305): n is a, c, g, or t
  misc_feature (338)..(338): n is a, c, g, or t
  misc_feature (427)..(427): n is a, c, g, or t
  misc_feature (438)..(438): n is a, c, g, or t
  misc_feature (473)..(473): n is a, c, g, or t
  misc_feature (588)..(588): n is a, c, g, or t
  misc_feature (614)..(614): n is a, c, g, or t
  misc_feature (643)..(643): n is a, c, g, or t
  misc_feature (649)..(649): n is a, c, g, or t
  misc_feature (659)..(659): n is a, c, g, or t
  misc_feature (662)..(662): n is a, c, g, or t
  misc_feature (753)..(753): n is a, c, g, or t
  misc_feature (964)..(964): n is a, c, g, or t
  misc_feature (1072)..(1072): n is a, c, g, or t
  misc_feature (1177)..(1177): n is a, c, g, or t
  misc_feature (1360)..(1360): n is a, c, g, or t
  misc_feature (1413)..(1413): n is a, c, g, or t
  misc_feature (1424)..(1424): n is a, c, g, or t
  misc_feature (1487)..(1487): n is a, c, g, or t
  misc_feature (1496)..(1496): n is a, c, g, or t
  misc_feature (1576)..(1576): n is a, c, g, or t
  misc_feature (1592)..(1592): n is a, c, g, or t
  misc_feature (1656)..(1656): n is a, c, g, or t
  misc_feature (1658)..(1658): n is a, c, g, or t
  misc_feature (1665)..(1665): n is a, c, g, or t
  misc_feature (1678)..(1678): n is a, c, g, or t
  misc_feature (1701)..(1701): n is a, c, g, or t
  misc_feature (1751)..(1751): n is a, c, g, or t
  misc_feature (1756)..(1756): n is a, c, g, or t
  Peptide Sequence Number=SeqID_9345
  Probeset Number=SeqID_11505
tggggggnnnccccggnncggnngnntnggcnnnntggnggngtggncacngtgcnngacttgtgcgaggatngctagctgctgacgacacnannacccagcanggactgaggcgccggctnnntnnnccccantntngcttctctatctcttcatcctcatcacattatctcttnnnttttntttnattgncttgtgttngtacacttctntctctcntncttcttgtanatgttgcataaatatcgcggcncaccgcgcggctgcnccgcggtgtgngagnaannnnnnaagaggtgcgcggngtgagtggagcgcggaagagaagagtacataanagagagacgacggcgaagacgtcagcgtagacgaccaacaagacgagccgaactcaaacccacatccacttccgtcactcctcatatgngactcatatangtctctgtaatgtcagagtgagcagcgcacgagangatggaggtgtgtgggtggtacgcgtccgcgactgtgagtgtgaggtcttgacgcacgtagagagccatatataatacagttacatcatatatatactaaagcactattatatangtagtagataatacagatatatcatnagagtatattagcaatattagtatctaantatatnctatactaantantatatactactgatataatactttataacagaatacgatgcatagaatccttagttacagtgtgtcataattcatattatataatatatantcttcttccgtcatcacgctacgctgcctgtgctcggccgctggtattagacatctcatggcgcgaggatgaaggagtgcagtgatagagatgtaagagaggagactgttatgtgtatgtgacatacgtagatagttagtagagagtgtgatgatggttgaagtggtcgtgcgcgcgacgtgagactcgtgacgatgtctggctagcgcanactatatccgcagctcggcttactatcctaaacagcggacgaacactatgacacacataattatcgcgttgaatcctgatcgcacgtatcaatatgacacatggatantataattatatacaacacgcaccgcaccactgatgataccacaagccacactacagcgtagcatgcggagtgatacgttaagtgtctacatgacgctcttctgtnagtcacaactcttatattatggctagttatattatagtaaccatttgcgatgcaactcgagtcatacactaatagtgctgtcgagtgcagtagcaatgttagtgtgtctgcatgactactatatctcacgatagtttgaatagttcggcacataagactgtgtgcatactagagagtgtgcgngctcgtatgatacgcacgcaagctctgatcgagtgatgaggtcgtgtcataanagatttgatgncagtcggatgcgggacagagagcacgtcgaatcgtacgagcgatcgtgctagcgcgcgcacgngtagatgtncacatatacatgctagggatggcagggtgtcggtcacacgctgagcagcagagagtgatgtggtgaagatatatcatgtngattgctcgtcatagnacagagtgcaaatgcaaatcatataaatataaatagacagaatgtcggcgaatcgacagggagnanaatcaanagcagatgatatntgcacacgtgtgcaatgacacancgcgactcgtagactgatagatctagatgtctcagcagtgacgcgacacntgatn

SEQ ID NO: 1727 - DNA, 470 bp, Glycine max
  misc_feature (88)..(88): n is a, c, g, or t
  Probeset Number=SeqID_11506
aaaaaagattttgatgagctttttaataaaaaaaacaagaggaagcaaatcctagcttttttatctggctttcgaatatttatcgaanaaaccaaaaatagcttcctctctttctcctccgttcttcaccgccactgtaatcgcttcgcctccgacgtctcctccttttcgccaaatccctaaccactcggtgtttctctcctcctccaccgttcacctcggcctcacagtcctacaaaccttccgctggaacctcgtctgctttgaatcaatctcagtagcgaaagctcttgactagctgatacctcggtctttacgtttctggctttaagagctcttgattccctaatatcatcccttcaggcgcgtctgcacagtagagaattgaaacccaatgctaaggagagagttgagtacatgaagcaaagggcagtggagtatgcaaacagttccctggcctgagatactgc

SEQ ID NO: 1728 - DNA, 1565 bp, Glycine max
  misc_feature (1)..(1): n is a, c, g, or t
  misc_feature (20)..(20): n is a, c, g, or t
  misc_feature (140)..(140): n is a, c, g, or t
  misc_feature (256)..(256): n is a, c, g, or t
  misc_feature (326)..(326): n is a, c, g, or t
  misc_feature (328)..(328): n is a, c, g, or t
  misc_feature (459)..(459): n is a, c, g, or t
  misc_feature (653)..(653): n is a, c, g, or t
  misc_feature (662)..(662): n is a, c, g, or t
  misc_feature (802)..(802): n is a, c, g, or t
  misc_feature (996)..(996): n is a, c, g, or t
  misc_feature (998)..(998): n is a, c, g, or t
  misc_feature (1021)..(1021): n is a, c, g, or t
  misc_feature (1089)..(1089): n is a, c, g, or t
  misc_feature (1165)..(1165): n is a, c, g, or t
  misc_feature (1310)..(1310): n is a, c, g, or t
  misc_feature (1369)..(1370): n is a, c, g, or t
  misc_feature (1380)..(1380): n is a, c, g, or t
  misc_feature (1418)..(1418): n is a, c, g, or t
  misc_feature (1434)..(1434): n is a, c, g, or t
  misc_feature (1455)..(1456): n is a, c, g, or t
  misc_feature (1495)..(1495): n is a, c, g, or t
  misc_feature (1497)..(1497): n is a, c, g, or t
  misc_feature (1524)..(1525): n is a, c, g, or t
  misc_feature (1542)..(1542): n is a, c, g, or t
  misc_feature (1564)..(1565): n is a, c, g, or t
  Peptide Sequence Number=SeqID_9346
  Probeset Number=SeqID_11507
naatggtgagtgcgcgcagntgatcgtgtcagcagctctgatgcgcacattgagtagctacaaccaggatatcatagtacgcgcttcctcagtcacgatgtggtggtagggcggtaccactagatgtatatcgagtggcnttcagtacacacatcatatcggctcaagcgcgcagttctactctctcgtcgaatctgcgctcgcgaagtgctcatgcagctgtatgtcatgaagcgacatcatcgactaacacatncgacacaagacgtatgtcacgataaagtctaaccagatgtgagtatgagagtgtattatctccctatcgngncgtgtcacattgttgactaggataagcgatccgtagtagcacgtcactaagtacaatccctcggctgtgactaccggtaggttgtctatacaatctagcggtatccgagtcgtgcggggtgtcatctcgantgcgtgctgcttctacatgatcgagcctgtgagcgactaacattgctacatagacgattagtaacgtaatcagtcgtcagacgccgacgcgctggcgagagcgagtgcgaggcgccagtcgcgagctgctgcgcatcctcgtctgacaagaatgtagagtcatccgcaagtgagcatgtggctatacgataganacagagcgngcgtgtgcctgtcatgtcagcacgaccattactcaatatacgattatgtatgaaagatgcataagacacctcacgaggccggaccgagccgtggatgagatgagcgtatgatgtatcgagacactatatagcatcgttcnaggacgatgagtgtagagtatagcattatcgatgataataatataaagagagacgcgcggcggagcagcgagaggcgctcacgacataaggacgcgcgcagagagatgagagtacgctgatatgtagagtattatggtgtggtgtatcggtagatatacaagcgttgattacagatgctggagtatgtgtatgncncatcacgccatctgaagttaatntattacatacacatcagatgttggaggatgggtacttacgatgagagaggcagcacgcgtgcacgtgnggccaacactgtatatagtagggttggtatgtatctgtctaggtagaggagaatcagagcagtcacaatgagtcgntctcatgtgttggatggagtgataagaaacagagggacactccgcaggtcgtcggcgggcgtgaggcgaggcgcacaacggacgagataacgagcacgatagtaagcggagagtctatggtgcacacaccgcgcgacgcaggctncgcccggcgcagtcgcgcgagtagagagctatcgacatgtatactcgctctgtgtcttnntctcacgagncacggtcataatcatacgactgagtatgcgaagggagnggctttactcagatancacacgcgatgatctgttgtnncgcggtcgagatagatgctataagagatcgagccggagngnagacaacagcatatatgtcgatataannagtgaaaggaggggganggtgggagatgtaggcgtgaann

SEQ ID NO: 1729 - DNA, 495 bp, Glycine max
  misc_feature (1)..(1): n is a, c, g, or t
  misc_feature (6)..(7): n is a, c, g, or t
  misc_feature (12)..(12): n is a, c, g, or t
  Peptide Sequence Number=SeqID_9347
  Probeset Number=SeqID_11508
nccggnnttttngtcacttcggcgtgatgctcatcgacttcgtccccaccgaatcccgcgtctccctcgccgaggctccaggtttcctcaaagctcccggcggcgctccggctatcgtcgccatcaccgtttcttgcctcggtggacgatccgccttcatcgtaaaactcggcgacgacgagttcggacacatgttggctgggatcctgaggaaaaacggcgtcgctgatcaggggatcaacttcgataccggagccagaaccgccttggcgttcgtgacgttgaaggccgacggtgatcgggaatttatgttttaccggaatcatagcgccgatatgttgctccgtcccgatgaactcaacctcgatctcatcagatcggtacgtaaatctcctctctctatccctcatgatcttcaagagatccagatggaagtagagattcatagtctagttttttaaattatcgtatagagtttaagagatgtgtaagtat

SEQ ID NO: 1730 - DNA, 1955 bp, Glycine max
  misc_feature (65)..(65): n is a, c, g, or t
  misc_feature (135)..(135): n is a, c, g, or t
  misc_feature (147)..(147): n is a, c, g, or t
  misc_feature (210)..(210): n is a, c, g, or t
  misc_feature (248)..(248): n is a, c, g, or t
  misc_feature (295)..(295): n is a, c, g, or t
  misc_feature (368)..(368): n is a, c, g, or t
  misc_feature (531)..(531): n is a, c, g, or t
  misc_feature (536)..(536): n is a, c, g, or t
  misc_feature (576)..(576): n is a, c, g, or t
  misc_feature (616)..(616): n is a, c, g, or t
  misc_feature (620)..(620): n is a, c, g, or t
  misc_feature (736)..(736): n is a, c, g, or t
  misc_feature (743)..(743): n is a, c, g, or t
  misc_feature (781)..(781): n is a, c, g, or t
  misc_feature (983)..(983): n is a, c, g, or t
  misc_feature (1349)..(1349): n is a, c, g, or t
  misc_feature (1475)..(1475): n is a, c, g, or t
  misc_feature (1496)..(1496): n is a, c, g, or t
  misc_feature (1543)..(1543): n is a, c, g, or t
  misc_feature (1565)..(1565): n is a, c, g, or t
  misc_feature (1625)..(1625): n is a, c, g, or t
  misc_feature (1640)..(1640): n is a, c, g, or t
  misc_feature (1688)..(1688): n is a, c, g, or t
  misc_feature (1853)..(1853): n is a, c, g, or t
  misc_feature (1855)..(1856): n is a, c, g, or t
  misc_feature (1893)..(1893): n is a, c, g, or t
  misc_feature (1937)..(1938): n is a, c, g, or t
  Peptide Sequence Number=SeqID_9348
  Probeset Number=SeqID_11509
cgtgcgagagagggagatcgatatatgtgatgacatgagtgagagatagagagtgcgagtgcagncgcgagagtcgcgcgatgacgtcctcatgtgtgcgagcggcgcgcacgcgcgcgggcgcaggagcgtcgntcacgcgcacgncgcgtgacgcagacgtcgcgcgcacagctgtccgctggcgcggagacggctgttgcgtatcgnctcgattttggcatattcagatgaggcgatatcgagtntagagtcacacgcatattatacgcagcgatagtcgaattagagtatntcacgcgcgtagaacactatatcagtgatagaagatcagtcgtgagatcgcaagtatgtccgatcgagtattnaggaatagtagcactgagcatcacgcgactatggttgcattagtgatagatgcgacagacagcggtgatggggatggtgcgtgtgttcgtgctgatgatctagcgcgaagtagtaggtgtcttcacctcagtaccaacacatctctcactctacgcacgtcancccgnacagatccgcacacttcgagcgtctcgtgacgcattgctngggcgctacgcgatacgaaaagtactgatatgaggcgtgntggncacgttatggcagtcgagttgatcagattatgttgtggttatattagttgtacgtgtgagagtcggacgacgcgctggtggctatcgcgtagcgcgtcgtggtcgtccggtcgtgntgtgcantgctacgtcgtgtcttctcgtcgtcgtcgcgtgaagtngctcattacgtacatcagctatatgtagatctcacagatcagtatcttactattacatatctgagtgtctcaggtatacgcgcacgcctcgatattcgtgctcacgtatcctacgctcatcttggtgtatctcgagctggtgcccttcgtgaggagcacagcatcagcggcctacataatccttcgtcactcagctactccntactgcagcgtacgtcgtgacacagctctagcgtattgtcgcgcgtgacgcgtgtgtgttggatgcgcgtcggggcgaccgtcatgcgctagcagtgatagtgactgacgctatcgtaggcgcgtcgccgacgtcaatagtcgcgcatccatgcagacatcgcggcagatattagcgacgacggctgtcattgcgccacatgcctactatccgtattcatcgttgcatctgtctcagtatcatatgcattgtcagtgttcgctgcgttgttgtgcgcgtcgcgtgtatgcgtgatgagagcttgagtaaggtgtagtaggcgccgtggtgtagcggtatgtggctatcatgtaccgtgagtatcgncggtgtgggtgtacagacacgtaggatccttctcgccgagccgcacatgttctagcgcgcgccgtactcagctggtaaaatgcggatggacgcacataggagttcgccatgcatgagatatacacntcatataaatgataaaagaanaaataatataccacacacaaacacaataatcacatatacatcacatnatcatcaagcagcgcgagacgncgtagactacacgctcagtgtcacgcatgcgccgcactgtcgactgcttcgacctcagantcttccttcactctnactatatagctgctcttctatgtacagtcagactatctctcattcacncgcgtgagcgcgagccgtggcgctccctgtagagaagtagacgctaatcatagtctgttgtagagtctcctttagccactcacacactacgcctatgttagctggtaccatcatagaatcattagctcatgttagagaatatgacacatcttctcacctaccatngnnaaggaaacacaacacatcagcaccccaccacgggcgnacacaagcgcagatccgcgagaccacaccaatcacccacaccanncccaccacacaccacca

SEQ ID NO: 1731 - DNA, 1662 bp, Glycine max
  misc_feature (49)..(49): n is a, c, g, or t
  misc_feature (160)..(160): n is a, c, g, or t
  misc_feature (191)..(191): n is a, c, g, or t
  misc_feature (208)..(208): n is a, c, g, or t
  misc_feature (364)..(364): n is a, c, g, or t
  misc_feature (936)..(936): n is a, c, g, or t
  misc_feature (973)..(973): n is a, c, g, or t
  misc_feature (1004)..(1004): n is a, c, g, or t
  misc_feature (1024)..(1024): n is a, c, g, or t
  misc_feature (1158)..(1159): n is a, c, g, or t
  misc_feature (1161)..(1161): n is a, c, g, or t
  misc_feature (1185)..(1185): n is a, c, g, or t
  misc_feature (1272)..(1272): n is a, c, g, or t
  misc_feature (1292)..(1292): n is a, c, g, or t
  misc_feature (1297)..(1297): n is a, c, g, or t
  misc_feature (1303)..(1303): n is a, c, g, or t
  misc_feature (1390)..(1391): n is a, c, g, or t
  misc_feature (1393)..(1395): n is a, c, g, or t
  misc_feature (1397)..(1402): n is a, c, g, or t
  misc_feature (1407)..(1407): n is a, c, g, or t
  misc_feature (1409)..(1410): n is a, c, g, or t
  misc_feature (1413)..(1415): n is a, c, g, or t
  misc_feature (1418)..(1422): n is a, c, g, or t
  misc_feature (1429)..(1433): n is a, c, g, or t
  misc_feature (1448)..(1448): n is a, c, g, or t
  misc_feature (1457)..(1457): n is a, c, g, or t
  misc_feature (1465)..(1465): n is a, c, g, or t
  misc_feature (1469)..(1469): n is a, c, g, or t
  misc_feature (1486)..(1487): n is a, c, g, or t
  misc_feature (1500)..(1500): n is a, c, g, or t
  misc_feature (1514)..(1514): n is a, c, g, or t
  misc_feature (1524)..(1524): n is a, c, g, or t
  misc_feature (1531)..(1531): n is a, c, g, or t
  misc_feature (1538)..(1538): n is a, c, g, or t
  misc_feature (1540)..(1540): n is a, c, g, or t
  misc_feature (1547)..(1547): n is a, c, g, or t
  misc_feature (1549)..(1549): n is a, c, g, or t
  misc_feature (1551)..(1551): n is a, c, g, or t
  misc_feature (1556)..(1556): n is a, c, g, or t
  misc_feature (1564)..(1564): n is a, c, g, or t
  misc_feature (1567)..(1568): n is a, c, g, or t
  misc_feature (1570)..(1570): n is a, c, g, or t
  misc_feature (1591)..(1591): n is a, c, g, or t
  misc_feature (1593)..(1593): n is a, c, g, or t
  misc_feature (1599)..(1600): n is a, c, g, or t
  misc_feature (1604)..(1604): n is a, c, g, or t
  misc_feature (1608)..(1608): n is a, c, g, or t
  misc_feature (1617)..(1618): n is a, c, g, or t
  misc_feature (1620)..(1627): n is a, c, g, or t
  misc_feature (1631)..(1634): n is a, c, g, or t
  misc_feature (1636)..(1644): n is a, c, g, or t
  misc_feature (1647)..(1651): n is a, c, g, or t
  misc_feature (1662)..(1662): n is a, c, g, or t
  Probeset Number=SeqID_11510
ctcgcgtttctataagaatgcattacgctgctcgccgcggatgcgcgcncagtgcgacgacgactatattcgttcgctatataccgatgtacaccactacgacgactcttacatgttcatactatagcgtgcactactgagacgcgatcgacacatcaanttgtcagcatctctatatctccgtaactcgntctctacaatacgaacntccgtcaatacacacgactacattcatcacacacactactcgactcacacatacaactatagaatatattaactatacagtatgtgattcgcgagcgacacgagatatatttcagttcgactagatcgcgtaatactatcacacccgacctctacncatatcactatcaacaccagatattcacatatatgataattcaaatgcagcgtatcatataactacacgcctataacacactagacttcttactctatacatcactatactatagtcgcatcgttatatatagtatatcatgcaatcagagattacattacattgcatgcagtaatatataatagtacacgcacgctccgacagccagtaacaccaacgtgtatcacatacagtaatatatctccacgcgacacgcagtgtgctatcaatattatatatattgtgttgagtgtatacgtggatagtttactctaataatgtgtgtactacattattagtataacaatagtctattcatcacggcatctgtcactataatagtaaatacaatacaaccgtctccaatacataagcgctgtgtgtattatactattgcctatcacccgcctggcactcagcgtatgtcacagcgcgcgacactcaatgtgacatcatatcgcacgtaactcacgtcatcgccgttgccatctatcgtgcagtacgcacatcgtctatcatacttcatatatatnctacacaagacacgtctcacgtcgatatgacacacanttataactataccaacatatataaatgaganatcagttaaatgcacacatnacaacgataataatattcgcactatcataatatatcaacagcagatacatacatgacaataaactgagagtgagcataatataatatccacgagcgatcactacatatcgtgatgatctacagacacttctatnncnaataataatacatatacgtaaatnttagtgacgatactcgcgtcatcagcgcggtcgactctactatcgtctagttgatatcatcagcatctcacaacgtcatcattatanaccatataatagagagtcantgctncgactnctgacgtagacgctaactaatactgagactcatatcactcacctacatgagtatagtcagtgcagtcgctagaatctccacagttannannngnnnnnnaaagnanngannngtnnnnngggtagnnnnntaacgcgcgggcgantaaaagggnaagagggngggnggtggggagagaggggnnaggagtgggggangggagggaggaggngcaggggggngagagtnggagagngnagaggtngngnggagngagggggnggnngnggaaaagggagggggaggggngnggggannaggngagngagaagagnngnnnnnnnngaannnngnnnnnnnnnaannnnnaaaaaaaaaan

SEQ ID NO: 1732 - DNA, 652 bp, Glycine max
  Peptide Sequence Number=SeqID_9349
  Probeset Number=SeqID_11511
cggagttcccggggcgaccacgcggccggggtctccatttccattttctctctcacttttcaagagtcgtgagcgatggggaagtgttacccaactgggagtgctgattaccagagggggcggtgagaaggcgaagaagaagcgcagaggcgtcatcgctgagaagagaggcgctccgcgggggcgccgtttggggtggggctctgctgggacctttgacaagggcgcgaagagccgggggacccttcgggaccatcaagcaccctgccgaactgggtcacagcgctaacaacgggcttgacatcgctgtgaggcttttgggagccactcaaggcggaggtccctattgtgagcgtacgccgatttctaccaggggggtggcgtggttgccggtgaggtcacgggggggcctgaagttccattccaccctgggagagaggacaagcctgagcccccaccagagggggcgcttgcccgatgccactgagggggctggccatgggggagatggggggggggaagctgtgggggttgctggccaagatgtcggggcgcgtgcgcgggggggcccctgtggggggctgggcgcaggggggcggggtgggttggaggggggggtgggggctgggatggcgggggtgggggggggggc

SEQ ID NO: 1733 - DNA, 559 bp, Glycine max
  misc_feature (6)..(8): n is a, c, g, or t
  misc_feature (18)..(20): n is a, c, g, or t
  misc_feature (27)..(27): n is a, c, g, or t
  misc_feature (127)..(127): n is a, c, g, or t
  misc_feature (136)..(137): n is a, c, g, or t
  misc_feature (172)..(172): n is a, c, g, or t
  misc_feature (175)..(176): n is a, c, g, or t
  misc_feature (218)..(219): n is a, c, g, or t
  misc_feature (264)..(264): n is a, c, g, or t
  misc_feature (520)..(525): n is a, c, g, or t
  Peptide Sequence Number=SeqID_9356
  Probeset Number=SeqID_11512
tcaagnnnagcgcaggcnnngtgagtnccgcagttaaagtctcagctcgccaagccacaaggttgcgcatcaaggcttcggtgaaaaacgttgtagtcgctgttgtggcctctaccgcgagtgcatngctggctannagctccatggccactgcagtggtcctgggtggtgntgnngggtctctggctttcagttcccagcaatttctccgtggcctnnggggagaagatagtgttcataagcaacgcaggttccccccccaangtcgtgttggtcgagaacgagattcctatcggcgtggatgcagggacaatctccatgagcgatgaaggccttctcaatgcgcctggtgcgacttacaacgttactttgtatgttaagggagcgtacagtttgttctgttcgcctctccaaggagctggtatggtgggaaaatgtccctgttaattgaatattgtctcaagggctcgtctcctccgtctaagttgtcatatggttccttgttctaatatttttgttnnnnnnagaagagcttggattgatctttcatgtaaggccc

SEQ ID NO: 1734 - DNA, 1747 bp, Glycine max
  misc_feature (1)..(1): n is a, c, g, or t
  misc_feature (25)..(25): n is a, c, g, or t
  misc_feature (84)..(84): n is a, c, g, or t
  misc_feature (142)..(142): n is a, c, g, or t
  misc_feature (167)..(167): n is a, c, g, or t
  misc_feature (211)..(211): n is a, c, g, or t
  misc_feature (254)..(255): n is a, c, g, or t
  misc_feature (275)..(275): n is a, c, g, or t
  misc_feature (318)..(318): n is a, c, g, or t
  misc_feature (344)..(344): n is a, c, g, or t
  misc_feature (356)..(356): n is a, c, g, or t
  misc_feature (377)..(377): n is a, c, g, or t
  misc_feature (404)..(404): n is a, c, g, or t
  misc_feature (442)..(442): n is a, c, g, or t
  misc_feature (494)..(494): n is a, c, g, or t
  misc_feature (506)..(506): n is a, c, g, or t
  misc_feature (508)..(508): n is a, c, g, or t
  misc_feature (510)..(510): n is a, c, g, or t
  misc_feature (512)..(512): n is a, c, g, or t
  misc_feature (525)..(525): n is a, c, g, or t
  misc_feature (535)..(535): n is a, c, g, or t
  misc_feature (597)..(597): n is a, c, g, or t
  misc_feature (683)..(683): n is a, c, g, or t
  misc_feature (713)..(714): n is a, c, g, or t
  misc_feature (736)..(736): n is a, c, g, or t
  misc_feature (739)..(739): n is a, c, g, or t
  misc_feature (774)..(774): n is a, c, g, or t
  misc_feature (1316)..(1316): n is a, c, g, or t
  misc_feature (1330)..(1330): n is a, c, g, or t
  misc_feature (1332)..(1332): n is a, c, g, or t
  misc_feature (1613)..(1613): n is a, c, g, or t
  misc_feature (1652)..(1654): n is a, c, g, or t
  misc_feature (1671)..(1671): n is a, c, g, or t
  Peptide Sequence Number=SeqID_9357
  Probeset Number=SeqID_11513
natcgcgatacgtatcggtgatagngcgtacgtgagacggggactcagttctgtgcgcatagtagtcgcactcgatagagcgcnggatacacatctcgctcccgtatgttgcatgagtcatgtcgctatatgtatagtgtangtgatgctgtctcatcgtatgtaangagcaacgtctagtagttaggcagtattgtgtgagtagctgcanagtgtggtatatgagatgtatatatgattagagtcagcagaanngatatgttatactggattcnactacatgatacatcgatgtctatatagtacacaccgagtcantgagtgatcgataatttacgctgatngtgacaagtaanccgctgtcgcatgcatagtgngcattctcgcaaggaatgacaagcgancggtctagtagatcgcatcgagaggggttgtgtgtgtnttctgtcgttctgtatctctactcgttgctggagagatcgagtgcagtgacnagacggtacganananangatcacatccagnatgatgtgantgtctcgcgtcgcgctctctagccagtgtgcacgctcgagtatggcgcgcgctcgatgtgcnccgtgatgctgcgattcgtatgtcgatgtagctcagcgagtgtgagacgagtcagattatagatgatacacatagaagcctatagngttatcggtggtcgagtgggaggtatgggnntgtggggaagaactatcttgantanacaacaataatctctatctatatatgctcttcacntcgtatcttatagtcagatgtgactgctgtgatgtggaggatcgatcctctgccgctctgacatgaccactcatgaccgcacagctcaagcgagtagagatacactccgtgcgtcgtattgcactgtcagctacaccgtgaggagaggttgcactgaagacgacagttgtacctgtgtagctgagtaatgtcttatcgcgacatgtgcttatatctgagtcgacggctgccgtctcgaattcgccaggtgatgataatcgtaggagctgggtgtgctatgctcgtcgtactaccgtcttgtgtgcgctcgagaaggggacgactagttctctaatcttctggactagagaggagacgaagagaagattgatctgatacggcgttccctctcgaggctacagacgcgacaattagcatgtaggcgacactgtcacagattaccgtcgtctctaagctgcgtagatacgtgccactgctggacatcagatgacagtcacagtccacagctggtggtgtcgccgcagagacgccgccgagctgtncgctctacgagggnanagttcgaggcgcaactgatgtgcagggtcgcttcagcatgagatagtatacctcccatgctcacacgagtacatacatacatctgcatgcacattcctcactcagtcacgcgcagcacacctagctatgtcgtactacgcacagtgcaacagacacacagagacacacacagcagagagagatctctctatctgcctctcgcctatgtctctgcgagcgagtgtattctctacgctcacgttctcctgagttacgaccggcctcacgactcgagcccgtgncgcgtgcgcagtcttgctccgttcttgtacagcctcccnnnctcgttctagcatctanggcctgtatgtgggagaagcgcgcagcgagacccagcacacgacctcatcttaccaccgcgtacgcgcgctagttc

SEQ ID NO: 1735 - DNA, 571 bp, Glycine max
  misc_feature (571)..(571): n is a, c, g, or t
  Probeset Number=SeqID_11514
ttttttttttttttttaaaaaaagggtttctccccgctttatatacaaagcaaccaaccaagccatataaggacaatcacgtcaaaaaaagacagagaaaaagcaaaagaaacaaatgccgacaacgacggatcaatgaaaacgaagaagcctcgcgatcgctgcgcccaccgggatcttccactaggctccaagactccgaagcaccggaacctatcaacacctccaaaaaggatcgcgacgatgacgacgctgctgccaagggtttcccccgatacacgacgaggcgagaggaagggtagcccccggcgccctcccggaaggtcaggtggcacccacaggcgccaccgcgccggtgtcggccaagccgacaggggtttcccccgatcccaacccgcacctcaggcgctccggagccagccaccaaaccaaccaccccccagcgccaacacggtcaagaggcccccacgctgtctcaccacgacaccgcgaagtaaggacaacacggcgaagaatcagagccggaactagggcatcagcaccgtcagcacgcgggagggccccacctccn

SEQ ID NO: 1736 - DNA, 1459 bp, Glycine max
  misc_feature (1)..(1): n is a, c, g, or t
  misc_feature (4)..(4): n is a, c, g, or t
  misc_feature (29)..(29): n is a, c, g, or t
  misc_feature (51)..(51): n is a, c, g, or t
  misc_feature (113)..(114): n is a, c, g, or t
  misc_feature (135)..(135): n is a, c, g, or t
  misc_feature (336)..(336): n is a, c, g, or t
  misc_feature (483)..(483): n is a, c, g, or t
  misc_feature (485)..(485): n is a, c, g, or t
  misc_feature (511)..(511): n is a, c, g, or t
  misc_feature (529)..(529): n is a, c, g, or t
  misc_feature (535)..(535): n is a, c, g, or t
  misc_feature (584)..(584): n is a, c, g, or t
  misc_feature (597)..(597): n is a, c, g, or t
  misc_feature (681)..(681): n is a, c, g, or t
  misc_feature (885)..(885): n is a, c, g, or t
  misc_feature (1014)..(1014): n is a, c, g, or t
  misc_feature (1095)..(1095): n is a, c, g, or t
  misc_feature (1133)..(1133): n is a, c, g, or t
  misc_feature (1211)..(1212): n is a, c, g, or t
  misc_feature (1214)..(1214): n is a, c, g, or t
  misc_feature (1233)..(1233): n is a, c, g, or t
  misc_feature (1274)..(1274): n is a, c, g, or t
  misc_feature (1283)..(1283): n is a, c, g, or t
  misc_feature (1306)..(1306): n is a, c, g, or t
  misc_feature (1339)..(1339): n is a, c, g, or t
  misc_feature (1349)..(1350): n is a, c, g, or t
  misc_feature (1374)..(1374): n is a, c, g, or t
  misc_feature (1383)..(1383): n is a, c, g, or t
  misc_feature (1401)..(1401): n is a, c, g, or t
  misc_feature (1403)..(1403): n is a, c, g, or t
  misc_feature (1417)..(1418): n is a, c, g, or t
  misc_feature (1442)..(1443): n is a, c, g, or t
  Peptide Sequence Number=SeqID_9358
  Probeset Number=SeqID_11515
naantcatccgtcggtagattatatactnatctattgtcgtgcttctgctnccccacatcgtcgctctatctcttgcatcatatatttggtgtggtgtatatattttatgtannagtacagagagcatacggtgngcaacctagtcgtctagtatatctgtatatgtcttatgttggcaccgtagagtccgcaagagtagtgaggtgtcttatcgcgctccgttggtggatgtcatgtgtgatatattctgatgattcgaactacacaacacacatagacgcggccagccacgacatgcgtctatctcaccccattccttcttcaccacgtgacgntgctgttgcacaaccacaccgtcacccccgcgatatatatagtaatatatagccggccttctccacatgtgtatagtgacacgcgcgaccgcgcctcccgcccccccgctctcatcttatcgttgtaccgcgcgtggttgagagtgngngtggtgaagatattgtctctgatctnttttgtaccggcctcgtntgaatngtctctgcagcctatctactacattatatacacaccccatcaaacaccnaacacacatcacnaccactgcgaggaggggagtgagcgagcgagtaccaaataacaatataggagtggtgggtgggagggtgggggaagctggtttngttatcgtttttgctccactatatccaatatattaactatacatctcttaatatattatccatacattatacatatatagatctcttatatctatcataagtatgctgcgcgtgagacactactcacgacgacgtatgatctgtattgtgctgcggtgcagagtctgggcgtgctcatctcgctcgcgcggcgccgcgtaaacncggccggctgacagctgctcgcttcgtgacgacgtcccgtgtggcgcccggcggtcagtatgagagagatagagacacacatagaacgcgatcaatatatatgtctcgagatcatatgcactaaagtanttcatattaattcatatacctgataactctgatgatgatctctggtgatgtgtatagtatctacagacaggcccgtagtangatactacaaaggagatgaagtaatcgcgcaggatagncacgcgctagtgacgacgacattatgcaccaccccacatataccttcatataatcatacagcgacgcggggagtaganngnagactgctatgaaccccgncacgctgttattatgacgtctgctttgtctctgtcattaantagagatanaaaggagggcgttaaaatctacnatatagccccgcaagtgcggaggaggcggcaanatatgagcannaaacactcgtagcgcgtgaggagngaggaaaanaagctctcgtgtcctcgnanccgtttgtttatgnntcgcgagaaagagacaatagctannaaacactatatatcat

SEQ ID NO: 1737 - DNA, 1937 bp, Glycine max
  misc_feature (16)..(16): n is a, c, g, or t
  misc_feature (378)..(378): n is a, c, g, or t
  misc_feature (789)..(789): n is a, c, g, or t
  misc_feature (850)..(850): n is a, c, g, or t
  misc_feature (975)..(975): n is a, c, g, or t
  misc_feature (983)..(983): n is a, c, g, or t
  misc_feature (1166)..(1166): n is a, c, g, or t
  misc_feature (1227)..(1227): n is a, c, g, or t
  misc_feature (1239)..(1239): n is a, c, g, or t
  misc_feature (1271)..(1271): n is a, c, g, or t
  misc_feature (1304)..(1304): n is a, c, g, or t
  misc_feature (1354)..(1354): n is a, c, g, or t
  misc_feature (1356)..(1356): n is a, c, g, or t
  misc_feature (1430)..(1430): n is a, c, g, or t
  misc_feature (1444)..(1444): n is a, c, g, or t
  misc_feature (1497)..(1497): n is a, c, g, or t
  misc_feature (1530)..(1530): n is a, c, g, or t
  misc_feature (1673)..(1673): n is a, c, g, or t
  misc_feature (1715)..(1715): n is a, c, g, or t
  misc_feature (1763)..(1763): n is a, c, g, or t
  misc_feature (1778)..(1778): n is a, c, g, or t
  misc_feature (1789)..(1789): n is a, c, g, or t
  misc_feature (1841)..(1841): n is a, c, g, or t
  misc_feature (1860)..(1860): n is a, c, g, or t
  misc_feature (1870)..(1870): n is a, c, g, or t
  Probeset Number=SeqID_11516
cccctctcccctctcnctcttcctttcctcgccaccagcgcgggagatgaatatttaaacataagatgatcctcactctctgtgtgtggtgtgtggggcgctccctcctccgcccgtgtggagtagtatgtagggtgcagcctccacccaccctctcataacatacttgtctgtgttgatttattgaggatgacggaggagctgctagatatatccttccagcagaatgttcgtcagttctaccttcgacagtggtgatcatgtatgatacagactgatagatgcgagtccactactgaaccgagccaatacgagcaagggctggagacgatagatactatctgaactcaaacgtgcgttcgaccgccatactgatgnttgtgcgtcgcgtacctctcgaatgcgcagccgtaagtagcgtaatcgtctctcgtgtagcaacgatatatctagcatgataagcgtaggtgctgcgtacgccgtgtagcgcatagagtcatgtgacggtacctcgatctcgtctctgtccagcacgcatgttactgtgagatctaatgctctccggtccctctactctctctgacaaccgcacgcaagcagtctctgtacttctggaatgcttaattgctctgtgtattgtatccatgtacttgtctcaaacccagtctgatcttatacctcgacctcttgttttgctatacgtcacagtttgtcaggttagaatcatctaatggatatggatgtgaaatatacactgagaatatgagaggtgggacgactacataatantgtataacagcacataataagtattcagatggtatctgtaagagctgccatgtagcatggntaatggcatacaccaccaccgtcgtcttcagatattgtgcattgtgcacagcgtgcgcgtgatagtatagtgttctgatctagccacctgaacatgatccacgtcactcatacgtagcgtgcgangtgcaganccgctcatcagaatgtgagagagtagctcgcagtgtcgcgttacttcagttcttacgtcggctagcgagacggtgtcacacggtatacttgtctctcgtaatatatcctatgtggcctcgccagtgatccgtcctccgcgcaagacgtccgccactaagtaatacgcaagagagcgttaaganacgcatgtatctatctcgtcgctgtcgtacgttctcgtgatctcgtgcatactagacagcnacttacattgtnatgagatctatgtacgcgactaacggcagatntgatactatatgctgtactctctgctctcactntcatctgcggccgcatggcgtcaccggctctgcgctgtctgttcgtatanantaagccatcgaagagacgatcaggctgatatgttactacaccgtgcgagcgggagcgattcagataacgtgtantgatgagatgactnctgctacttcctcatcactcatatgatcgcgtcagctaggacgcgcagcctgnctacactctgcatgtggaacgctgactatgcgngaccagagaggagagactgactagcattgagatatgctgcgtatgagcgtatacgtatcgctctgatgcgttgactacatgtgacacgcatacgagacagtagcgctagtgtgcagcacaacattgacgaccagtagcacacngcaccgtggcgctgtgtagctcaacgctcatgaccagtaaanagtgatatgcgatgctgcgtttactccgagaaggagatcggttgtgancgatagtgactcgantcgtgacgaanagctactatatacatcttacattaatgcgtactacactaacaaaactaccanatcgacgagcatcatctcntatcagtagntgctcaccaatgattattcatcatctcgtatttatcacgtatcgatattaaccgacagtacgctagc

SEQ ID NO: 1738 - DNA, 599 bp, Glycine max
  Peptide Sequence Number=SeqID_9359
  Probeset Number=SeqID_11517
aactcatggtcacaatacgactcatacaacgactgtactcaaggagtctgcaatatcaactgcccgtaatggcgatacctaatcttcgctccacctcctccttccttactcgacgaagaagactcatcctctccctccaggttctcccctctcctcatcgccctaatcgagatcctcctcaccgcctatatcctcgacgattactacactctccactctaaataatgaagccgtcaccgccgcgaaacctcctcctcagaactttcccggcgagtatccagctccaaagcattggcgagtgtacatgttctcaacgacgctctgattatatcgattaccgtttataagtatccaaaggtagatgaaaactggaaactcccacattagctccgatagaagaaaagatatctaacacaaccaaagcttagaaactgttgcccaagtgaaaccacgcgaattcctcttccgaagaatcaacacttgggagagaggctcactataactgaccatctctgccgaaatttttagcccccggaaatcatatccaaataaaccatttctataatccgcttcttaccaatccgcggatggaaccctgg

SEQ ID NO: 1739 - DNA, 1372 bp, Glycine max
  misc_feature (11)..(11): n is a, c, g, or t
  misc_feature (55)..(55): n is a, c, g, or t
  misc_feature (93)..(93): n is a, c, g, or t
  misc_feature (135)..(135): n is a, c, g, or t
  misc_feature (494)..(494): n is a, c, g, or t
  misc_feature (663)..(663): n is a, c, g, or t
  misc_feature (856)..(856): n is a, c, g, or t
  misc_feature (890)..(890): n is a, c, g, or t
  misc_feature (978)..(978): n is a, c, g, or t
  Peptide Sequence Number=SeqID_9360
  Probeset Number=SeqID_11518
ttgtgtgactntgtcctatctctctcccccgcctcacgccgccacaatcacaagngagtgccgccgaacacttggccaatctcctaacgacantatagagcgaggacggctactattataaataagtggaatccnccacgcggcactggcgggaagagttcactacacaatatcccacttaacactaagaatgcgtccttagatgcgcaaacagagcacctgcgccccggcgctctctctgctccctgcgaggaataaaggcgcggccccctcgtccttgccgagcgtacacccggtaattcctcagccagactgagacgggatctggtctgaagcagatagaacgcagtgatggacgtaagtctaccaccttacaaacgagatgagtagtgatgcggacgtgtatcagagtatctttacctccgacaactcacccacgcgcagtcacgaccaagagctgacacgctagatctccctcggctcgcttctgtccnaggtgtagttcgagtttagaccgacggaacactaaactgtcgatactggtctgctctgttatcacacctactattttgtacactagagacggccccgccactgcgactgtcgactaccgctcttcgctacgatgacgcctcggaagtctcaagcttgtccgcgcccttnccctcaggcctctcttccgacgcgctgaagtaaccgctatgtgatctaatgttagcgtgattatacctccaccccacttgatcaggctagtgcctcagtcgccgtccgcgcacctcgtcctatgaccgtctagagggcacggaacgctctagcgtcatcacgatataggcacgccgctgcgtggcgcggtaanacggacggactacgttacgctccacaataaccgnccacgacctgtatgcatataagctccgagcgagttggagacggagatcggatcacgtgatgactaagcctgaggcggagagatgaaantcgcacgacagagatacactgtcagatgtcgagaatgtcagcctggcgagctcgacggtgacgcacgcagcaacttcgatgagagagaatcgagcattgcgccgagcagcgttatcgcatcagtacacaaacgggcaaacgtctcctgtactatcctacaatatccaacagagatgagccaaaagctgtctgcgatgtagtacaacagcgctgtgcttgactccaccaacgtcaccgatgtaatattacctcacgagagaatagagatctgataaatgtgttgcgcaatatacttatctcgtgtacgacgagttgtacctcggcagctcttgacctcggcgattgtgagtcactcgtaagagcgcgacatcattacataatctgagaagatacg

SEQ ID NO: 1740 - DNA, 2060 bp, Glycine max
  misc_feature (32)..(32): n is a, c, g, or t
  misc_feature (42)..(44): n is a, c, g, or t
  misc_feature (53)..(53): n is a, c, g, or t
  misc_feature (55)..(55): n is a, c, g, or t
  misc_feature (116)..(116): n is a, c, g, or t
  misc_feature (184)..(184): n is a, c, g, or t
  misc_feature (250)..(250): n is a, c, g, or t
  misc_feature (334)..(334): n is a, c, g, or t
  misc_feature (342)..(342): n is a, c, g, or t
  misc_feature (350)..(350): n is a, c, g, or t
  misc_feature (412)..(412): n is a, c, g, or t
  misc_feature (448)..(448): n is a, c, g, or t
  misc_feature (451)..(451): n is a, c, g, or t
  misc_feature (719)..(719): n is a, c, g, or t
  misc_feature (862)..(862): n is a, c, g, or t
  misc_feature (944)..(944): n is a, c, g, or t
  misc_feature (1004)..(1004): n is a, c, g, or t
  misc_feature (1418)..(1418): n is a, c, g, or t
  misc_feature (1448)..(1448): n is a, c, g, or t
  misc_feature (1494)..(1494): n is a, c, g, or t
  misc_feature (1536)..(1536): n is a, c, g, or t
  misc_feature (1631)..(1631): n is a, c, g, or t
  misc_feature (1665)..(1665): n is a, c, g, or t
  misc_feature (1728)..(1728): n is a, c, g, or t
  misc_feature (1741)..(1741): n is a, c, g, or t
  misc_feature (1807)..(1807): n is a, c, g, or t
  misc_feature (1854)..(1854): n is a, c, g, or t
  misc_feature (1859)..(1859): n is a, c, g, or t
  misc_feature (1886)..(1886): n is a, c, g, or t
  misc_feature (1921)..(1921): n is a, c, g, or t
  misc_feature (1976)..(1976): n is a, c, g, or t
  misc_feature (1989)..(1989): n is a, c, g, or t
  misc_feature (2021)..(2021): n is a, c, g, or t
  misc_feature (2023)..(2023): n is a, c, g, or t
  misc_feature (2032)..(2032): n is a, c, g, or t
  misc_feature (2060)..(2060): n is a, c, g, or t
  Probeset Number=SeqID_11519
cccgccccctttctgtcctcggcggctctgtnttgttgtcgnnncaccgcacncncaatactacgactacactacaacatcatcgacaatcatatagcatctgttactatgggtgntatctccgatgcttccacccaccaccatgctagagaagagaccgcacagtgagttagtcgcagtatanatgagcccacgtctatttctactctacacatgactactacaaacaacacatcacgcgaacgaaaangactaaacgacacaaggcgctccctactgttagtggcgctagtaactactcgtctcgtcactgtcatttactagtatcatgatnctactccnatcacaangcgtatctccgcatactacatctctcctcatacatcgacacgcatcgatgtctagctatatnatcacatacttatatatattatcactactcacatantcnctcttagacattagagtgtacatacgctatctccctcatataccatcgcgtcacgatctttctatcttgttccatctcgataaacaatactactcctacacgagtctaaatcattcacctatataataatgcaccatcataatcgtaaccgagcaaacatacgcgatatgtcaacaattgcagataaggtatcgctactattcatgcgctaagtgtacatatgagcacgatagtgctcgtacgatgtgatgtactatatagagtgatntctcgctacgcgcaccgtgtatctcctagccctcttgacctgacgccgatctcagtattctcgccgaatagcgaccacgaccgtccagatatatgcacactcacatacgatgtgctatatatagagatagactcctcaacgcnaacgctcatgtgtcctattcttcgtccacccttgtcctcatgtatcgtggaatatatacgaactgcgcaccgcacactatcnattagcttcttgcttatgatatcgttcatgtagtgttgacgatatgctctccacttggcntatacgcctactccacaagcgctacacttgtagcgctctgactttactttatatgtcttcaagatgcacgccatatgtacgtaatattatactgaacaattgtcacatatatcatacgatatctcaagtacactacacatcatcctagaccacccacgacctctatccacctgcatgtttctatagttatactttcactacccatatcgcatgacgctctagtattatattcggttatcatctatacattcgttaatcgtcaccacgctacgctacacaagaagcaccacatatcgtatatcatatcagcgagcgctcttgtgtctctgcgtccgtctacacgttcatctctcatcgtgctgtcttcatatgcgcacatctgtgagtaagtatatcagtattaagtcatctgtnactataccgaatctgacgcacagaccagcngctctatatatatatcttatgtactacttattgtatagtaatgagncagacgttacttacgactatatcggacgtatacactatcacngctcgcacacagagagatatagtgacatcaatatcacatgtcgcttatacatatcatatactacgtaatgtcgtcgaatcttcgcgtactcactntgtccttctgtactgcagtatgtcgtacacgacntccttcattacccgcatctgctctcactcacaccactacagccatcatatactgtcaccacangcatactcactanctactcgacgtcgccaggataattcgctaatcattcctcatactcaactcgtcgtatgtcacgatnactaactcatagtcagtgtctcacatacatggctgactgaaagatcntactncagatatgcgatcgcgacattcacacntgacactgacactctactatacttccgccgctccnctgcacgttcaccatgattacacgtgcgatgcgcgagcgatcacgacgtgaagangttgcgctgctancgtagcgccgaccgcgcccgcgcgcatcgtcntngtactactntcaccacatcgtcttactagttgctagn

SEQ ID NO: 1741 - DNA, 451 bp, Glycine max
  Peptide Sequence Number=SeqID_9361
  Probeset Number=SeqID_11520
ggccaggcaagtccccactcaaccaccacacctctcctcgttcacgctacccctttctgctcttcttctacctttcaagttttaaaagtataaagatggcagagacattcctatttacctcagagtcggtgaacgagggacaccctgacaagctctgcgaccaaatctccgatgctgtcctcgacgcttgcctcgagcaggaccctgactgcatagttgcctgcgaaacatgcaccaaaaccaactgggccatggacataggacaaaccacgaccacggtcactgctgactgatagaggatagcgcctgacacctgatggaacatcggctacatgatgaatgacgggatactggctgccgacaagtgctaggtcctagtgaacattgaacacctgagccctgatattgcgcacgcggtccacttacaccttaccctgaaaactgtggagct

SEQ ID NO: 1742 - DNA, 2047 bp, Glycine max
  misc_feature (4)..(4): n is a, c, g, or t
  misc_feature (11)..(23): n is a, c, g, or t
  misc_feature (26)..(27): n is a, c, g, or t
  misc_feature (32)..(32): n is a, c, g, or t
  misc_feature (51)..(51): n is a, c, g, or t
  misc_feature (57)..(57): n is a, c, g, or t
  misc_feature (66)..(66): n is a, c, g, or t
  misc_feature (68)..(69): n is a, c, g, or t
  misc_feature (73)..(73): n is a, c, g, or t
  misc_feature (77)..(77): n is a, c, g, or t
  misc_feature (96)..(96): n is a, c, g, or t
  misc_feature (104)..(104): n is a, c, g, or t
  misc_feature (200)..(201): n is a, c, g, or t
  misc_feature (214)..(215): n is a, c, g, or t
  misc_feature (291)..(291): n is a, c, g, or t
  misc_feature (391)..(391): n is a, c, g, or t
  misc_feature (419)..(419): n is a, c, g, or t
  misc_feature (470)..(470): n is a, c, g, or t
  misc_feature (768)..(768): n is a, c, g, or t
  misc_feature (792)..(792): n is a, c, g, or t
  misc_feature (975)..(975): n is a, c, g, or t
  misc_feature (1050)..(1050): n is a, c, g, or t
  misc_feature (1378)..(1378): n is a, c, g, or t
  misc_feature (1411)..(1411): n is a, c, g, or t
  misc_feature (1506)..(1506): n is a, c, g, or t
  misc_feature (1510)..(1510): n is a, c, g, or t
  misc_feature (1547)..(1547): n is a, c, g, or t
  misc_feature (1560)..(1560): n is a, c, g, or t
  misc_feature (1564)..(1564): n is a, c, g, or t
  misc_feature (1582)..(1582): n is a, c, g, or t
  misc_feature (1611)..(1611): n is a, c, g, or t
  misc_feature (1637)..(1637): n is a, c, g, or t
  misc_feature (1643)..(1643): n is a, c, g, or t
  misc_feature (1676)..(1676): n is a, c, g, or t
  misc_feature (1679)..(1679): n is a, c, g, or t
  misc_feature (1720)..(1720): n is a, c, g, or t
  misc_feature (1818)..(1818): n is a, c, g, or t
  misc_feature (1848)..(1848): n is a, c, g, or t
  misc_feature (1859)..(1859): n is a, c, g, or t
  misc_feature (1862)..(1862): n is a, c, g, or t
  misc_feature (1874)..(1875): n is a, c, g, or t
  misc_feature (1928)..(1928): n is a, c, g, or t
  misc_feature (1932)..(1932): n is a, c, g, or t
  misc_feature (1992)..(1993): n is a, c, g, or t
  misc_feature (2026)..(2026): n is a, c, g, or t
  Peptide Sequence Number=SeqID_9362
  Probeset Number=SeqID_11521
aaanaaaaaannnnnnnnnnnnnaannaaaanaaaactaaaaagatgtaanaatatnacaaagtcnanngcangganataaatatagaaaatacanttgtttgncgtttgttgtatttcctaatatggatgagggtgggtggtgcaggggtttggtggagaaaagaaaattaaatatattatatagtatatgtttgtgtnngttcggacgtggnngagttgatatatgtggagttggacgttgatgagtggtcgccgagaagatgactatgggtgtgagcgtgtagagctnacctacagcgagtactctggaggattatattgtgtgtgcgaagctatgtgtgtagtcagggtgtgggagatctattttgcatatgcttatgaagtatacnataatctagtgtgatattgcacactttngtacatattatcataatagtatgtgcgtgatgttgtgtgcgcatcgcttgnactagttcgcgggaggtgagatacagagtgcgtcacgcgagcagtgtagtggataggtgctgctgtgttggcgtgtgttcaggtggcgtgagggtctccgcagagatcaacatgagacacaaccgtatactctctcgatatactatactatctatatctacgatatcgcggttctgttcgagtagtgagtagtacgataagctatgggtgtggcgtgtgtttataataatcctatactactcttcacttccatgtgtgttgtattctatctctatgtcctctatcacaatatgaacgntaatgatattgctaaggtatgctnttcgttgtgttggtggagcgtgttgcggcgaactgtatctgtgtatgtcctctccccacttataacgatatcgagtactgataggatgtgatcaatgtacaatatatatgtgcgactctcgcagtcctcctcgccaccgtgttattgcggagtctacgtcaagacacgtgtctgtcgactcancgctccacggccttgctcgctcaccagccaactgtctcaccgcacttggcatgccctctccagatccactacatnttctcactctattctcctcctactaagtcctcctcttcgcttatagatatctagtatgttgtattatttatattcgtattgtattctgctccttctctctatatattatgcgcagtgagctaggcgcgttcgcgtgcttcgtctctaggcttgagcgttttccacgctctcacacgcctctgcagcccgcccacgcgcactctcagcactctctcttctctagtacgcgcctgcagatcgcgttgtcatatggcctcggtgcgtggtgtacgtctgtatatgtatctactgcaactttatctacgactctttgtatctatcttcacgngttatactgctgttgcgacttgttatacatacngaagctacgcactgttatcgttcacacctctatgttcctcgcgatacgcgcacacacatgacgctcctgttccatctttctacttacatagcgantcancgccgggctcgatgcacgctcctgtggcggcctatancacactgactcanccantgatacgtgacgctgttnctacgatgcagccactgctcacatcagantctcagtcacgaccgcgctagcgtcncgactnctatcacgaccatgaatcgtcgtcatctaccgngtntattcgtaccgatctgacttcatcattcagctacgctacgntcgagtatactgcacttgacgatatactcatatgatatagcgaccccatcgtttgtgttgtgacgacttgtagctagtacgtgtattactatatgatncgctctcgttgccgtctctggtgttcacgntcactagccanctnctccgttacggnncatggtatgttacgtcgtgtgtcggtgattgatcatgatgtgtgaatgctgancaantaataaatggtgtaactggcggagacagacagaagtgttaggtaaaaggtcgtcatccgnntacgatgaatggcaatgacgcgatcagcagcanagttgtgcattaaatagaggg

SEQ ID NO: 1743 - DNA, 1255 bp, Glycine max
  Probeset Number=SeqID_11522
aatagaagtgctctctctcttgtagatgctttgtacccctactttcccaacctctaatatcactacacactatttgtattatagtagatatagattccaaacataataattataattataacaatcaaattctatatataattataaaaaaaaatgagtacatctattccctctactcgttctgaaatcatatctgcacatatcttttgtgttgctcaacaattctgtgcagttgttgtttatgttcttggaaaagagatattaaaacatgttggtgtatataacatggtattcatgcgtctcttattcgtgataccaacagtgattatatttgcaacattgatgacaagaaaaaagagttcatttaaggttcccatccgaactcttttatttatgttgttgtcaggagtagttggaatattaatggctcaaacattaatgtttactgggttggataaaagtacggctacaaatacaagcattataagtgcaccatgcaccccacttttcacgtctttgttctctgtattacgtggcacagataaaatgaatgtgggcaaaggagtagggttcctctcttccatagcaggagctatgttattattacaagtgtggaatttccaatttgaaggtaccacattaggaaatctattaatagtagcatcctctgtttgttctgcttttaattctcttgttcaaaaacatattttaaatggaggatatcatcctcttgtagttcaaacttatgttgttactagtggtgcacttatgttcatgattacctacactccatttggtctatttgattctaataaatggattctctcttcttctatttggatttatgtttctattgttggaattattgcaactggattaccttggtgtttgggaattattgctttgaaacatactagtcctatgactactagtgtgtatgtagtattacaaccactgattgcagtattagttggatttgttcttaatggtgaagttctcacctgggttcaaatgctggggagtgctcttgtattattaggtctcgtttgtgtaaatgccactcctgttgttgaacgtgcagtcaaatatttcacacaacgtgcaattgcaaaatcaaaacaatttgaacttattaataatgaagaagaagagaaagaagtggaattgaatatattatccgaatcctcatcagaagcaaatgaagttaattatgaactcgggcaaggaggcgaaacgaatgcatttataattgaag

SEQ ID NO: 1744 - DNA, 1770 bp, Glycine max
  misc_feature (14)..(14): n is a, c, g, or t
  misc_feature (16)..(25): n is a, c, g, or t
  misc_feature (27)..(27): n is a, c, g, or t
  misc_feature (29)..(32): n is a, c, g, or t
  misc_feature (36)..(36): n is a, c, g, or t
  misc_feature (48)..(48): n is a, c, g, or t
  misc_feature (132)..(132): n is a, c, g, or t
  misc_feature (151)..(152): n is a, c, g, or t
  misc_feature (209)..(209): n is a, c, g, or t
  misc_feature (270)..(270): n is a, c, g, or t
  misc_feature (283)..(283): n is a, c, g, or t
  misc_feature (286)..(286): n is a, c, g, or t
  misc_feature (310)..(311): n is a, c, g, or t
  misc_feature (944)..(944): n is a, c, g, or t
  misc_feature (967)..(967): n is a, c, g, or t
  misc_feature (996)..(996): n is a, c, g, or t
  misc_feature (1063)..(1063): n is a, c, g, or t
  misc_feature (1102)..(1102): n is a, c, g, or t
  misc_feature (1111)..(1111): n is a, c, g, or t
  misc_feature (1161)..(1161): n is a, c, g, or t
  misc_feature (1224)..(1224): n is a, c, g, or t
  misc_feature (1305)..(1305): n is a, c, g, or t
  misc_feature (1310)..(1310): n is a, c, g, or t
  misc_feature (1525)..(1525): n is a, c, g, or t
  misc_feature (1531)..(1531): n is a, c, g, or t
  misc_feature (1555)..(1555): n is a, c, g, or t
  misc_feature (1567)..(1567): n is a, c, g, or t
  misc_feature (1596)..(1596): n is a, c, g, or t
  misc_feature (1677)..(1677): n is a, c, g, or t
  Peptide Sequence Number=SeqID_9363
  Probeset Number=SeqID_11523
gccccctccccctncnnnnnnnnnncncnnnnctcnacccctcttctntctgcatccctcatgcaagcacccctcgtgacgcccaccccggacggacggtcgcacgagcggcgaggaaaaggtagagttaangtgcctagcgcaccccctnntgcctatttgcaccaggcgttcccttctcctctcatcactatccacaactatactcnatcctaccataacggccaacacacgaggcacgaagtgtcgcgtcgaaacaagggtggtgcngtgactggctgtncantgtggtcgtgtggtgtgtgtgtgnngttggtcgtgctgacgaacgtcggatcggatagcgtgccagacaacagagatatatagtaaatataaagtaggacaatttatacgatgaagctcagagctctctccacacaaccatcaagaaaacctaagtcaacctacgacaaatcaagaacagaaaagcacgaatatccagcacccacacaatgtactacaagatgtggttggtgtgtggaggctggctatggttttgatagtggtatgttctctcagccccacgcctcccctcacgccgttcccccctctcgatatgtttgtacccgccgcccaactcgatgctagcgaggaatgatagcactcgagtgcgtgagccgtatgctatatggtgtattgttatgcgttgtcacagttcctcgcagcgatggatctacgtagtttgtctcgggcgatggctgcggcgttacagcgatcagataggtagataccaacatattgaagggtacacgcgatgtgttatgaccacccaccctctcatgtaaacgcgagactcagtggagatcaagatagagcataccaactaacttcgatagatggtcacaccatctacatctctataactacagcactccacctatcatatatctcttattatcgcncggtacagcagcgcgtgaggggngcactatgacggatgatagcggtgcgagnggtctagcgagtatgcgagcatgaggtggtggagcacgagtggactaccatgatacgcgtgtactgncatggataacatcggctaggagtgccacgccatgtattnacgatatgntattcacgttatgcactatcaacgccgacggtgcagacgctgagcgagcntcgtggtgtgcgcgagcgcggagagtgtcgttctcgacatccagcacgtcagatcgagaatantatagtcacacgtgagactcagtaaacatcaacgacgcacaacgctcgcacagatatcacgcaatttccctcgcacatatnactangcgcacgcctctacgcctaccgcgcatatatatacgaggtcttctctgagtgagctggcgcgcgtttgacgatgagatacacacatctcgcgacacgtgctgactacatgtgtcatgtagtctatacagacctgtcttctacctctccctcatccctgtaccgcttatgcacatctgaccggtcctcacgcactacacaatattgtacattcgcnatcgtnctacattcgatacattcttgtctnccggtgctatcnctccctacgtcatcgttctatcagtctcncaccggtgtagatactctgatcacatgcgtgctgtctgatgcctgtaatgcacacgacaggcatgtgtatccgacacaaantatatgcacgcggacgagatatggcgacgcgagataccacagaacgcacgtatatcgccctcgctctcgccttcgactgcgtcgctgctcgtc

SEQ ID NO: 1745 - DNA, 456 bp, Glycine max
  Probeset Number=SeqID_11524
gttatttagagagattcagagagaaatggcttcatattcttcgtcctctctttctagaatctcaactctccagaatcatatctcccctcttgaagccaacaacaagctacggagtctggtcaagatatctccacaagtgctctgaagccatagccagtggacgtgctgtggtcgctcttgagtcaaccattatctcacatgggatgccttaccctcaaaacctgcaaacagcaaaagaggtggagtcaattgtgagagagaatggagcagtccctgcaacaatagctatattaaacggagtaccttgcataggtctgaacgaagaagaactagaacgtcttgcatctctgggcaaaagtgtccaaaagactgcaggcagggacataccacatgttgtggcgacaagaggagatggtgcaactacagtctctgcaacgttgttttttgcttcaatgg

SEQ ID NO: 1746 - DNA, 1557 bp, Glycine max
  misc_feature (34)..(34): n is a, c, g, or t
  misc_feature (238)..(238): n is a, c, g, or t
  misc_feature (242)..(242): n is a, c, g, or t
  misc_feature (340)..(340): n is a, c, g, or t
  misc_feature (373)..(373): n is a, c, g, or t
  misc_feature (429)..(429): n is a, c, g, or t
  misc_feature (528)..(528): n is a, c, g, or t
  misc_feature (615)..(615): n is a, c, g, or t
  misc_feature (627)..(627): n is a, c, g, or t
  misc_feature (650)..(650): n is a, c, g, or t
  misc_feature (652)..(652): n is a, c, g, or t
  misc_feature (732)..(732): n is a, c, g, or t
  misc_feature (905)..(905): n is a, c, g, or t
  misc_feature (1006)..(1006): n is a, c, g, or t
  misc_feature (1143)..(1143): n is a, c, g, or t
  misc_feature (1175)..(1175): n is a, c, g, or t
  misc_feature (1179)..(1179): n is a, c, g, or t
  misc_feature (1229)..(1229): n is a, c, g, or t
  misc_feature (1232)..(1232): n is a, c, g, or t
  misc_feature (1239)..(1240): n is a, c, g, or t
  misc_feature (1243)..(1243): n is a, c, g, or t
  misc_feature (1253)..(1253): n is a, c, g, or t
  misc_feature (1274)..(1274): n is a, c, g, or t
  misc_feature (1276)..(1276): n is a, c, g, or t
  misc_feature (1385)..(1385): n is a, c, g, or t
  misc_feature (1388)..(1389): n is a, c, g, or t
  misc_feature (1394)..(1395): n is a, c, g, or t
  misc_feature (1401)..(1401): n is a, c, g, or t
  misc_feature (1403)..(1403): n is a, c, g, or t
  misc_feature (1406)..(1406): n is a, c, g, or t
  misc_feature (1408)..(1409): n is a, c, g, or t
  misc_feature (1415)..(1415): n is a, c, g, or t
  misc_feature (1425)..(1426): n is a, c, g, or t
  misc_feature (1433)..(1435): n is a, c, g, or t
  misc_feature (1437)..(1438): n is a, c, g, or t
  misc_feature (1443)..(1445): n is a, c, g, or t
  misc_feature (1454)..(1454): n is a, c, g, or t
  misc_feature (1458)..(1459): n is a, c, g, or t
  misc_feature (1462)..(1462): n is a, c, g, or t
  misc_feature (1465)..(1466): n is a, c, g, or t
  misc_feature (1468)..(1468): n is a, c, g, or t
  misc_feature (1473)..(1473): n is a, c, g, or t
  misc_feature (1478)..(1478): n is a, c, g, or t
  misc_feature (1484)..(1484): n is a, c, g, or t
  misc_feature (1486)..(1486): n is a, c, g, or t
  misc_feature (1503)..(1503): n is a, c, g, or t
  misc_feature (1517)..(1522): n is a, c, g, or t
  misc_feature (1524)..(1525): n is a, c, g, or t
  misc_feature (1528)..(1530): n is a, c, g, or t
  misc_feature (1540)..(1541): n is a, c, g, or t
  Peptide Sequence Number=SeqID_9364
  Probeset Number=SeqID_11525
cacccacagccgctatctttacacacatcagcgngtatcgtggtgtggtatatatatcgtgtgtactcggcgctgtagctgatacctactatactcgtattacgcacagtgtatgagcacagtcgacgatataattgtacgagtgctgtcataggtagcgaatagttgtgtggctgtccacgcgacacatgtatcgaccattcacatctctcatctacaggagcacagacaaagtgangttngctgtggacgcgcgcgccgaccgcgtctagtctgtcgtgacgcgagccagctcgcgcgtatcgctgcgggcgctcaagtcgcactacgcatctgagcncacagcacgcagagacaccatttcctgtgtacnacgtgcgccacacaccatcgtgtatattaccacgaacctcgcccgcggtggctgtncccccacagtacaacatacatgaattatcagaaccacgagacagttatgtggagttctacgacaacaagtgttgtatgagagcaaacactgtatgaggnctacataagattatattagataagtggtaagtacagtcataaacacagtaaaccacccacaaacgagatgcgaccagtgtcgccagnagaagagatatnattgtgtgtttgctgtctttgcntnttgcacacactcaccacattaaatatcattcacgagatatatataaatatatccactatatctatgtctgagacgtggcnctcacgagcattagatgtgtatgagagtgcacgtagcgtgttacagcgtatagtatatattatttatgatcgtctccgttctgtgatggtcttgctcgtctactctattatgctatcttttgcttcctccacgcctatcaatatatacgctgtgctagacgcctggtattatnacacgcgctatccgatttgagtagtgtggactgtcgagttctttgtatgttaagtaatctcctatctcagcgtgtctcggcgagtgtgagccgtggatcgngagtttcgtgtcgtgcgcatcacccggcactcacgcgcatcattatattatataatgttccacgccacgcatcgtctcgcgcctaccacactatctagagtataacactagacaataatgagaagagatgctccgtnacgtggagtgatctcatacaatacatcatgancgcnaacgcgcattacgctcaatcgagacgccgcgcagaccgagaggcgtgcgnccngccgccnnctnatagtgtatntctttgcattatatcatctgngnctgtcgcgcgcgcgcgtatcagtatatagcgcgcgccgcgagagctagcacacgcactatgcgagatgccgcagtggctagttagtcatatatggtggggaaggagagngcnnccggnntgtacngnccncnnataacnccacacaacnnagaacannncnnaaaannnctccacacnagannaanacnnantctgncacgncacgcngntgtagattgttaggacngggaggaggtgatnnnnnntnnttnnncaccccaccnnccacaccccccccaac

SEQ ID NO: 1747 - DNA, 1333 bp, Glycine max
  misc_feature (1289)..(1289): n is a, c, g, or t
  misc_feature (1308)..(1310): n is a, c, g, or t
  misc_feature (1315)..(1319): n is a, c, g, or t
  misc_feature (1328)..(1333): n is a, c, g, or t
  Probeset Number=SeqID_11526
ctttgattagggtgtgtttatttatgacgacgataaaagtaaatttttagatgtttactatcgtgtcgttttttatatatcatatttagtttgtgaggtgtcctatcattctcttccctctgcgactattacatactcgtattttgtgtcattagcacttttctatgttcgttcatcttcttcggcctcgtgtatcccaggccttgcgttgaggttgttataattgtttcgtgttgactttcgctatatgagtcggtcttatttagctgtggtcatggtagcgggtcggtacgacaatgatggtaatcaggcgcgtatcagtggttgttgttagtatataaaactagtgctgcgccgcgcctgctcacaatacttcatttactctatcgttcttactctctgtacgcttatcgttaatacttggtgtatttatttgttaatgtgggtagaacatattatatcggtacgatgggtgtttcttggtttatatacacgtcacatcacgccttatcgaccctatcctttatgaaacaatggggtggtcgttatgattatttggtgtaggtttttgtacgtctacatagcctcactcaggtgtccggtgtatttttctacctgattacttgccgcggttgttttacctatcctgctcattcgctgtgtgctattttctcgtacgatgcagcctcggtttctatttcttcctgttggccaacttcgcacctcactggtggggctgatgatcatatagaagtgaaagacgcgccagagggttaacactctgctcgcagttgaaatatttatatcaaacttgcttttattaaatattttgaggcgtttggctcttctttccgctgcgaattctccctgttgttcctttttttctggcttcatttcctctcccctgttttctcccctctccttttctcgtgttggtttcttctatctttctattgtatgtattcctctctcttcttattgtctctccacttcatatatcttgagcgtcttctttctcgtctttctctttttcctttcctctcatttactcctcgtcattattctgtctttacctcctccttgtcatctcccccgcacgtttggggcggtataaaccttccctttctctttctcgcgtctgcaggtgcagcggggtgggcgttttattatttttttctgtgggggactattttttttattgtcgctctattttatttttggggaaaaaattatatattactcacttccccacatacttccttccccttcaccataacctatatcaaatntttaataatttaaaaaccnnnaaaannnnnaaaaaaaannnnnn

SEQ ID NO: 1748 - DNA, 555 bp, Glycine max
  misc_feature (28)..(28): n is a, c, g, or t
  misc_feature (41)..(41): n is a, c, g, or t
  misc_feature (273)..(273): n is a, c, g, or t
  misc_feature (400)..(400): n is a, c, g, or t
  misc_feature (489)..(489): n is a, c, g, or t
  Peptide Sequence Number=SeqID_9365
  Probeset Number=SeqID_11527
ttttttttttttttttttcttttatganaataataaattanttagttggtaattaaaaacatattcttattcataaaaaaaggagtaaagctattgatatgtatatgagtggagagtgaaaaatatatacatgaatgcaatagctttaacaaaatacaatatagttgcttggtataaaaagtctggacaactattttcttcaaccatagctctaaaaaatttggctgaaaacaaaatccgtcataattagctctgcttggaaaatttcttganagtgtcccacttttccataaagtctttaatagtgtcattaacagttctgttggtttcaataacatttctcaattcttcaatgttgaacttcttcatatcatcctccaatttaatgttattttgtaanaaggtaagtttgctgagtaagatgatattttgttcttcgacttccttggatttgaattgtaatttagctctgagttctcttttatcaanaagctttaatctcagatcttcaactttaacatcagcatcattgactttaggatcgatttcgtcgat

SEQ ID NO: 1749 - DNA, 552 bp, Glycine max
  Probeset Number=SeqID_11528
aatcaaaccacccaaattcttctcagatctgtacttgtacttgtacttcttctaaaacccagaaagaaaattaaagcaatggctccaaaagcagcagagaagaagccagtagaggagaaagctccggcggagaagaagccgaaggccgggaagaagctgcccaaggaagcaggtgcaggcgttgacatgaagaagaagaagaaatcgaagaagagcgtggagacgtataagatttacatcttcaaggttctgaagcaggttcatccagatgtcggaatctctagtaaagccatggggatcatgaacagtttcatcaatgacatcttcgagaagctcgcccaggaatcgtcaaagcttgcaaggtacaacaagaagccaacaatcacctcgagggagattcagactgctgttaggctcgttcttccaggagagctcgccaaacacgccgtctccgaaggcaccaaggccgtcactaaattcaccagctcttgaacatccaatctaaattaagtttcagttacctttcaatctcagttgtaattagttctatga

SEQ ID NO: 1750 - DNA, 1243 bp, Glycine max
  Peptide Sequence Number=SeqID_9366
  Probeset Number=SeqID_11529
tccgagtcggtcggtgtcaattgcatcaatttccgcaactccttttttttacgttttaaaattcttctcgtttaactaaattaactggacttttgcttattgcagttatctacttcatttgtgaacgctttttttgtgtcgtatgtccatccagaatcttaatacattcgacccatttgcagatgcaatcaggggctctgacgatgatgtacaagatggactcgttcatataagaatccaacaaagaaatggtcgtaagactctaacaacagtgcaagggctttcttctgagtatgacctaaaaaagattgttcgagcatgtaaaaaagagttcgcatgcaatggaactatgattgaacatccggaatacggggaagttttacaattgcagggagatcagcgtgagaacatatgccagtggctgacaaaaactggtcttgcgaaacctgatcagctcaaagtgcacggattttaaactcgcaaacaaatacaaaaaaaaaagcaaaaaaataattgaaaaaaagagaaaaaaaaaccaacagcaataaaatgaaattcaattgtatcaatactttacccgagatcgccctgttgtactgacgaacatacagataatttacaagcaaaatatttaagaagatttaatttaaataattttttgtttttctttgtactttttttatactttttattatttattaatcctccccacccttaatacctagaacaagagaagaaaaattgtaaactcgaccattatgatgttaactctttactggaggtagtatgtatctagatgcaatcgatatatttagagaaggattttttaattggttagcgaactatgtatttggagtggacagaggtgtcagttattgtaaactgtaattgtatggattattctgttttgatgtataaaaatattgttatgtatttgtaagcgctgtactgtgcctttcaggttgtttatatctgacatgaacatcatctccagcaatgtagtgcttgctgtttatcaacaaaagaaattgtaaactactagtagttatcctatgtaattttaaaaacaaacgaaatggataacattttaagatttatatatataatgtataattatcatacaaagttcatcttttttcaagtatcctcaccatcattcgaattttcatctttactacatacgtgcatattgctacataatgtttccagtaaataaagcttcagtaaaatcttttttaatatt

SEQ ID NO: 1751 - DNA, 2019 bp, Glycine max
  misc_feature (1)..(22): n is a, c, g, or t
  misc_feature (1965)..(2019): n is a, c, g, or t
  Peptide Sequence Number=SeqID_9367
  Probeset Number=SeqID_11530
nnnnnnnnnnnnnnnnnnnnnngcgtttcccttcaacaacttgagatccaatccagcgagagagagaaatccccaatccaattcaccgaaccctaaccctaaccaagcaggcggcaagagagatgttggtccagaagatgccgatggccgccggctacgagggctttcccctcatcccatcgttccaggcggacaaggagcaggcggaggcggtgttggccgtcagggccatcaaggccaaggcggaggaggcgtcgttgatcctcaaggcggggtgcggctccaagaggaaggcggaggaggacggcggcgaggtcaccgtcaaggccaaggccaaggccgcggaggaggaggcggcagctttcaccaccgtcaaggccaaggcagaggaggactcggacgaagacgctgaatgggacgatgatgagttcatggccagaatcacggcagaccacgccgcccatgtcgagaagatgaaggctctgtatcccaccatcaagtacggggactacgaccctaaggtctactgccacagccccgacccggagtcggatgcttggaatctccaaaagaaatgccttggtcttgctgagattgctgccggattactgtaatttgacgactgggatgggaatatgggatggaggagggttaccaatgctatctatctatctatatgctagtagtcgatcaatcgatccggaggacatctaaattaatgttagccaagcaccacctatatgtgatgtgcgtgcgtgtgtgatatcagtgggcagtgtcaatgccaatgtatctactaatattatctagtgctattatacaacatccatgtcccatacatctttagcagcaagagaactcaaacagtttaattttcttcaaaactagtttttttttggttttagttggtatcctcggaagagagagaaaatgttgggaattttcagcggagctatagtatcattgccggaagacctggtggctgccgggaacccaaatccgatcgccgaagacccccggcctcggcccatagtcaacaagttggtagaggaaggatccctcggccgtctccggacacctcggtgcctacgtcagcctcttattagccaccattaaaagcgttctcagcagccaaggtaattaaggaattaaaatgagatctgctgcagcttccaaggccccctttaatacctttggaaaaacggcacctcaatttggcgctatcagacactactaggcgtagggcgtggccagctcgtcattggctgcagagggaacccctcgagctagagtcccaccccctccccaaccacaaggacccaccccgtcaagtccaaggcaccggctgctgcatccaaatcatcgtcagcctcagccccccaaagcagcctcccctgcggcagaggaagcaacaaccgtaagaggattataccgcaacatgcccgagtggatctgccgagaggaacctacagtcctcaactcgcccatccaggacactacctcttggagtctgttgatggagccatctttccgatgccacccagccgccggcccgggaggtacacgacggcaacgccaataatgtgaagctctctgtcggcggggctgaagtctgcggtcggactctccatctgctctatgataagcagttaatccacttagttatttcaaatgaaagttatgtaacgtttaagatgaaaccacatcttgacaatctgcgaaataatatagcaaaagcaagaagcgatttattgattattatttttttttaagatgttatcaatatttggtgatgatgatgcgtgtagtgtggtctctcttttgtacaatccgagtccgtctcttctgctgtttgtagtgactttgtcccaataagttatgtctcaaaactcaaaatctaccttctcttgatcctttttttatctcatgttcagatcttgtgtttcttcagtaagtcttgcaatnnnnnnnnnnnnnnnnnnnnnnnnnnnnnnnnnnnnnnnnnnnnnnnnnnnnnnn

SEQ ID NO: 1752 - DNA, 455 bp, Glycine max
  Probeset Number=SeqID_11531
taggttctagatcgccagcggccccctttattttcattttgtattcgtttttgtctttcattacaaatatgtttttgtctttatccgttattaaattctgcttgtatcatgtgacatttacattaatttattgattttagatattaaatctagaaacttgtgataagatatttcttatttttactttcaacttatattcctcttactgaaattgcaatatatatactgtcttacttctccttaagcaataactcctcgtgtcgaaattgtatatccaaagtttatgtttaaagtaaactacttcccttgagtcttcaattagaactacatcatccaaaaactatgaaattatggattatttatatcttcttggtaagcgagtccaagattagattcaacaaagacttgatggtgatgcattcctatctctacaaggaagtccttattcttgtttc

SEQ ID NO: 1753 - DNA, 425 bp, Glycine max
  Peptide Sequence Number=SeqID_9368
  Probeset Number=SeqID_11532
accagcttcgccggcgtggacatgcgcatcatagtcaagggcggcggtaacaccttccagatctaccccatcatgcatagcatatccaatgcccttgttgcttactaccagaagtacgtatacgagcagtccaagaaggagatcaaggacatccttgtcaagtactaccgcacccttctcgtatccgatcctagtcgctgcaagcccaagaagttcggcggtcgcggtgctcgcgccaggttccagaagtactaccgttgatttccactctttattcatgttattcttcatgacttcgaaaggtactgtcttcctgtattatttgttccgcgctgagtggaggtcaatcggatcttgcatacagctatataattatgctgtatttatagaggagtaagaacagaattttagttgactgcattatt

SEQ ID NO: 1754 - DNA, 1452 bp, Glycine max
  misc_feature (1)..(1): n is a, c, g, or t
  misc_feature (29)..(29): n is a, c, g, or t
  misc_feature (253)..(253): n is a, c, g, or t
  misc_feature (261)..(261): n is a, c, g, or t
  misc_feature (281)..(281): n is a, c, g, or t
  misc_feature (533)..(533): n is a, c, g, or t
  misc_feature (842)..(842): n is a, c, g, or t
  misc_feature (921)..(921): n is a, c, g, or t
  misc_feature (1199)..(1199): n is a, c, g, or t
  misc_feature (1259)..(1259): n is a, c, g, or t
  misc_feature (1289)..(1289): n is a, c, g, or t
  misc_feature (1334)..(1334): n is a, c, g, or t
  misc_feature (1343)..(1343): n is a, c, g, or t
  misc_feature (1351)..(1352): n is a, c, g, or t
  misc_feature (1437)..(1437): n is a, c, g, or t
  misc_feature (1452)..(1452): n is a, c, g, or t
  Peptide Sequence Number=SeqID_9369
  Probeset Number=SeqID_11533
ntagtagtgactgcgtcgcatggtatggnagtcacagtatatgtcgcagatgaagaatacgtcgtacgtcgtgtgtacgtatatactaggcgcatcgtgggtagatgtcttagtcaatatcatgcgccgtaatatacagttgtgtgtagtacgatctatatctatgtatatacgaatcgtatttcgttgttacatcacgcgtcgctctactacagtctatactatagcgtgtgtggataggtgacggagtctnctgtgtgnattcactagcatcgtttctntactatatgagcacttatgacggtgtgacaggagtggagtacggagtttaggcataagacagagtgaatgagcactgagacgaggcagtgtagtaagatgatcagtgaggtggcgtggtcgcgagcggcggcgtgatgatgacctgtcaaaccacctataggatcagtgaagatgtagatttatataatctaatctcgtgacgagatatgtgcacaatattaaggcttattcaatcactagacatatgacgnatacgcgttctgtgacggtagtattgcagtgtgtggctctcatctcatcatttatgcactctcactcacctggacatggcgccagactacgctcgtggatgcgtccagcacagatttctccgtcgtctgccttcagttcgatgtagaccgtatatcatgatcgtgtctatctctgagtatatgattggtatgttacttgcaagatataattatacttttcttgtcgtggtatgtctgtgtgtctttgttatcgttatctactatctgtgctctgtcaatgtctgttcctagagcatctacactctatgnattcgaggttcgtgaggatctgtatatatgctcggtgtgtggtatatgacattattaataggatatttataagatatgntgagtagtattgaatgtctaatatttatgtatgagagcttcgtgggtgcgagacgatagacagacaatttgtcaatcatgcgtatgtatagataacctcaacacgatacgatacacgtacatcaaatacagagtatataaagagagactccgtacggaggtgagcaggcactgcaatctcatcatctgcatattaaaacttatggtctgcagcgatgagtgcgcctatacgtattaataggagtatacacacaaatataactcccacctcgcgcgatnatcgtatttataatcatacaacacacacacacgacaataacctacatctcataaactaanacaggcacacaaagaaaagtgaaagtacancatcatagaaaagtgggatagtaaatctcatcttatatccacacnataatatcnccatcttnntctcccatcttcttatctaatttttattcttatattcttattttatattataataatatttatttatttttatatcttcttattntgtctatattttttn

SEQ ID NO: 1755 - DNA, 460 bp, Glycine max
  misc_feature (13)..(13): n is a, c, g, or t
  misc_feature (15)..(15): n is a, c, g, or t
  misc_feature (74)..(75): n is a, c, g, or t
  misc_feature (80)..(80): n is a, c, g, or t
  misc_feature (84)..(84): n is a, c, g, or t
  misc_feature (90)..(90): n is a, c, g, or t
  misc_feature (99)..(100): n is a, c, g, or t
  misc_feature (153)..(153): n is a, c, g, or t
  misc_feature (177)..(177): n is a, c, g, or t
  Probeset Number=SeqID_11534
ggccacccccacncnccgggcgcacaggccacgcgcccccagggccgcggcagcgggaccgccgccccacgacnncggcncggnccgggncgagcggannagggagccgagcgggccgcgcgagaggacccgcagggacaggaccgacagggncacccacgccgacaccgacggcgncgccgccggagcaggcaccgcgggttttttgtgcgcctacgagctctccaaaaacccctgggggggggtgggcatagtcgagcagtccgtcagccccggcggcggagcctggctcggcggggagctcgtgggtgcgatggtagtgcgtaagaccgcacagggcgggggagacgagcttggtcgtgagtatgaggaacaagacaagtacgtggggatcgagcacgctgcatggttgacgggcaggcagaggaggaagggcgtggccaggggcaacgtgaaggtc

SEQ ID NO: 1756 - DNA, 898 bp, Glycine max
  Peptide Sequence Number=SeqID_9370
  Probeset Number=SeqID_11535
caatatgacaagtggcattacttcacagtagtrtgaayaagtttgatttaacatagcgcacgtgcacacacacacactcagggaggcattagttcacaagttacataggttcagacttgaagcatcaaaatgtactcctgtaggttagcaggaayagcttacatatgatccatatggcaagggtgacttgatgccattatgaagacctcgccgtacatccggtcggcaccacacagcctccctgaaggcaccgtacaaagaacttagcaagcataggcccctctccabaaggcagattgtagtatactgcctgaatctaaacattattatttatctaccgctattacatataccccctayattagatatgtatttttctgcacagagcatttcctttgattttaaaattcactgaggcacatacggactaaatttttccaagtaaaaacagagaagggccaccacaaatatcaattgacctgggcaagtgctcacagaccaccgttggagccagcgtcactcggcgagcctggcgacccgtgaacttggagctgtttgtcggccatcataaccttgcgagaggaagaatcaatcacaccagatccagtcccttgcaagccgaagacgaggacgacgtggcaaccagggggaacatgtggcgtcaatcaaggtgaagaaagaaacatcaccagttcagttagcatgagccgtaagcgtagagcactcatcttggcttgcatgtagccgtatgtaaactcatagagtcggaacacacggattgatgcttagggccagcatcaccttggttgcttcatactcaattattctcttactgagaaattcagcgacaaccagccaaagatttcttttcaacagtccttgatttctcataataata

SEQ ID NO: 1757 - DNA, 497 bp, Glycine max
  misc_feature (257)..(257): n is a, c, g, or t
  misc_feature (265)..(265): n is a, c, g, or t
  misc_feature (282)..(283): n is a, c, g, or t
  misc_feature (299)..(299): n is a, c, g, or t
  Probeset Number=SeqID_11536
gcacgaggttatcttctgtcataatcagagagcagttgctatagccaataatcctgttcttcatgctcggaccaagcacatggacattgacatcttctttgttagagaaaaagtcttgtccaagcagctggttgttcatcatattctggctcttgatcagtgggcagatgctctcaccaagcccctctctccaaccagatttttattttaaggaccaaactcaatgtgcttgagactccttcacagtctcatccacncttgaagngggggtattagagtatnntgtacaaagagttgcnagtgttcaactacactttctcaatccaagccagttagttagaagttagttaggagttagttttctgttatgagtgttagtaagttagttggtgaattagttggtcataactaatcactcagatctataaacagaggctaatactcatttttcacttcttcattctaaacttttctctctcaaaaaaaaaaaaaaaaaa

SEQ ID NO: 1758 - DNA, 2606 bp, Glycine max
  misc_feature (1)..(1): n is a, c, g, or t
  misc_feature (17)..(17): n is a, c, g, or t
  misc_feature (21)..(21): n is a, c, g, or t
  misc_feature (24)..(24): n is a, c, g, or t
  misc_feature (29)..(29): n is a, c, g, or t
  misc_feature (31)..(32): n is a, c, g, or t
  misc_feature (35)..(36): n is a, c, g, or t
  misc_feature (39)..(39): n is a, c, g, or t
  misc_feature (43)..(45): n is a, c, g, or t
  misc_feature (47)..(47): n is a, c, g, or t
  misc_feature (49)..(49): n is a, c, g, or t
  misc_feature (51)..(51): n is a, c, g, or t
  misc_feature (54)..(56): n is a, c, g, or t
  misc_feature (60)..(61): n is a, c, g, or t
  misc_feature (64)..(64): n is a, c, g, or t
  misc_feature (67)..(70): n is a, c, g, or t
  misc_feature (72)..(72): n is a, c, g, or t
  misc_feature (74)..(77): n is a, c, g, or t
  misc_feature (83)..(83): n is a, c, g, or t
  misc_feature (90)..(90): n is a, c, g, or t
  misc_feature (96)..(96): n is a, c, g, or t
  misc_feature (101)..(102): n is a, c, g, or t
  misc_feature (105)..(105): n is a, c, g, or t
  misc_feature (107)..(108): n is a, c, g, or t
  misc_feature (110)..(110): n is a, c, g, or t
  misc_feature (116)..(116): n is a, c, g, or t
  misc_feature (123)..(123): n is a, c, g, or t
  misc_feature (126)..(126): n is a, c, g, or t
  misc_feature (145)..(146): n is a, c, g, or t
  misc_feature (150)..(150): n is a, c, g, or t
  misc_feature (152)..(152): n is a, c, g, or t
  misc_feature (160)..(160): n is a, c, g, or t
  misc_feature (192)..(192): n is a, c, g, or t
  misc_feature (213)..(213): n is a, c, g, or t
  misc_feature (220)..(220): n is a, c, g, or t
  misc_feature (222)..(222): n is a, c, g, or t
  misc_feature (226)..(226): n is a, c, g, or t
  misc_feature (230)..(232): n is a, c, g, or t
  misc_feature (234)..(234): n is a, c, g, or t
  misc_feature (239)..(242): n is a, c, g, or t
  misc_feature (281)..(281): n is a, c, g, or t
  misc_feature (294)..(294): n is a, c, g, or t
  misc_feature (303)..(303): n is a, c, g, or t
  misc_feature (343)..(343): n is a, c, g, or t
  misc_feature (346)..(346): n is a, c, g, or t
  misc_feature (405)..(405): n is a, c, g, or t
  misc_feature (410)..(410): n is a, c, g, or t
  misc_feature (442)..(442): n is a, c, g, or t
  misc_feature (444)..(444): n is a, c, g, or t
  misc_feature (451)..(452): n is a, c, g, or t
  misc_feature (465)..(465): n is a, c, g, or t
  misc_feature (468)..(468): n is a, c, g, or t
  misc_feature (480)..(480): n is a, c, g, or t
  misc_feature (485)..(485): n is a, c, g, or t
  misc_feature (507)..(507): n is a, c, g, or t
  misc_feature (521)..(521): n is a, c, g, or t
  misc_feature (530)..(530): n is a, c, g, or t
  misc_feature (535)..(535): n is a, c, g, or t
  misc_feature (539)..(539): n is a, c, g, or t
  misc_feature (548)..(548): n is a, c, g, or t
  misc_feature (557)..(557): n is a, c, g, or t
  misc_feature (561)..(561): n is a, c, g, or t
  misc_feature (566)..(567): n is a, c, g, or t
  misc_feature (587)..(587): n is a, c, g, or t
  misc_feature (591)..(591): n is a, c, g, or t
  misc_feature (593)..(594): n is a, c, g, or t
  misc_feature (597)..(599): n is a, c, g, or t
  misc_feature (601)..(601): n is a, c, g, or t
  misc_feature (603)..(603): n is a, c, g, or t
  misc_feature (607)..(608): n is a, c, g, or t
  misc_feature (610)..(610): n is a, c, g, or t
  misc_feature (612)..(612): n is a, c, g, or t
  misc_feature (620)..(621): n is a, c, g, or t
  misc_feature (623)..(625): n is a, c, g, or t
  misc_feature (631)..(633): n is a, c, g, or t
  misc_feature (637)..(637): n is a, c, g, or t
  misc_feature (639)..(639): n is a, c, g, or t
  misc_feature (641)..(642): n is a, c, g, or t
  misc_feature (652)..(653): n is a, c, g, or t
  misc_feature (655)..(655): n is a, c, g, or t
  misc_feature (680)..(681): n is a, c, g, or t
  misc_feature (766)..(766): n is a, c, g, or t
  misc_feature (771)..(771): n is a, c, g, or t
  misc_feature (801)..(801): n is a, c, g, or t
  misc_feature (827)..(827): n is a, c, g, or t
  misc_feature (851)..(851): n is a, c, g, or t
  misc_feature (972)..(972): n is a, c, g, or t
  misc_feature (977)..(977): n is a, c, g, or t
  misc_feature (982)..(982): n is a, c, g, or t
  misc_feature (1010)..(1010): n is a, c, g, or t
  misc_feature (1012)..(1012): n is a, c, g, or t
  misc_feature (1040)..(1040): n is a, c, g, or t
  misc_feature (1077)..(1077): n is a, c, g, or t
  misc_feature (1090)..(1090): n is a, c, g, or t
  misc_feature (1100)..(1100): n is a, c, g, or t
  misc_feature (1106)..(1106): n is a, c, g, or t
  misc_feature (1109)..(1109): n is a, c, g, or t
  misc_feature (1138)..(1138): n is a, c, g, or t
  misc_feature (1173)..(1173): n is a, c, g, or t
  misc_feature (1205)..(1205): n is a, c, g, or t
  misc_feature (1207)..(1207): n is a, c, g, or t
  misc_feature (1216)..(1216): n is a, c, g, or t
  misc_feature (1228)..(1228): n is a, c, g, or t
  misc_feature (1255)..(1255): n is a, c, g, or t
  misc_feature (1297)..(1297): n is a, c, g, or t
  misc_feature (1348)..(1348): n is a, c, g, or t
  misc_feature (1351)..(1351): n is a, c, g, or t
  misc_feature (1357)..(1357): n is a, c, g, or t
  misc_feature (1361)..(1361): n is a, c, g, or t
  misc_feature (1406)..(1406): n is a, c, g, or t
  misc_feature (1424)..(1424): n is a, c, g, or t
  misc_feature (1444)..(1444): n is a, c, g, or t
  misc_feature (1448)..(1448): n is a, c, g, or t
  misc_feature (1459)..(1459): n is a, c, g, or t
  misc_feature (1463)..(1463): n is a, c, g, or t
  misc_feature (1467)..(1467): n is a, c, g, or t
  misc_feature (1477)..(1477): n is a, c, g, or t
  misc_feature (1482)..(1482): n is a, c, g, or t
  misc_feature (1484)..(1484): n is a, c, g, or t
  misc_feature (1499)..(1499): n is a, c, g, or t
  misc_feature (1529)..(1529): n is a, c, g, or t
  misc_feature (1544)..(1544): n is a, c, g, or t
  misc_feature (1632)..(1632): n is a, c, g, or t
  misc_feature (1686)..(1686): n is a, c, g, or t
  misc_feature (1691)..(1691): n is a, c, g, or t
  misc_feature (1698)..(1698): n is a, c, g, or t
  misc_feature (1700)..(1700): n is a, c, g, or t
  misc_feature (1713)..(1713): n is a, c, g, or t
  misc_feature (1716)..(1716): n is a, c, g, or t
  misc_feature (1733)..(1733): n is a, c, g, or t
  misc_feature (1780)..(1780): n is a, c, g, or t
  misc_feature (1803)..(1803): n is a, c, g, or t
  misc_feature (1812)..(1812): n is a, c, g, or t
  misc_feature (1849)..(1849): n is a, c, g, or t
  misc_feature (1879)..(1879): n is a, c, g, or t
  misc_feature (1897)..(1897): n is a, c, g, or t
  misc_feature (1917)..(1917): n is a, c, g, or t
  misc_feature (1930)..(1930): n is a, c, g, or t
  misc_feature (1938)..(1938): n is a, c, g, or t
  misc_feature (1946)..(1946): n is a, c, g, or t
  misc_feature (1961)..(1961): n is a, c, g, or t
  misc_feature (1984)..(1984): n is a, c, g, or t
  misc_feature (1986)..(1986): n is a, c, g, or t
  misc_feature (1993)..(1993): n is a, c, g, or t
  misc_feature (2023)..(2023): n is a, c, g, or t
  misc_feature (2031)..(2031): n is a, c, g, or t
  misc_feature (2043)..(2043): n is a, c, g, or t
  misc_feature (2055)..(2056): n is a, c, g, or t
  misc_feature (2065)..(2065): n is a, c, g, or t
  misc_feature (2124)..(2124): n is a, c, g, or t
  misc_feature (2153)..(2153): n is a, c, g, or t
  misc_feature (2165)..(2165): n is a, c, g, or t
  misc_feature (2184)..(2184): n is a, c, g, or t
  misc_feature (2206)..(2206): n is a, c, g, or t
  misc_feature (2208)..(2208): n is a, c, g, or t
  misc_feature (2226)..(2226): n is a, c, g, or t
  misc_feature (2242)..(2242): n is a, c, g, or t
  misc_feature (2249)..(2249): n is a, c, g, or t
  misc_feature (2257)..(2257): n is a, c, g, or t
  misc_feature (2265)..(2265): n is a, c, g, or t
  misc_feature (2268)..(2268): n is a, c, g, or t
  misc_feature (2272)..(2272): n is a, c, g, or t
  misc_feature (2300)..(2300): n is a, c, g, or t
  misc_feature (2303)..(2303): n is a, c, g, or t
  misc_feature (2313)..(2313): n is a, c, g, or t
  misc_feature (2317)..(2317): n is a, c, g, or t
  misc_feature (2327)..(2327): n is a, c, g, or t
  misc_feature (2359)..(2359): n is a, c, g, or t
  misc_feature (2365)..(2365): n is a, c, g, or t
  misc_feature (2381)..(2381): n is a, c, g, or t
  misc_feature (2383)..(2384): n is a, c, g, or t
  misc_feature (2414)..(2414): n is a, c, g, or t
  misc_feature (2420)..(2420): n is a, c, g, or t
  misc_feature (2422)..(2422): n is a, c, g, or t
  misc_feature (2428)..(2428): n is a, c, g, or t
  misc_feature (2437)..(2438): n is a, c, g, or t
  misc_feature (2462)..(2462): n is a, c, g, or t
  misc_feature (2494)..(2494): n is a, c, g, or t
  misc_feature (2507)..(2507): n is a, c, g, or t
  misc_feature (2510)..(2510): n is a, c, g, or t
  misc_feature (2521)..(2521): n is a, c, g, or t
  misc_feature (2526)..(2526): n is a, c, g, or t
  misc_feature (2532)..(2532): n is a, c, g, or t
  misc_feature (2540)..(2540): n is a, c, g, or t
  misc_feature (2557)..(2557): n is a, c, g, or t
  misc_feature (2559)..(2559): n is a, c, g, or t
  misc_feature (2566)..(2566): n is a, c, g, or t
  misc_feature (2569)..(2569): n is a, c, g, or t
  misc_feature (2583)..(2583): n is a, c, g, or t
  misc_feature (2606)..(2606): n is a, c, g, or t
  Peptide Sequence Number=SeqID_9371
  Probeset Number=SeqID_11537
ntttttttttttttttntttnttnttttntnnttnnttntttnnntntntnttnnntttnnctntgnnnncnannnntattgngctgctngttatnatgtnnggnannanctgtcnagtatcnagnagactgagtctatcggcanncacnancatcctgntcgtgcgaatcgttgtgtgatcgtgctcgganctttgtctggtatgtgagagntagaggnancggnactnnnancgccnnnncgctagagaccgcgacgtcagcgatagagcgtacgctgntcagctgcatctnctctgccgntcgtctcgtctgctttactctatcacatacgacgcacgcnaanaatgagataagagtgactatagatctagcagtgagactagtgtcatgctagagagagtnactgnagatagatagcatacatatactatagagaatnanatgtgtnntcgtcgcatagtntangtacgatgcatnatttnacatatatatcatcattaaatnagtatatattaatnatatatcgntatanaatnatgttacantcgacacanaccnacatnnctaactttaaataatataanagcntnnctnnncntncttnntntntcgcttgnngnnnacggcnnnatgnancnncatcacctcnntnatacgctactgcagctagtagtcgnntcgtcgtcagcaatatagcactcattgactatctcatgattatagtctagagagatagtagtcacatacagatatatcatatacnattgnacagcatgatcatctaaatctcgctgtcantctgcacgcatccacgcgtagcaccnactatactatcacgtagtcgctantactacgatctgatagtctagtgatacgatgatagtgtgatcgagaagatgagatcagtgatctactagccatagtgctccgacgagtccgctctcgacagcgtaaatacgacgtgtgtgntatgnagatnagtgtatgagagatagatatgacttgtnancgttcgtgagtatcaatgtatgatcgtntccgtcgcgagatcactcacatctgtgctctcggctngcggactcactantcgatgatanatgcgnctnactatcgacttactgtatcgcactacagnacacgtatatgacgtactgctctacgttgcaatantatgatgctgatatcgcagctgatagctgcgncntgatgagcngagcgacgtgtntacacgcgaacagcactacagcacgcnagcatgatcgatgacgacgacactgagctatgtatcgtacgntagtctggtgcagcatagtattataagtagtgcgtagtagtagcacgatanganagagtngtgnaggacggaaggtcattacactgctagtatacatacgtagactagngaatagatgcatatcatncgtttgtatactgtacactnactnattattcctancatnatantttactgatncatananactgacggtcagatngactgacgacttatatacggactataatancatcgtacaattgcntaatgagtactactacagtgctatgtatgtatactacgagtacgtacagatcgatactcactcatatatgatatacattatactaatnactcatcgtaccatcgcaaatcagtcatcagcactgtgatgattgatgatatantacgnacgacgnangacgtagtacgangtnagcgtgtgttagtatcnggacgagctgtagcgtctagtatcatctcatcatacgtcaccaccgnctcatactgatcaatagtaaacntttagttancgatgtgtcggcgacgctgagcccgtcatcagtctgntactgcactacgcactagagctactctctnctgctgtgtagtagattngacgcactcgtcgtagccgntaccaacgatcancacgctcngcgatcantgagtcggtcgcgcntgcctgacgtgccgactgccgcngntagtatnagtagatcatcgccatctgctcacagcganacatcaancatatagcctgntccatgcactannagtctgacntgtgataaatcaaggcgggactagagatcaccagtctcgtagtggatcgcttactgtantactggctatacatcgtacgtgacacggntcgacgactacnactctgagaacgagctaanctacgataagtatagatctgancntgggaactcgactcatgnattgatcaaatcgacnctactgncgactganagtaagancgngacngatactatatatactgatcattgactcnatnaatatgatcnatantttacgactncaactagtagtctaccacacatcaacaatcantaaagnactaaagagtgacacnanncataataatcgacacgcggatgctagacancagacntnacccgncgctgtgcnntctcagtctgtcgactggtgcgcnacgttgctacgatgacactcaagcacgaactncgtatatactacncanatagacgacgncctcngatatnatcagatncagaaacaatatgcagncnactgacnacncgcactaccaccantcaccgatcgtatgactgctcgn

SEQ ID NO: 1759 - DNA, 1005 bp, Glycine max
  misc_feature (869)..(869): n is a, c, g, or t
  misc_feature (914)..(914): n is a, c, g, or t
  misc_feature (926)..(926): n is a, c, g, or t
  misc_feature (929)..(929): n is a, c, g, or t
  misc_feature (932)..(932): n is a, c, g, or t
  misc_feature (953)..(953): n is a, c, g, or t
  misc_feature (975)..(975): n is a, c, g, or t
  misc_feature (978)..(978): n is a, c, g, or t
  misc_feature (982)..(982): n is a, c, g, or t
  misc_feature (993)..(994): n is a, c, g, or t
  misc_feature (1002)..(1002): n is a, c, g, or t
  Probeset Number=SeqID_11538
gctctttccttctttagtccattttagcaattaagcttccgtttgctagtagctatctctagcttctagttctagccccttcctttgtgaactttttttgtttatccagaagaatatgacatcctggttattgggaaggtctagtaggatcttaattcatcaacaacaactgcacaagaagtacttggccctcttgttaggaccatttcttaactataatagctcttgttcctcttttcgatcaactgagccatttaggtgccgtgatgcatttccgggtaagaactcggcacccaccctcgtccgcttctcgcgtcatgaatcaaccaaagctgaggcacaattggaattggagcaagatgttgccaccgaggatgaccctaatcaggtcattgattgtcctggagggaaagtgggatttacttctgatatgagattcatttctgagtctcctcagaagagggtgccctgttatcgcgttcctgatggcaatggtgagatccttaagtacagcgactatgtacaggttggcgaggaaatgggtgtgaagatgtattctgacatggtcactcttcaaactatggaccgcttattctatggtgtgcagaggcaaggtcggatctccttctacctcacccaaatgggggaagaagcagttaacattgcatctgctgctgcacttgctcctgatgatataatattgcctcagtaccgggagcctggagttctattgtggcgtggttttacactgcaacaatttgttcatcaatgctttggaaacacacatgatttggaaaagcaggcagatccaatacattatgggtctaccacacattacttccagtgcatccccatgcacacacttcctnagctgtggactgctattccttaaatggtgggaaaggctgtcagcntttgggggatgngcncangaggaattctgcgtttatttnacatatgagcccgtgtttatcnctnatgntggcatatccnnggaacatnaag

SEQ ID NO: 1760 - DNA, 1632 bp, Glycine max
  misc_feature (1)..(60): n is a, c, g, or t
  misc_feature (1460)..(1460): n is a, c, g, or t
  misc_feature (1541)..(1541): n is a, c, g, or t
  misc_feature (1611)..(1611): n is a, c, g, or t
  misc_feature (1623)..(1623): n is a, c, g, or t
  misc_feature (1629)..(1632): n is a, c, g, or t
  Peptide Sequence Number=SeqID_9372
  Probeset Number=SeqID_11539
nnnnnnnnnnnnnnnnnnnnnnnnnnnnnnnnnnnnnnnnnnnnnnnnnnnnnnnnnnnnggggaggttctgatattgatggcttcgtcgagcggtggccccgcggtcagattctagtaaaaatgaatcaccgggttgccgcaggcgggcggggaagcagcccgctcctcgcagctgttattggagtggtaaattggctttggggtgctcttaaggggcgttgctgtggccgaaatttgcggtgctttgagtggggttaagagaaaagttggagaggggatttttggcgaaaaaacagtggaacggggagtggtatttttaagcaaataaatatttcagccgttgcgcatgtttgccgtgctcgagcagttgcccaagtgggaagaagatctcgattttgggtctaggcctagatataagcaaatagttaaagaccttgcagacaaatatcatactgagaacttgctgcttgtcacacacggggaaggtgttggggtggctctttcttcattcaaaaaggatgttacagtgtacgaagttgattactgtggatacgtccaacttagacgcccaattttcaagaaagaccagtcatttactgcaggagaatctgaagttcttaatcacaatggtcaaactggcgtaaatttcatcccaaattaatggccatcttcatgtcttaggcctgattctcactactactctactctggctacttcatatttgagtcctccaaagtccaaatgactcctctattgtgaatgcttgattgagtaggaaaatttaaacaccattattcttcaatcataggatatttgattttccttgattaaatagtaaacataggaggaaaataaatagtactatagctttattcttctgcttaattcagaataagttaaaagatacattactctatgcatttactgaaattttggtatatgatagaactcaatggtgaagaatgatctgtgtaggcaattctacttatgagaaaaggcttggtttgttattgttatgaaaaaccccccgggggccctaaaaaaaaaaaaaaaaaaaattccagggaaaaaagggaaaacataacaaccaacaatttctcggcccccgggggacccgctagggcaagggggaaaaaggcccacaaaaaaccacctcgtgtttctcatccgggcttcataaactgggccctcagaaagaacacaaattccaacctcccccggggagatctcgcctgaccacccgccctggaataaaaaaaaacaaattttcccccccaaccaaaaaaaaaattttttgtttaaaaaaaggggggggagaacttttcctggcctttccaccagaagtgggggaatggggcggggacctttctcccggggaaaacataggaaaaaaatctgggtgggtggccttatttgcttcgccaacccggtctctgtccgagctgggccattatcccntggaatcgcgatgaaacactgcgagggtgacgctggccttgggcctccaaaacctgattcaaaattttagcctttgagggnccccaaatcttttgaattttcgaactgtttgggaaaaaaaaaccccccaaaacccaagaggaacaacaanatggacaaaaanttcctnnnn

SEQ ID NO: 1761 - DNA, 455 bp, Glycine max
  Peptide Sequence Number=SeqID_9373
  Probeset Number=SeqID_11540
aatttgattggatttcgatatcaggatttgccagaacctctggtcatggctttctctttagtaccgagctgtttccatggctatctcaccagctcctcgttctcctccaccactcattttctcccgacttctctctcttgcggcggcgtctctgtttctcccgtttcgaagctaagaacatgtgccaaattcgataagtttcagggtgattctcctcttgaacagaccacatcagcttctgcttcgcaggaagtagtaccgttagaagctgaagacccaccagaagaagaagaagacgatagctgcttgcctaatgatttggtgggagctgttaggcaatcaggtgaagcaagtgcttcgtttgtgaactcgggaggaacaagagctatcgtggagctcttgattcctcagctgcagttcttagacgatgaaggtgcgcaagctgaactctggga

SEQ ID NO: 1762 - DNA, 504 bp, Glycine max
  misc_feature (467)..(467): n is a, c, g, or t
  Peptide Sequence Number=SeqID_9374
  Probeset Number=SeqID_11541
tttatccaattagaacttatgtccaaggtggtgctcattgtcttgtggggtaactgaaaacacttttgaattttaaaattgagggtggtaaacatcttatggggtggatacactttgccaagtccaaagtttaatccagaaaattaagctagtttctgctatgtgaatggagctattaatgctcaccacatttaatacttgtctaagagtcttgaagttgtacacttggttaagccttctgtatctgtagttttagtgtgtccctgagtagtaatattttactgtttgttgcattttcaatgttctatttattgagcttagtcatattgctttttatatgtttttatttatttattcatcgtttagtcgttttcttctatttccactttttcagtgtcccgaaaatcttctctgcttcagaccagagcttcttcagaggaatcatcctcagtagatgccaatgaggngttcacagatttgaaggaaaaggcaagaagtttacta

SEQ ID NO: 1763 - DNA, 483 bp, Glycine max
  Probeset Number=SeqID_11542
tgtctgattcaggggcatgatatatcgagacggtcgaaattgaacaacggaagcacttgaaaattcaaattgtcataacttttcacatggatgtccaattcggggaaataatatatcgagacgctcgaaattgaacaatgggatttctcgataaattcgaacggtcatagcttttcacacgaatgttccgattcggggacattatatatcaagacgctcgaaactgatcaacggatgctctcgagaaattcgaatggtcataacttttcacatggatctccgattcaggcgcatgatatatcgagacgctcgtaattgaacagcggaagacctcgaaaattgaaatggtcatgactttgcacttggatgtccgattcaggagcatcacatatgtagacgctcgaaattgaacaatggaagctctcgagaaattcgaatggtcataacttttcacacggaggttcgattaggggacataatata

SEQ ID NO: 1764 - DNA, 301 bp, Glycine max
  misc_feature (117)..(123): n is a, c, g, or t
  Peptide Sequence Number=SeqID_9375
  Probeset Number=SeqID_11543
aatataatgggggcaatacgttttcagataagaggaatccgatccaggataggcaataatgaatgtttgctttgctgtgttgatttcgttttccatcttgtggagactcttgttcgnnnnnnnaacaagtatgcatatgttcaggtacaattctttgtccatgtcattaattagtcttctatatgatactaattgcatcttctattatgacaggttattgtggatttacaattttacatttagtttaattgctggtgcttccttaggaaatgccattgccagagttgtcttagtttaatca

SEQ ID NO: 1765 - DNA, 2238 bp, Glycine max
  misc_feature (113)..(113): n is a, c, g, or t
  misc_feature (122)..(122): n is a, c, g, or t
  misc_feature (134)..(134): n is a, c, g, or t
  misc_feature (149)..(149): n is a, c, g, or t
  misc_feature (165)..(165): n is a, c, g, or t
  misc_feature (174)..(174): n is a, c, g, or t
  misc_feature (177)..(177): n is a, c, g, or t
  misc_feature (215)..(215): n is a, c, g, or t
  misc_feature (234)..(234): n is a, c, g, or t
  misc_feature (253)..(253): n is a, c, g, or t
  misc_feature (265)..(265): n is a, c, g, or t
  misc_feature (350)..(350): n is a, c, g, or t
  misc_feature (413)..(413): n is a, c, g, or t
  misc_feature (427)..(427): n is a, c, g, or t
  misc_feature (438)..(438): n is a, c, g, or t
  misc_feature (444)..(444): n is a, c, g, or t
  misc_feature (457)..(457): n is a, c, g, or t
  misc_feature (459)..(459): n is a, c, g, or t
  misc_feature (470)..(470): n is a, c, g, or t
  misc_feature (529)..(529): n is a, c, g, or t
  misc_feature (535)..(535): n is a, c, g, or t
  misc_feature (571)..(571): n is a, c, g, or t
  misc_feature (601)..(601): n is a, c, g, or t
  misc_feature (603)..(603): n is a, c, g, or t
  misc_feature (643)..(643): n is a, c, g, or t
  misc_feature (649)..(649): n is a, c, g, or t
  misc_feature (657)..(657): n is a, c, g, or t
  misc_feature (660)..(660): n is a, c, g, or t
  misc_feature (670)..(670): n is a, c, g, or t
  misc_feature (771)..(771): n is a, c, g, or t
  misc_feature (925)..(925): n is a, c, g, or t
  misc_feature (1014)..(1014): n is a, c, g, or t
  misc_feature (1050)..(1050): n is a, c, g, or t
  misc_feature (1283)..(1283): n is a, c, g, or t
  misc_feature (1303)..(1303): n is a, c, g, or t
  misc_feature (1423)..(1423): n is a, c, g, or t
  misc_feature (1447)..(1447): n is a, c, g, or t
  misc_feature (1578)..(1578): n is a, c, g, or t
  misc_feature (1820)..(1820): n is a, c, g, or t
  misc_feature (1852)..(1852): n is a, c, g, or t
  misc_feature (1901)..(1901): n is a, c, g, or t
  misc_feature (2009)..(2009): n is a, c, g, or t
  misc_feature (2014)..(2014): n is a, c, g, or t
  misc_feature (2133)..(2133): n is a, c, g, or t
  misc_feature (2135)..(2135): n is a, c, g, or t
  Peptide Sequence Number=SeqID_9376
  Probeset Number=SeqID_11544
acgtgatagctacggctggcatttcaccacaatacgctcatgtgtcagctcggcatgtacgatcatccatacgcgtgacgtgcgctgagcatcgtcgtcgcatgcctatacgncgttaatcntgtcatgcatanctcaacagtcagtcntgcgctcgtagtcgcnaatctatgnctnacaaactgctctcgggagtacgcgtcgtgcgtcggtgncgagtacgttgcgtactgngcagtaaagtagacagtgnagcacgatgacnaagcagagcgcgtgatgcgacatagagtacatcacgacttgtcgcatactcggtatacagatgataacactactaagctgacganactgtagtagtaatatgcgatggctcgtacctatacgatacatttcatatatcatcatcgacnattcctagatatantcatatcgtanttgacntcgatactgcatngntgtagagtatntctatgcactatacgagaaacagtagtgtctactcgagggctctacatgatatataganggtcgnatacggcgtgcgccttattatgtaccatgtcattanctttacgatgattcaacgtatacgtagagncngcgtatctatcagactacgagtaccaattactactcgtangatcanctcgcagnacntacgcgaatntccactacatagtgtactagatgttcacggatcttcagcacgcagtatgtgcctcacagctcactacgctacaatcatcgctgatcagctactcgctctcntccacgcactccagtacttccgtatcgcacactctacgtacgcatggagtagacgacttacgcaggtcccccgctcagtatgtcgcatatagtctggcgtatacgtatgctgtcattacatatcttcggcccatagagatgatgtactgtggtnctacgcacgagtcagtaccgtaatacaatcactctatgatcgtcgtagcagcatgtacttgtcgctcagcgcaacggtcagacagcacntgtgagcatgcgtatacacgagagctctatcacagncgtcacgcgcatttcctcgtatctgcacgcgcgtatctgatcatccctgtgatatacgtgcgctgtcatcgctactcagcgatgtgtcacgtgcatcatcagttcattgcggtccgtcagcgcgcgtcgtctcgtagcggctgttatcgtctcatgacatgtccgacagtatcgtcacatctccagtactcacgtctagtcgcgaggacgcgtgcatcatgctcagtatctcnttcgctgtgtttctagtatnaatccagtacgattcgtatacgattctacgtgctgtgataggaataatagtaatgatggcgtatctatttcatgagagtactgatatcgatatgtgtatgtattgtgtcgcgcagcgctncatggcagccctgcgtatgcgtgntgattagagaaatacaatcaacctattcgacttcacgcatctcgcatatatactatgagtgcgggcgggagaatctacattacgacagtcgcatctaccactctcatctcgcgcgctcgcctcacgacacnagcggcacatccttagctcatacatgatactatagacgcgaacagtaggcagacataaaggagactacaacttacaccgcactaacagtatacaatgaccgcttgcgtctggcgtcgtcagcgccgctgtagcgtcgcgtttatacgcacacttaccaatcgtttgagcgattgttgatgcgttgtggtgtgagtatcttcagcctatcacattttctctcgatgaccgcatacgcaacagntctcgcacggtcatgtctagctttggtcgctngggagatatagatagcaaactacttgtccctcgcacatattgctgtcgntcttactcatttagatgtgacatagcctgacgctgtaagattacagctgccacattaagttcatcgagaggtgagctagcgcatagatgaaaaacttatgtagcttgnagtancgggctccgtcgacacgccacacgcgtgtcagaggtggaggaaacaaagattgtagccgacgtctgtctgcttcgctgctgtagacacgtcgcctcgcgaggcgtgtgcgctctccgcntncctcctctcctctgcacactctcctcgtacacccacactcaccacaccatacgaatatatatatataggtatagatggctatcgaggaggtgtgcgtgtctca

SEQ ID NO: 1766 - DNA, 1383 bp, Glycine max
  misc_feature (30)..(32): n is a, c, g, or t
  misc_feature (40)..(41): n is a, c, g, or t
  misc_feature (101)..(101): n is a, c, g, or t
  misc_feature (180)..(180): n is a, c, g, or t
  misc_feature (796)..(796): n is a, c, g, or t
  misc_feature (945)..(945): n is a, c, g, or t
  misc_feature (964)..(964): n is a, c, g, or t
  misc_feature (1270)..(1270): n is a, c, g, or t
  misc_feature (1337)..(1337): n is a, c, g, or t
  Probeset Number=SeqID_11545
ggtccttccccttttttttttatttttttnnntctttctnnccctttattttctcctctcttctcctctattctatctataattaatataataaacgatanctatagtctacattattagtaatagaaaaaacgacaaaatgggaggaagtgaaattagaaagatacaacaaaaacaacnccctctccctctctctcccactaccctcaatctctcgatatttattctaccctaatataaccaacttttatttaatattcttcattattaaatctacactcattaatctctcaccactctatcaaattcaacatatcaagtttatacatcacccctcctactcaacaacaagaaaatttacccggactccaggagattgatagacgcgctcattatcctgtcgcctccccgccctcttttgaacttcccttccccctctctttctttactttatataagacttacaatacggaattgtgagtatcagagaagcatctttcctctcctactcatatatctacaactcaccgttctacatataaaaatcactaaccataaagttgacgagatgaagatatatagaatgcagtataactaaaaataacgacacactaacaacatatacaccacaatctatcttttacctgtcgccgttactcctatatagcacttcacacgcataacgactacgcaactatcatacatcatggctcaatgctcaaaatataaaaactccgtaccgtgacaatatcacaacacccacaacactctaacaatatattaattgtcgcctccncacatataactagcgccacctctcacaaatatactaactcatactctggctctcgtcttatctccgttgctggactactaatatattcactatacacgcccatctccacgagctgttgatactatacgcgcaccacgtacacataccanacatctaactactactctntaccaccctaacctatcacacacacgcctctatcccacacctcaaattctcacgataatcaaaactccgcgacagtattatccgtctcgctcgcctctttaaaagataacatgaaatataatatctccttctcatgcttaccctcattatatatataaaacaatataaactttctattctcacatcacactctctgtcccacatcgactgtcacgacaccacgcacaacacacacacataaatcatacacacatataatatcacctcacatctccatcttatttcattctgtctacttctaacccncagcttcattgcgcatacttactctgatctccctcttttcataccactcatcctctctagcgcattnctcctctatatctctctctacactcacatcctcactaccttcactg

SEQ ID NO: 1767 - DNA, 370 bp, Glycine max
  Peptide Sequence Number=SeqID_9377
  Probeset Number=SeqID_11546
tgctctaaaaaaggcaggacagatggaatctggaaaagtggtccttgttactgctgcggcaggaggaacggtgcaatttgctgttcagctagcaaaaataccatgaagtacaggggttgcaacttgtggagggggagcaaaacccaagctcctgaaagatttgggagttcacatagttatagacgatcatagcgacgatgtaaaaactggcctaagggaagagttacccaaatgtattgacgttatctatgactcagttggcggcgacacgatcaactcgtgcttgagtgcggagcatgaccatgaacgacatatgggtattaacatgatggctaagtgtacaggagacaacgcttggactccatccaac

SEQ ID NO: 1768 - DNA, 248 bp, Glycine max
  Peptide Sequence Number=SeqID_9378
  Probeset Number=SeqID_11547
gggggggggagtttcgggaaaggtttcatgccgttcatcctcatcgtggacccgccggtccccatgttgcattctttgatatcaacatggaagggttgcatggcatccaaggaccagtatatgtgggaggtgggtgtgtcttcagcacacaggcattctatggatatgatgcccctacatcgaagaaagcaccaagaaggtcatgtagctgttggcctaaatggtgctgctgtctgtgttgtgcatct

SEQ ID NO: 1769 - DNA, 1499 bp, Glycine max
  misc_feature (1)..(1): n is a, c, g, or t
  misc_feature (3)..(3): n is a, c, g, or t
  misc_feature (30)..(30): n is a, c, g, or t
  misc_feature (84)..(84): n is a, c, g, or t
  misc_feature (110)..(110): n is a, c, g, or t
  misc_feature (204)..(204): n is a, c, g, or t
  misc_feature (368)..(368): n is a, c, g, or t
  misc_feature (435)..(435): n is a, c, g, or t
  misc_feature (560)..(563): n is a, c, g, or t
  misc_feature (716)..(716): n is a, c, g, or t
  misc_feature (950)..(950): n is a, c, g, or t
  misc_feature (982)..(982): n is a, c, g, or t
  misc_feature (1268)..(1268): n is a, c, g, or t
  misc_feature (1273)..(1273): n is a, c, g, or t
  misc_feature (1277)..(1278): n is a, c, g, or t
  misc_feature (1454)..(1455): n is a, c, g, or t
  Peptide Sequence Number=SeqID_9379
  Probeset Number=SeqID_11548
ntnagtagcgcgcgacacagcgcgcgaagnatgtaggggagtgatgagtgtatataggtgtcgaggcgctgtgttttatcgccnggtgatcgacgcacgcgagctcgcgncgcgcagagttaatataatagatagagatatatagagacggaacagacacacagcgccagaacaactcaatgtacgacgccgcgacacgtaacntagtgaggccacaccacgcgtcggtggttgtgtgttccgcgcccgagtgtttggagcgtcgcgcgatagtaatattgacgcgcacatacaatcagctctctcaattaacatagaggctgagtggagtattgcgcaagataatatatgtgcgcggcagagaagancacaaatgcgtcttcgcgacgcggtgtttgtagtggagggcgtgaggagagacgagacgaacagggngggtggggagcaggaatacaacaatatataaacgagtggtggagagggagataaatatatagtgacattaataatactccaccacaccacacgcgccgcgcggtatttcgcggacgtcgtcggtnnnncccgcaattgaaatatgcagcaatacgagcaaccaacagagcgatatacgaagacgagcacgccggtagagcgccgcggcggtggtgtgcgccgcggagttatttataggccgccacccacacactattacaccaaaaccaccgccggctttntgtgccagcacgtgtgtggtgtgcgagtgaattatggtagtggacaggagggatgtgcgatagtgggagttatggagagcacataagcgccaaagtagccgtgggacgcgcgacggcgcgacgcggagcggagcgccaagcgcgctcggcagcggaatatgccgctgtctatatatatcaacccctcgaacacatgaaggataggcgcgcgggggtggagagactactgcttcnccgccgctgatgtattatattcttggcgctcncgcgcacccccgcgggtggccgcgcggttatttcataactacacaagcgtagttaaaaacatagagtattactagtatagtgtatccattttaccactccatatctcaccatatattctccgcacatattactatcacgcgccctatattcatctattctaccatgccccacttattatatctgttcatccgcaatctctcttctctcgcaagatatatattagggaatattacatactatgttttactgcgcttgtattatacacctctttatataacgaattancacantttnngcgagggctcgtagcgcacgccgcccgtggcgtggggaggggtagagagagggagggtgggtggggcgggggcggaggtagtatacagttggcgacgagggagtaccgtgagcgtggggcggcggcgtggtcttcgcgcgggtgcgataacacacgcggttgtagtctcacccccnntctactccctcctactaacaacaatcattctctttctcttttct

SEQ ID NO: 1770 - DNA, 622 bp, Glycine max
  Probeset Number=SeqID_11549
gttctatccggtgatttattctgtggacgctagacttcctagtgtgtccattgatgatgctcgtctttgcaaaccgggaacacttgatcctaccaaagtaaagggaaaaatactagtctgccttcgaggtaataaattaactccagccagtgagggtgaacagggtaaactcgctggctctgcggcagttgtagtgcaatatgatgaccagaatgatactttacttttggccgagaatcatatattacccgctgcaagtataagtggaacgggaagtcatcatattaaaaacggatcatgcaactctggccttagcaaggagattgtagcttacttgattgctggagaaacatatataggagtgaatccacgtccgagtatgagaggattctcatctagtggttccagttccattcaacccttggtactgacggcggacatgactgctcttgggtgatcttagtgctgcgtttacacaacgagctggtgccgtgctatcatccattggataccaccgatctctcttgatgtgtcagcggggacttctatgttgagacctcatgtcgatggcgttgagtgtctctcgaggctatgtatgcttacgtggaagtccagcatcgtc

SEQ ID NO: 1771 - DNA, 1819 bp, Glycine max
  misc_feature (29)..(29): n is a, c, g, or t
  misc_feature (31)..(31): n is a, c, g, or t
  misc_feature (34)..(34): n is a, c, g, or t
  misc_feature (43)..(43): n is a, c, g, or t
  misc_feature (64)..(64): n is a, c, g, or t
  misc_feature (237)..(237): n is a, c, g, or t
  misc_feature (288)..(288): n is a, c, g, or t
  misc_feature (327)..(327): n is a, c, g, or t
  misc_feature (393)..(393): n is a, c, g, or t
  misc_feature (425)..(425): n is a, c, g, or t
  misc_feature (476)..(476): n is a, c, g, or t
  misc_feature (507)..(507): n is a, c, g, or t
  misc_feature (529)..(529): n is a, c, g, or t
  misc_feature (665)..(665): n is a, c, g, or t
  misc_feature (751)..(751): n is a, c, g, or t
  misc_feature (833)..(833): n is a, c, g, or t
  misc_feature (835)..(835): n is a, c, g, or t
  misc_feature (927)..(927): n is a, c, g, or t
  misc_feature (973)..(973): n is a, c, g, or t
  misc_feature (1184)..(1184): n is a, c, g, or t
  misc_feature (1456)..(1456): n is a, c, g, or t
  misc_feature (1517)..(1517): n is a, c, g, or t
  misc_feature (1690)..(1690): n is a, c, g, or t
  misc_feature (1700)..(1700): n is a, c, g, or t
  misc_feature (1706)..(1706): n is a, c, g, or t
  misc_feature (1794)..(1794): n is a, c, g, or t
  misc_feature (1796)..(1796): n is a, c, g, or t
  misc_feature (1806)..(1806): n is a, c, g, or t
  Peptide Sequence Number=SeqID_9380
  Probeset Number=SeqID_11550
agagtcggactcatgcgcacgcacggcgngngancgtgcatgncacctgagatgtcagtcggtnggttcgcgtgtgtacgatgagggcgagcgccgatataccatagactcgtctatatacaagacagtctatctgccagtatctgcgtgcacatgtgtcgcgtcgctgcctcatctgctcgcgtgactcgcgatcagcgcgtatacagtgtttgcgtagacgtcgtaagctgtatngtcgtagagcagtcgtcgagatcgctgctgtgtgagtcatcacgaacgatnatagatctatcacactagtcatgtctccgtcgctggtantcatacatgctactcgttcgtctatcgtgtcactcgtaatacataatgggtgaacgctgttgtaancacacaagcatggtgtcagtccacggagtctngtgccgatatagaaacgaagtaactcagacgcaacagcgtggtcgttctgngcatacgctactcgatataccaacatacacntctgtctatcttacagtctcanagatggcgctaacggcgtgacgagaggcaggattactgtaccagccgtcgcgggtctgcctgtgtgtcgtcacacgtggatattgctagagtaatgagagatagtacgctcgcgagagcacgtcggcatgatgtantgataagtgacgtaacagtatcagccatgtcttagttatcgtccgatcgaagcgtcaataggtagatagtggatgctgatgatgtntgcgagttatatgatgtactatcgttcactgtatggagacgtacatgcagcagtacgcattcagcagtagacactgtgtgtnantgtgccaacatgtaacgctcgttactctcggcatcatattgtcactaaaccgttttcgatacactgttatgtctatgcacgcgatcggacgnccatgatactgctctcatatactgtgaagtatatcactcaacgcgnagccgcactctgagcgcgcaggcggcgggctcgatgctaattgatgtctctcaggaccctatcctagtgggcgtagggtggagtttgcggcagacgaagccgcgttcgagtattcttctactcagtggcaccggcgcgccactccgtgtgagtggtaggtacttacgacatgtcgatgagagtcttattcgtattgtctgtagctggtctnattgtgcgttgagaaatctcattaatcatacgtcacgtcttgctctctcactcccttctattttaacattgcgatagagcgcgggtgaatagacgagagtcacgatcatatgaatagatcggtgcattgaggatgtgatatacgctctcatatctgtcctggtcgatgtcgcgtcatttgtcttgttctcatatgtttgtcatttctgcttctcgtgcccttatataattagtatatctataacaaacacactactaatcgctgctccgcgnttggccgcagagcgaagaatacgcagcggcgctctctcacttgatctacgtggagcatcancgtggcttcggtctctggtcggacaatgtgtcaaatagtatgagtatcacgacgagcacagacatacgataagatctatccggtctctggttgtatatatgtatgtacagtccctagcgtgccgagtcgtgatcacgagtgtcgtgtcgacgtcgtatatacaaagcgtcatncaccaccgcntcgcgncgtaaaatgagcgaatctaccaccttagtacggtggcctcttgctgcctcgtgtctgtacttaacagctctggcaatcgaacatacananttgaggcagngtggggatgggat

SEQ ID NO: 1772 - DNA, 1451 bp, Glycine max
  misc_feature (17)..(17): n is a, c, g, or t
  misc_feature (77)..(77): n is a, c, g, or t
  misc_feature (81)..(81): n is a, c, g, or t
  misc_feature (104)..(104): n is a, c, g, or t
  misc_feature (181)..(181): n is a, c, g, or t
  misc_feature (209)..(209): n is a, c, g, or t
  misc_feature (241)..(241): n is a, c, g, or t
  misc_feature (244)..(244): n is a, c, g, or t
  misc_feature (528)..(528): n is a, c, g, or t
  misc_feature (753)..(753): n is a, c, g, or t
  misc_feature (964)..(965): n is a, c, g, or t
  misc_feature (1126)..(1126): n is a, c, g, or t
  misc_feature (1375)..(1375): n is a, c, g, or t
  misc_feature (1386)..(1387): n is a, c, g, or t
  misc_feature (1416)..(1421): n is a, c, g, or t
  misc_feature (1444)..(1445): n is a, c, g, or t
  Probeset Number=SeqID_11551
cttagtacagtagcacncataataacgcagcatagaagcgctctactaagtccgtcgccatgctgtgtcgcgcgtanagcntggatctgagtgcggcgcaccancatatagtctacgtgcgactgtacaccgttgcatgtcctagtatcgcgatgtgtataattcgatgatcgatgtatgncgcaagaacgttagcagcggaccatcgntcattagaacaaacagagcgcgaaagacgcanagncgcgacgagtagagcatgtatgcatcagtatattatggagctgaacagaatagcggaagacgtcatcggcacatattatctacgccgtctttatgtatagggtgagcagtagattatgataggaaagtatagtgagcgggtcaacatcacacagaggtacgcgacactgattcgatcacctacatgatatgcacgtcttcagccgtatgcgaccgggacgtgctaggcaaccgcgtcgtgtgttgtcgtgtgtccgggccgggagcgcgccgaggcgtagtagnagggtagaagtagcactcgggtctcacacgccagcgtcgatgtgcggcacggggcgcgcgatgcgaccatactatatgatgttgacgcgccacccagcctcactaaatgcaccagtacgacagcgcacgccaacaacgacacgagaaacaagcgagcacacgcattgcaccgcagacatgtcataagcacatctccatatacgtccctctctacatatacataanctgctaccactacacagcacatccatctctcacccgctttaccatttattcatatcacacactctccaatcaattttcgatattgtagtcacactccaagcttcctattaagtatataagacacgaaaattaacgatagagatgaagagagcgcgccctcctgatgtgtgggaatgatagtgttgatgtagtgtggcattaaattaggtgnnatgatgtcttattgctagattgagaaggagaagagattaagacgcgcggtgagtatcatacatctccgacggcagagatatcagagctgttcctacacggcgaatattaatgagatctataaagacacaacacaactcatccacataccaccatcaacgcnccacgcggcagatagagagcagtatgcacccatatctacatatatgtattatggtggttggagagaggctaggccacaccacatgcggcgaaagggcgaaggagacgatcccaacacatcgtaagagtatcaccctcgctctacgtgtcgtcagaatccgggcggggagcggcggcccgcgacatacaccccgctccagccccggcgggcgtgcgcgtcggccctccccctatcatttcggtacaacangggacgagggnnaagagaaaagataatcagtgtgctatcannnnnncccttctcacatacccccttttnntttttc

SEQ ID NO: 1773 - DNA, 442 bp, Glycine max
  Peptide Sequence Number=SeqID_9381
  Probeset Number=SeqID_11552
gcacgaatatcttgttgtttggagcgatccgagaaaaactctgtaaacatgttggtttaccaggacctccttacaagtgatgagcttctctctgactcctttcgtttcaaggaaattgagaatggaatgctgtgggaagttgaggggaagtgggttgctacatgttcagcatatgaatgctcttaggccttcacagtctgctaactgcgtgaggaatggagaccgatcttctatggcatcaatccattgtcggcattctagtatatttgaatacgagaggctacaatttcctagaaattgtgtcggtgtctaaatcggtgattgtttttcaaaattttgagaatgctcagttttttctgtagtgcaaccgtccaagtttgaatgaatcaattcgtattgtgtggtcctaaatcctgatagtcagtacgtgttgtcttttttt

SEQ ID NO: 1774 - DNA, 530 bp, Glycine max
  Probeset Number=SeqID_11553
aagagcacttgcgaatcacttgcaccaccaaacaagctttcttaccgagagttgttgtgtttgtgcacacatagcatacttcagctagaatccatggcgaaatgctggctgctgctccagttcttggcgttcctcttgccggcggcgagtgctacgtcgtgccacaccgacgacctccgtgcgctgcagggcttcgccgggaacctcagtggtgggggcgtgctcctacgtgctgtctggtccggtgcctcgtgctgcggctgggaaggtgtgagctgcgacggcacaagtggacgcgtcacggcgcttcggctccccgggcacggccttgtggggcccatccctggagcatccttggcgggcctcgcgcagctggaggagctcaaccttgccaacaacaaactggtcggcacatcccatcatggattggcgagcttgatcacctttgctacttggatctctcggataattcattggttggcgaggtacccaagagtttgatacggctcaagggtctcgtcatcgttggt

SEQ ID NO: 1775 - DNA, 1583 bp, Glycine max
  misc_feature (1)..(1): n is a, c, g, or t
  misc_feature (15)..(15): n is a, c, g, or t
  misc_feature (25)..(25): n is a, c, g, or t
  misc_feature (35)..(35): n is a, c, g, or t
  misc_feature (57)..(57): n is a, c, g, or t
  misc_feature (61)..(61): n is a, c, g, or t
  misc_feature (65)..(65): n is a, c, g, or t
  misc_feature (91)..(91): n is a, c, g, or t
  misc_feature (163)..(163): n is a, c, g, or t
  misc_feature (190)..(191): n is a, c, g, or t
  misc_feature (199)..(199): n is a, c, g, or t
  misc_feature (204)..(204): n is a, c, g, or t
  misc_feature (214)..(214): n is a, c, g, or t
  misc_feature (261)..(261): n is a, c, g, or t
  misc_feature (289)..(289): n is a, c, g, or t
  misc_feature (291)..(292): n is a, c, g, or t
  misc_feature (296)..(296): n is a, c, g, or t
  misc_feature (306)..(307): n is a, c, g, or t
  misc_feature (313)..(313): n is a, c, g, or t
  misc_feature (320)..(321): n is a, c, g, or t
  misc_feature (324)..(324): n is a, c, g, or t
  misc_feature (327)..(327): n is a, c, g, or t
  misc_feature (347)..(347): n is a, c, g, or t
  misc_feature (349)..(349): n is a, c, g, or t
  misc_feature (351)..(351): n is a, c, g, or t
  misc_feature (354)..(354): n is a, c, g, or t
  misc_feature (364)..(364): n is a, c, g, or t
  misc_feature (376)..(376): n is a, c, g, or t
  misc_feature (383)..(383): n is a, c, g, or t
  misc_feature (395)..(395): n is a, c, g, or t
  misc_feature (405)..(408): n is a, c, g, or t
  misc_feature (426)..(426): n is a, c, g, or t
  misc_feature (434)..(434): n is a, c, g, or t
  misc_feature (450)..(450): n is a, c, g, or t
  misc_feature (452)..(452): n is a, c, g, or t
  misc_feature (461)..(461): n is a, c, g, or t
  misc_feature (470)..(470): n is a, c, g, or t
  misc_feature (480)..(480): n is a, c, g, or t
  misc_feature (483)..(483): n is a, c, g, or t
  misc_feature (504)..(504): n is a, c, g, or t
  misc_feature (513)..(513): n is a, c, g, or t
  misc_feature (528)..(528): n is a, c, g, or t
  misc_feature (536)..(536): n is a, c, g, or t
  misc_feature (538)..(538): n is a, c, g, or t
  misc_feature (547)..(547): n is a, c, g, or t
  misc_feature (554)..(554): n is a, c, g, or t
  misc_feature (559)..(560): n is a, c, g, or t
  misc_feature (580)..(580): n is a, c, g, or t
  misc_feature (604)..(604): n is a, c, g, or t
  misc_feature (607)..(607): n is a, c, g, or t
  misc_feature (615)..(618): n is a, c, g, or t
  misc_feature (620)..(621): n is a, c, g, or t
  misc_feature (624)..(624): n is a, c, g, or t
  misc_feature (627)..(627): n is a, c, g, or t
  misc_feature (629)..(630): n is a, c, g, or t
  misc_feature (634)..(637): n is a, c, g, or t
  misc_feature (641)..(642): n is a, c, g, or t
  misc_feature (645)..(645): n is a, c, g, or t
  misc_feature (647)..(647): n is a, c, g, or t
  misc_feature (657)..(658): n is a, c, g, or t
  misc_feature (671)..(671): n is a, c, g, or t
  misc_feature (700)..(700): n is a, c, g, or t
  misc_feature (702)..(702): n is a, c, g, or t
  misc_feature (742)..(742): n is a, c, g, or t
  misc_feature (764)..(765): n is a, c, g, or t
  misc_feature (793)..(793): n is a, c, g, or t
  misc_feature (797)..(797): n is a, c, g, or t
  misc_feature (799)..(799): n is a, c, g, or t
  misc_feature (858)..(858): n is a, c, g, or t
  misc_feature (880)..(883): n is a, c, g, or t
  misc_feature (888)..(888): n is a, c, g, or t
  misc_feature (907)..(907): n is a, c, g, or t
  misc_feature (918)..(918): n is a, c, g, or t
  misc_feature (925)..(925): n is a, c, g, or t
  misc_feature (929)..(930): n is a, c, g, or t
  misc_feature (941)..(941): n is a, c, g, or t
  misc_feature (971)..(971): n is a, c, g, or t
  misc_feature (976)..(976): n is a, c, g, or t
  misc_feature (1019)..(1019): n is a, c, g, or t
  misc_feature (1501)..(1502): n is a, c, g, or t
  misc_feature (1552)..(1553): n is a, c, g, or t
  Peptide Sequence Number=SeqID_9382
  Probeset Number=SeqID_11554
ngcgtggtgaggatnttcgctcggnctgtgtgctntcggtgagcgtggtagggacgncatntgtncgtacggactgcacactctcaggccncgtgagcgcgtgttgtctgtctctcgctagtcgtgctagcgcacgatgggtagcacgcgagagcatgtactncgcgaagcctgctcgcgcttccactcnnctctctcngttgntcgtaggtgncgtatcgcaaatccgcacacctcatcctatccacataataatcgaanacgactacaatgtgtgtcgaactgatananngggntcgtcgtacnntctatntagtggnnctntancgttagtcaatcattctctntncnatncacacaagtngtgtgtcgtctntgccttntatcatctcatnatctattcgnnnnaatgtatctgtctcgtancaccgctnttaaatctgagcacangnattgggggnaggaccgangagctgagangcngattattagtcttccctctancctcccctncatacacacattctntcattgananactcgatanaaacacnctcannatggtctcatagttgtacgnggaccatctatcatctcatcatcntcncggcaagnnnngnngcncananntgtnnnngggnnggngngagcactggnncggggggggtgtntcattatcatacacacacacatcacagananatatctctctcaaatcactcaaccccacacaacagaccantctatcctacggttattttttnnttttttaggatacataatattcagtttntttntntcaaaactctcatactcatatatcctacttatcgcacactccctcgctctgctactacncacctataatatatccatatannnnctacntactataattacttacatnacacctcatanaaaattngatnnatatatgaggnactcttacctcttaccacccatatgagtanggatnttatacacggctgtactcacgtagggcaggactacggataatntatcattacttacaactagactcatgactatccaaaagtcactcacaccaaccctcttctagacacacctagtccactcctatgtacataggctacacacacacttatgtgtaggcgcttaggaaggatctacagtagtctatgtacacgttgcgtagacagcttccacgacttctcgttgagtatctaccttccgtgttcagtacatgagggttttgatgctatggtggatggtataagtaatcatccgcaaattcggatggaatgcgtagatttacacgtctgcgcttcgctgctgacacacgagtagtggtgtatacgaaaatatttccatcaatcgacatagttgattgacagatgtcggtgctggggtacataagacaagagagacgtggtgaggtgagacgctgttagttcgcataacatcgtgtctgacccttcggaggcggcggggcggcttcgttctatctccatatttcgannccaatttctctattatggtgaggaggaccatgaaacacactacatacganntagggggcacggcggagagagggagaaaac

SEQ ID NO: 1776 - DNA, 436 bp, Glycine max
  misc_feature (22)..(22): n is a, c, g, or t
  misc_feature (75)..(75): n is a, c, g, or t
  misc_feature (93)..(93): n is a, c, g, or t
  misc_feature (99)..(99): n is a, c, g, or t
  misc_feature (111)..(111): n is a, c, g, or t
  misc_feature (123)..(123): n is a, c, g, or t
  misc_feature (141)..(141): n is a, c, g, or t
  misc_feature (218)..(218): n is a, c, g, or t
  misc_feature (242)..(242): n is a, c, g, or t
  misc_feature (380)..(380): n is a, c, g, or t
  misc_feature (390)..(390): n is a, c, g, or t
  Probeset Number=SeqID_11555
gtctgtgatgagagtatcaaanacacgagtctcctgatcgtcgcgtctatgtcgatccgtttgcttcagtatcgnttcatctcttcgtgtgtntcgatntcgattcatctnctcgcaggcgtnacaacatgcattgatacnacgccattagagatcaatcattcgaattttttttctcatctcctatgttctattttctgatctgaaggccagttgcnccgtggaggtgcgactgctcaagnctagcctcctccctcctcatggatcgaaccttccttatgcttcactccaagccttttgttcaaggaagctttaatgtgtttggctggagacttctcaggaaaggccatcggaagagtactgttcaaggtgtggaagtnctcgccgganagggagaaacaccggaagcaagaggactcgatcagccatgtctcga

SEQ ID NO: 1777 - DNA, 1440 bp, Glycine max
  misc_feature (181)..(181): n is a, c, g, or t
  misc_feature (228)..(228): n is a, c, g, or t
  misc_feature (534)..(534): n is a, c, g, or t
  misc_feature (643)..(643): n is a, c, g, or t
  misc_feature (662)..(663): n is a, c, g, or t
  misc_feature (680)..(680): n is a, c, g, or t
  misc_feature (702)..(702): n is a, c, g, or t
  misc_feature (800)..(800): n is a, c, g, or t
  misc_feature (998)..(998): n is a, c, g, or t
  misc_feature (1261)..(1261): n is a, c, g, or t
  misc_feature (1264)..(1264): n is a, c, g, or t
  misc_feature (1268)..(1268): n is a, c, g, or t
  misc_feature (1331)..(1331): n is a, c, g, or t
  misc_feature (1335)..(1336): n is a, c, g, or t
  misc_feature (1340)..(1341): n is a, c, g, or t
  misc_feature (1363)..(1364): n is a, c, g, or t
  misc_feature (1370)..(1371): n is a, c, g, or t
  misc_feature (1375)..(1376): n is a, c, g, or t
  misc_feature (1380)..(1380): n is a, c, g, or t
  misc_feature (1382)..(1382): n is a, c, g, or t
  misc_feature (1405)..(1405): n is a, c, g, or t
  misc_feature (1409)..(1410): n is a, c, g, or t
  misc_feature (1415)..(1415): n is a, c, g, or t
  misc_feature (1418)..(1419): n is a, c, g, or t
  misc_feature (1423)..(1423): n is a, c, g, or t
  Peptide Sequence Number=SeqID_9383
  Probeset Number=SeqID_11556
caaacacatctcatcgcacacatacacatagtacacacgaacagtgaagcttaagcatgtatagtctccatactatactgctctatacacctcaacaaaacactacacaaaaacacgtacgacgctctctctacctatatagtctcgagttatcagcgctgacacaagtatgttggagtgnacgatgtgagtgcgcgctgcagtgtaatattaatgatgaatgttgtntgtataagatgattactgttgactcatactaagattatgaaattttatcatcacatacaatatacttaccactagcataagcatcactgcggtcttgtatatactactagtagggtatacgtcataacaagggacactctctcgcacccacaacaccacgtcaagtcttgtggctgtcctcgtcagagaaactacacttgcacttgatagtcaattgaacactaaaacaatatgatagctagtgtcgtggcacggcataaggtggggtagtgatagatcgcgtcacatacacactctcacacccanccgcactcacacactggctctgggttgtggtggtagtggcgtcgccaaaacaacacaaccacacccctcaacacatataacgaccattaacgcgacggttgaaggatgngtgcgtgggggggtgtttnnaattcctctctcctcantctcatacgtatacttacccancaccacttaccaccactcacttcactcacactcctctctcctctcaacttgacatgcacctacacccactcaccccatttccacacccgctattatantcctcattcaacacctaaactaacacgaccacacacttccctcacccaccacacacccacctccatctaatcactaatcgctatctacgcactcccatgcagtgattataaattaaaattatccctttctgttttttgtttatgtggtcctatccttccttccttttactacacttcagactaattcttggtgtgttntgtgccgcgcgatctataggcatgtatggagacacacataaactattgttctttcttatgtagactgaagtaacatcagactagatgttggggattataaagtaactattatcctactactcgagctcgctgcaggtgttgtggtcttggtcggcgtgtgaggtccctctagcagataaataagtcagaatatatttctctaatttgtgtgacgcccgggccctctgcacacaaaacaattattatactttcattagttaatnagntatntgggggacgaactatcatcacaatagtattaggaaccccagacaaggcgtttgtgttcttgtngagnngggnngaatttctcccttctttcctcnntctttnngttnnattntnagagatcacgcggggaactgcangggnnagaangannagangccacaaccacacacca

SEQ ID NO: 1778 - DNA, 427 bp, Glycine max
  Probeset Number=SeqID_11557
aatccctatgaaatatggaagagtgggtgtatctggacctgaacaattgcctgaagaagggagacttcctgatgctgggcccccttcaactgctgatcatttgcgtcaagttttttaccgaatgggtttgaatacaaaggaaatgttgacttttctgtgcacacacacttgggcgggcttaaacccatatccaattgttttgggaaaacctgaactccatttccaaaagaggggcccgaggcaccccgggaacaacctctggcagagccatggttgaattttccaccccctcttttaagggcctccaaaaaaaaaaggtggaaatctttttttttgtcccaccatgcgtccttttttttataacaccccctttagataattttgtgaaaaaaattttgaaaaaaaaaaaatttttttaataaatttt

SEQ ID NO: 1779 - DNA, 1485 bp, Glycine max
  misc_feature (55)..(55): n is a, c, g, or t
  misc_feature (381)..(381): n is a, c, g, or t
  misc_feature (715)..(715): n is a, c, g, or t
  misc_feature (1046)..(1046): n is a, c, g, or t
  misc_feature (1071)..(1071): n is a, c, g, or t
  misc_feature (1283)..(1283): n is a, c, g, or t
  misc_feature (1457)..(1457): n is a, c, g, or t
  misc_feature (1460)..(1461): n is a, c, g, or t
  misc_feature (1466)..(1466): n is a, c, g, or t
  misc_feature (1470)..(1470): n is a, c, g, or t
  misc_feature (1472)..(1472): n is a, c, g, or t
  misc_feature (1485)..(1485): n is a, c, g, or t
  Peptide Sequence Number=SeqID_9384
  Probeset Number=SeqID_11558
cgccgcgtgcgcatgtgtgatcagaggggtaggggatatagtctacctctggctnctcaccgtcgcggacgcgcttcatccctcaccacattctatagctcgccctgttcctcatctcgtggcgaacattacgcgcgtaaggccgtagacaggataggccaagaagagcgtggacggggcagcagtcatatagacatgaacaagctcataacgcgagtggctcgcccgagggcgggccctgttcctcgggtcggcgtgagtgggtgcggtggcgatgcgccagtaggcgacagagtgtgagctcagatccgcagttcatcagaccggaagcggtggtcgggcatcacagcacgaggtcgctatagaacagggtaggcgatnatgaaaaatgtgtgggcgagagcgaacgcgctgcgtgtcatggagtcggagagggcgagatgttaaaataagaatttatttggtaagtctactcgtagtaacatattattattttgtatattagttagtacgtgagtgttccctgagcgtgtctgcgagcgcaggggtgaaggccgagaggtgggggggcagggaacccacgacagcgccactgccagacgatatgtgaggccctatccgatatggcccctcagtttgttatttgatgcgttctctacatcctcttaagtagagctgcactcgcagaggacgtcgctggtgcggcttcgcgtantgtcccaatcatatgaacagcgcgagtgcacagaggcccctcgttttcgtggagagttgctgctattagagcgcactcaggggcacgaccctctcttatatagatccccgggcatcgctctcgctgtgttttttcaggtaagcaaactagcgcgtgggagagccgcacaccataaccgccgagcccaggactaataatcgcggaattcattagacgagagtagagaatataaacaggataaatcgatataggctggtaggcgatgaggtattagataaaaagaagacataataataataatataattcagttgcatcagtatgtgttattntctctttctcccaatagaaactaangaggagagataggttggcgatagtactagtagtgagcggcgcagagacgaggcggggtttgcacgaagggtaggagagtgcgagggtgagggcagtcgtcggggcgtgcacccacagaggcgacctggctgagagttatgttaggtcggagtgtgcgcgctgagctgcgatatactagctgtacaataatttatcattaaatgaacaattgntttgttattatatttcgaaggggtacaagcggaaacaacacagagactccgctggcacgccccccctcgcgagccgccgctagttaatacgcctcccctcgcccgcagcggtcgcgggagactagcaatttttttgctgagggggtggcggagaaagaaaaaagagagaaaaanaannattgntttntnggggttggtttan

SEQ ID NO: 1780 - DNA, 1550 bp, Glycine max
  misc_feature (226)..(226): n is a, c, g, or t
  misc_feature (312)..(312): n is a, c, g, or t
  misc_feature (759)..(759): n is a, c, g, or t
  Probeset Number=SeqID_11559
atccgattcgcgcgtgttctgatgtaactgatgttaatctacatagcgaggtgcgctcgtactacgatcctgtgactgatattaatatacagacatcctggtcgctgtacaagagatacatatgtcccgctgtgtaccgtgcacacgacgtagtcatgtatggttatcggctgtcttactaacccccctctctattcgtactttctgatatattcatgatgtttgnatagtgtagctagacgcgtcgcgctagggtcgacgagctcgcgtataggtcggtcgcttgttgtcctataatatgacacggaagtntgtggtgcgcggcggcataccaaaactcctgcgatattagtgtcgagccaatcagtgacaatgtattatctccagtacttcgccgcggtatatagctcgcaaagtataaatataaaatatgcgacgggggtaatatgtggcagcaatgtgattacatgaaactcgattcgtggttgcggtgattttgtagaagatagaattggcgccggtctgtatagcaacctgccctctgtgggcctaagtgtcggctgtatattctctctcataaatctacaactactcggcaggtgctcacgtactgagacagaacgctatatgatatcatgtggtcatagcgctgtccgcgcgtgttatgttgtcgtgtgttattaggactctccacgctgtggaaatagtttacttattgtctactaaaattgggagggtgtgggtgttaactattcctcncttacttcacttacctcgaaatgaatctctggtgtgctgagtggggtacaatacattgggttggtaggagagcgccgcaccgacattatgttccgtcctccttcgagaacgaaccagtctcccatactatcttattatctcaccttctctatcgctcatatgttttctcgtccaaccttattgctctttttaagtgccgaaaaatcagtgtgaggatctttacgcgtcttgctacttatccacgtcgggtctcgccatcgcggatcttcacatactgttttttacatcacataaattcacaattcgacagccacgcgcgcggttggtttattttactatagcgtaggcgagcgcgcgtatggccgcttcgtatttgcgatcgcttatgttgtggagatgtagtgggtgtgatctattgtggcggagtattcggtgtgaggtgggggctgcatgacagacgaagaaaatataatcgagagctctcatacatgcgtattgtgcgcaggtctataaagcgggatggtggtgtgaagagcagaaggtttctcttggtacacgtgtggtttatgtttgaacgttagatgaataaagagagaccgtgctccttggtgttataaaaatataacccctctctcggtgccgagacgatatccgatcgacctaacctcttctttcgtatatcagtaggcgatgtagccctctctgcgtgcgtgattattatcctgccttgttgtgatgagagtgtaagaggggcgaaagattaggaggggggcgcctctctccaacacgcc

SEQ ID NO: 1781 - DNA, 444 bp, Glycine max
  Peptide Sequence Number=SeqID_9385
  Probeset Number=SeqID_11560
gatttttcttccttggtggtggcacatgtggctggatgagtgggtggatctcggcgacctcgctgctcaaaattgtcgtagccggaggccctggatgctggggctgcttaggcattgagggaggtcacggaggaacaaatttcagcaagactgccaggctaaactatctgtatgtacacagtagagaggtcgttgatatgcttacatcctcttctgctattaagttgcaaaagcaagcacgaagggccacttcgagtcgcttggtgacataatgattttaggagcataaccggcaagcctaccttcagttttagctcgtggtttggaattcctgggaaggtcaatttgttaaggaactctgttggacacatattctccattgtgttgtaatttgttgttgccttgcatacagtgtccaagcttaggattactgtgttttgtggt

SEQ ID NO: 1782 - DNA, 776 bp, Glycine max
  misc_feature (601)..(776): n is a, c, g, or t
  Peptide Sequence Number=SeqID_9386
  Probeset Number=SeqID_11561
agcaagagccatataaccccgaaacccttcttcactctgcaactttcacttcacacaacaatgatgatggcaggtgcagccaaaaccctaaccaatctttgcccctctttcccattcccaaccaaaccccaaaaccaactcaccactagccacgctttcccttccactcgcctccgccaccgtgccatttccgcggtggcgaacgcggagcaacctccactcaccagcgccactgccaccgagggtcagtaccgagtctatgtgctctcggagtcggtcaccttcatccagaaattccgcgacaaaaccatcgtccgtcagtacggcggcgccgccatgaggtccccggagctccaggactccgtgatcgacgacattgtcctcctctcctgcgacgagctccgccccgacctggtccacggcgacgaccccaagatcaactcttggctcggccgcctaaacatccccgccggatttccgcgacgtactccgcgtcaccgacgccggaaccatggagaacgcctccctggtgctcccgcggaaaaataacaaaaccctagtttctctaataaaaagggccgatgccccggccgttgcctcnnnnnnnnnnnnnnnnnnnnnnnnnnnnnnnnnnnnnnnnnnnnnnnnnnnnnnnnnnnnnnnnnnnnnnnnnnnnnnnnnnnnnnnnnnnnnnnnnnnnnnnnnnnnnnnnnnnnnnnnnnnnnnnnnnnnnnnnnnnnnnnnnnnnnnnnnnnnnnnnnnnnnnnnnnnnnnnn

SEQ ID NO: 1783 - DNA, 474 bp, Glycine max
  Peptide Sequence Number=SeqID_9387
  Probeset Number=SeqID_11562
agggttttagaatcttagaaaagcgagagagagagagagagaaagacagcaaccatgttttctggaatgttcatggagaagccagacaaagccgtggctttgaagcagctacggacccatgttgctctgttcggcggctgggttgtggttgtccgtgctgttccgtacatcctctcgtatttctccgattccaaggatgagctcaagctcgacttctaagtctcgattttcagtgttgaagaggtgatatttagatgcactgtgaagcaatgcaagacattgtttttggcgtatttgcaattttctttggacttgaaataaccatgatgtgagacataaaagttattatagtgatgtacttttgctattcgtttgttactttggtttctcatctctcgtatcctttcttctcttctgatttattggaaagagtattatgagcgtggtcgttataaatcatcttaagctttctac

SEQ ID NO: 1784 - DNA, 2333 bp, Glycine max
  misc_feature (1)..(1): n is a, c, g, or t
  misc_feature (18)..(18): n is a, c, g, or t
  misc_feature (29)..(29): n is a, c, g, or t
  misc_feature (69)..(69): n is a, c, g, or t
  misc_feature (102)..(103): n is a, c, g, or t
  misc_feature (106)..(106): n is a, c, g, or t
  misc_feature (110)..(110): n is a, c, g, or t
  misc_feature (143)..(143): n is a, c, g, or t
  misc_feature (168)..(168): n is a, c, g, or t
  misc_feature (256)..(256): n is a, c, g, or t
  misc_feature (270)..(270): n is a, c, g, or t
  misc_feature (308)..(308): n is a, c, g, or t
  misc_feature (311)..(311): n is a, c, g, or t
  misc_feature (314)..(314): n is a, c, g, or t
  misc_feature (355)..(355): n is a, c, g, or t
  misc_feature (357)..(357): n is a, c, g, or t
  misc_feature (412)..(412): n is a, c, g, or t
  misc_feature (418)..(418): n is a, c, g, or t
  misc_feature (452)..(452): n is a, c, g, or t
  misc_feature (487)..(488): n is a, c, g, or t
  misc_feature (525)..(525): n is a, c, g, or t
  misc_feature (527)..(527): n is a, c, g, or t
  misc_feature (545)..(545): n is a, c, g, or t
  misc_feature (552)..(552): n is a, c, g, or t
  misc_feature (554)..(554): n is a, c, g, or t
  misc_feature (630)..(630): n is a, c, g, or t
  misc_feature (639)..(639): n is a, c, g, or t
  misc_feature (671)..(671): n is a, c, g, or t
  misc_feature (677)..(677): n is a, c, g, or t
  misc_feature (679)..(680): n is a, c, g, or t
  misc_feature (684)..(684): n is a, c, g, or t
  misc_feature (721)..(721): n is a, c, g, or t
  misc_feature (729)..(730): n is a, c, g, or t
  misc_feature (775)..(775): n is a, c, g, or t
  misc_feature (796)..(796): n is a, c, g, or t
  misc_feature (799)..(799): n is a, c, g, or t
  misc_feature (809)..(809): n is a, c, g, or t
  misc_feature (814)..(814): n is a, c, g, or t
  misc_feature (819)..(819): n is a, c, g, or t
  misc_feature (821)..(821): n is a, c, g, or t
  misc_feature (832)..(832): n is a, c, g, or t
  misc_feature (871)..(871): n is a, c, g, or t
  misc_feature (878)..(878): n is a, c, g, or t
  misc_feature (885)..(885): n is a, c, g, or t
  misc_feature (905)..(905): n is a, c, g, or t
  misc_feature (939)..(939): n is a, c, g, or t
  misc_feature (947)..(947): n is a, c, g, or t
  misc_feature (1043)..(1043): n is a, c, g, or t
  misc_feature (1057)..(1057): n is a, c, g, or t
  misc_feature (1126)..(1126): n is a, c, g, or t
  misc_feature (1219)..(1219): n is a, c, g, or t
  misc_feature (1433)..(1433): n is a, c, g, or t
  misc_feature (1452)..(1452): n is a, c, g, or t
  misc_feature (1474)..(1474): n is a, c, g, or t
  misc_feature (1513)..(1513): n is a, c, g, or t
  misc_feature (1584)..(1584): n is a, c, g, or t
  misc_feature (1643)..(1643): n is a, c, g, or t
  misc_feature (1659)..(1659): n is a, c, g, or t
  misc_feature (1680)..(1680): n is a, c, g, or t
  misc_feature (1754)..(1755): n is a, c, g, or t
  misc_feature (1757)..(1757): n is a, c, g, or t
  misc_feature (1788)..(1788): n is a, c, g, or t
  misc_feature (1803)..(1803): n is a, c, g, or t
  misc_feature (1854)..(1854): n is a, c, g, or t
  misc_feature (1856)..(1856): n is a, c, g, or t
  misc_feature (1898)..(1898): n is a, c, g, or t
  misc_feature (1902)..(1903): n is a, c, g, or t
  misc_feature (1910)..(1910): n is a, c, g, or t
  misc_feature (1921)..(1921): n is a, c, g, or t
  misc_feature (1923)..(1923): n is a, c, g, or t
  misc_feature (1925)..(1925): n is a, c, g, or t
  misc_feature (1971)..(1971): n is a, c, g, or t
  misc_feature (2042)..(2042): n is a, c, g, or t
  misc_feature (2044)..(2044): n is a, c, g, or t
  misc_feature (2046)..(2046): n is a, c, g, or t
  misc_feature (2054)..(2054): n is a, c, g, or t
  misc_feature (2087)..(2087): n is a, c, g, or t
  misc_feature (2126)..(2126): n is a, c, g, or t
  misc_feature (2159)..(2159): n is a, c, g, or t
  misc_feature (2188)..(2188): n is a, c, g, or t
  misc_feature (2196)..(2196): n is a, c, g, or t
  misc_feature (2235)..(2237): n is a, c, g, or t
  misc_feature (2239)..(2239): n is a, c, g, or t
  misc_feature (2245)..(2248): n is a, c, g, or t
  misc_feature (2250)..(2250): n is a, c, g, or t
  misc_feature (2252)..(2253): n is a, c, g, or t
  misc_feature (2256)..(2256): n is a, c, g, or t
  misc_feature (2262)..(2264): n is a, c, g, or t
  misc_feature (2266)..(2267): n is a, c, g, or t
  misc_feature (2269)..(2270): n is a, c, g, or t
  misc_feature (2278)..(2278): n is a, c, g, or t
  misc_feature (2280)..(2281): n is a, c, g, or t
  misc_feature (2283)..(2286): n is a, c, g, or t
  misc_feature (2297)..(2315): n is a, c, g, or t
  misc_feature (2327)..(2333): n is a, c, g, or t
  Peptide Sequence Number=SeqID_9388
  Probeset Number=SeqID_11563
nctccagactttttaacnacgacgtacgnataatcagcactcgaatcgtaatagtggcgcgtcgtagtntctgagtagctgtgcgatgtaatactgtcgtgnngantatnatttaaagtcgttatacagtagatgcggacacnggtacatagttgtgtacgacagagnagacgtcgatattatatcagatcacatccatcacgtcgcagcatatgtatagtcactcatctctagtatcacggaagagttacctatncaacatcacctgtnatcgtgtatatacgcgtacgtccccacaacgagcgcgntgncgncactactagtaagatcacgtggcgtataaagttagtgtagnanttgtgtcaacagcgatagcgcagcgtagatcatatcgttaactgaacgagagctngcgccnggtagcagctcatgatgatagcatgaatgtatcngcgccatctactccgactgcgcatcatatcatgtnnttactcgacgacagcatctcgtgcgtgtctgtagtantnggtgtacgtatgtgtcgnctttctntnctcatcgtatcactagatgagtgctgatgatcatatcagcgtgctgtgctgtctgcttcgttgatgatgacatgcnctatcttcngctcgcctcatttatgatattacatgatgtgncgacgntnnatcnctcgctcattcagtctatgtcgtcactagattctcanttactatnnaccatcatcactcgtccgctcatccacctcctcatgatgatacgntgatcatcagtgcacgcagcncgngcgtcatacntcgcncaatntntacttcatcangtacagactgagagcggccccgagtcgtatgcatgagtnatgagantgagtancagaaacttcactgcgagcntctgatatcgactaggtgcatgtcatacatactnacttgcancacgactgcacgacgacgtccgatcggtcccatcgcatacactacatcgccgcactctgcatctacctcatacatagtaaagaagtaccgagtatncgagagacgcgacngagagactgagcagcatcacctacacgcgtcgcacgagcgtagcacgcgctcgtagcttagtagttatnttaatagtgtatattcaatatgatgtacagatcgctccgcgcggcacacgatagtgcgtgatgtgtacagtatcgtgttcctcacactctgtngtgccctcactctgacggagaatatgagtatgagatcatatatagatcgtcatgagtgacgctctctcgtctatgtctgtagttgtattattcacgcgtcctgcctacgtgtgatgatatccggatcgatgcacgcacatctcccacagccgacacctgcgcaatacccgcgccgcgcatatatacttagtcatcatgagactatgagtctatngcgcaatatcggatgaggnggactattattagatatgatantcttcccatcgtgtcgtgccacgcttcattatcatctcnctcgcatcgtccattgcgtctgtgtctcctgtgtccactcacttcatactggctcgacggcagccgcgatnacaatgagagaaatgataagagtagagagcgacatacagcagaacacacaaacagctanagagaacatatagganatagacatacaaaaaaaaagnacacaccacacaaatcaagaggacagatagacctcggatctgcgacgacggacagcagcacgaaccgacgcgcnnancccatcacgcagacgtacgcgctgctatctnggccgtatagtgttntattttagcattttacatcctatgacatatgtagtactgcgtaacactatnanatatatacacagtcacctgtaccacatactataagcataganatannatatacngagaaaaagtngncnagatacgcgtgatggagtggttagttgtcgttgggtcgagtgtacnctcttgggccgcctcgctcgcatatctgcgatgagcgacacgcgacagtctagtacatgagcggacatatnantntagatagnagagcacacatagtatcagcgagggcatcatcntgtctccactgactatacagctctccgtgggttgggtantcctcctagcgttagtgtttggccatagttaantccctggcgcatcctctcactcacgccgntgcgcacnatatagttcatactaccaccctactttatgatgatgaannnanagtggnnnnantnnggnatatannntnntnntgagaggngnnannnnggggggggggnnnnnnnnnnnnnnnnnnngggggggggggnnnnnnn

SEQ ID NO: 1785 - DNA, 1543 bp, Glycine max
  misc_feature (1)..(1): n is a, c, g, or t
  misc_feature (30)..(30): n is a, c, g, or t
  misc_feature (227)..(227): n is a, c, g, or t
  misc_feature (803)..(803): n is a, c, g, or t
  misc_feature (834)..(834): n is a, c, g, or t
  misc_feature (933)..(933): n is a, c, g, or t
  misc_feature (990)..(990): n is a, c, g, or t
  misc_feature (1132)..(1132): n is a, c, g, or t
  misc_feature (1198)..(1198): n is a, c, g, or t
  misc_feature (1308)..(1308): n is a, c, g, or t
  misc_feature (1313)..(1313): n is a, c, g, or t
  misc_feature (1441)..(1441): n is a, c, g, or t
  misc_feature (1456)..(1456): n is a, c, g, or t
  Probeset Number=SeqID_11564
nttccctacgcccccctcccccctctttcncttttttcggctttcgctcttacgcgctcaatgctctgactcagtgcttttcattgcgtgcgactggggagctgtccgtcgatttgtgactcgtgaccgtgtacgtggcgctcactccgccccgccggccgacgtcggtatgctatgagaggttcggcgggtttatgtgcggctgtgtcggggtgctccgataagcnatgaggattgttggcatgctagtgatatctcacaacagatcgaagagtggcgtgggcgagtgactaagctgctgtcaggcaggcgagcctgcggatgagaaagatttcgtcctctcatctacttaacgcgtatccagctcaaatacactctggttgcgtagggagcgcgccacgacgtctatacggcgcttccagtcgcgcaactcgcaattctgcgggtgtgggttgatctcagatacttgttattcacgtacctgacgcgcctgtcttatgcggtccgcggtgtcccatccttctatgtccctcctcccctcgtcgccaccctctgcgcgtgcaccatatctatcccgcctctctgtcctctctctcccgtgtttgcctctctcgctccaccgttactatgacgtgcccacgtatgttggttcacattccaccttactcccacgtatcattccgccttctctgccgcgcgcgcaccctctgctcgtgtcttatgatgcgtctactagcgagtagctggtgaactcgcacgctctgtaactagagacacgtgtctgatcactgctgtctgcgtantgctcgcgcctgctcgctgtcgatcctggtnctcatctctctctctgtgatgtgctacgcgtgtctgccgcggtgtgctccgttcgattcggagtttgtgtgcaattccgagtgtccacagctactgctncactttccgtctctcattacatcaatgtcatgactatatccgctgtcttaggatttncgtctgcatattctctctgcgcgatcatatattcatatctctcttatgcggccgctacatacgtcacatccctgtacgccggacgcgcgcagctgcgtgtgtgtactcgtatactatgacgcagcagtacgttgtgtggcgncggtatgcgtcgtactcaatgcaacaagtaccgcgactgagttattatcagcatggtgtctcgaancgcacaataccgcgtccggtgtgcgtgcagcaatatagcggcggtcgtcggacgtagtcgcgtactgtcctatgttatgactgttaattgtctgagctatcgacctccgntgtcngccggcattattcttgagtggtcgcacgcgctgacgaggctatcttgcgtccgtagtgctccgcgctcttaatgtatgctgatcatcgagtactgtatgcacatgtattgaatgttcgcgttatgaantggatcgtttcttanactaatctagcagtatctctgctgtatcacgtcggcgacgtgattggatcgagtgttcaccagttgacaacgtttatcgagcacgct

SEQ ID NO: 1786 - DNA, 605 bp, Glycine max
  misc_feature (605)..(605): n is a, c, g, or t
  Peptide Sequence Number=SeqID_9389
  Probeset Number=SeqID_11565
ttttttttttttttttttgatttttgtctcatatatttcttggttaataaacggttttcttcttcttccttcgccttagcatatcttctgagcatatcttcccttctttgtcttagattttcgttccctcacggtatcgaggggcttggggttttgtgtttagagatttcttgactgatatgatccaacaagaagtgttctctagcctctttctttagaaggaacctggggtcaaactgtcttttgttcctctctttgtaacttgcaaaacaaaaccattaatgtcatgtcattgaaattaaagtccgagaacaattccagttgatcttctttcactcatttctcgggggcctagcagggtttttctttgggaaaactgtctttaaacccttggccttctcttgacttgttttcctcggtaactggctattattacaaagtcaagagatttgtctccttcttcctcggtagcaaaactggaccatgaccttttccgctggtagcatcatgtcttttcaagagattttcctgttctttctgggggtcttgacaggggggacaggggtaactttcttttgcttttgctttttggaaatccttggtan

SEQ ID NO: 1787 - DNA, 1912 bp, Glycine max
  misc_feature (29)..(29): n is a, c, g, or t
  misc_feature (39)..(39): n is a, c, g, or t
  misc_feature (41)..(41): n is a, c, g, or t
  misc_feature (44)..(45): n is a, c, g, or t
  misc_feature (70)..(70): n is a, c, g, or t
  misc_feature (178)..(178): n is a, c, g, or t
  misc_feature (182)..(182): n is a, c, g, or t
  misc_feature (523)..(523): n is a, c, g, or t
  misc_feature (540)..(540): n is a, c, g, or t
  misc_feature (656)..(656): n is a, c, g, or t
  misc_feature (671)..(671): n is a, c, g, or t
  misc_feature (722)..(722): n is a, c, g, or t
  misc_feature (747)..(747): n is a, c, g, or t
  misc_feature (813)..(813): n is a, c, g, or t
  misc_feature (834)..(834): n is a, c, g, or t
  misc_feature (894)..(894): n is a, c, g, or t
  misc_feature (1213)..(1213): n is a, c, g, or t
  misc_feature (1251)..(1251): n is a, c, g, or t
  misc_feature (1277)..(1277): n is a, c, g, or t
  misc_feature (1287)..(1287): n is a, c, g, or t
  misc_feature (1363)..(1363): n is a, c, g, or t
  misc_feature (1399)..(1399): n is a, c, g, or t
  misc_feature (1565)..(1565): n is a, c, g, or t
  misc_feature (1609)..(1609): n is a, c, g, or t
  misc_feature (1748)..(1748): n is a, c, g, or t
  misc_feature (1849)..(1849): n is a, c, g, or t
  misc_feature (1876)..(1876): n is a, c, g, or t
  misc_feature (1906)..(1906): n is a, c, g, or t
  misc_feature (1912)..(1912): n is a, c, g, or t
  Probeset Number=SeqID_11566
ttctaagatttgttctgcgagtcgtaggnctctagactntncannaagtcggaggtcacatatactcaanctctgcctcatcgaatgcacatctcgcatatattaacacagctagagcagtatacacacgaactctcgtccctggactgactctccgagaaagatgatacttggtcgntcgntgtgtctatgaatatgtcgttgtgttcgtctctgtatgttggtcctgcgcaatatatgacttgaaccgatgcttatcgttacagcgatgtctctagtactagcctcgacgataccgtactagtgtatatatcatgacactcattattataggacgcccgtgagtgttaagatgtcacgcagtcttaatttgagctagcgaagctgagccagagtgtactaatacttctcctatcgccattgccttcataacgctcgtagttagcttatctaccgtcgtagatatcactgtgtattatcactccgctgatacgtaagtgtatgatgtactctctacgagtgntgcgttagatggtaggncacgtcgagagtatgcgtgtcaattaccacgcatgcacgctcctgatgttctcgtcaactgactgtcgtcactaactatgtacatcttgcatcaacgattggacatctacgtacgngaatattaatatganatgtctaatgattcactctctaatgtgtcgcgcggtgcgcgtgcgagccgnacagtattcctgcgtctctgggatngacatgctagtcatacgcagtcgaagcatacgcagagaatgacatagtctctgcgtcggaactagntatgaggtgtcgtttagctcnccacgcctatctcgactctcacgcgtctatcttcacggtgtcagcactgtgatcttctcntctgatatctcacgcttgtatccatgtgtgttaggacattacactatgaactgtgtctgttcaatatgttgtgcatgtacgcgcgcgtgtgtcttatcttatgtcgcgagactagagcggcagcctgagcttagtatactgtcttactatacgtcactttcaacgcgtacgtatcgtatcatgtacatacagttacactacttatcatactgatgactgcactataatatattcgtcgactgcgtttatgatgtctgtcatacactgtatgtactccgcgacagtcatatatactgcacacgtgacgatcgtcatcaantcaactgtcctatcatgcgctacgaatagagattaaancgtatgttcgacgacttatattcggnagttctgagncggtagcacagtacatcgcattactcagttaagttatcactctgaggacgttagacgcgatgactgatcattcacngtgtattctactatctcgtgtcagcttacggtagcnagtctgcacacagcctactgtaacgacagatccgtctaacaagtgatgtgctaaccatcgatgactgtgatgtatcatagcgtgattcagtatatagtcagtgacgtatcagagacgtcgtagctaggtgcgcgcggcagagatctagacatgttatactatcgtnatcacattaagagcgaactagacataccataccgactgagtcancgtcgtagacactcgccgactctcatatgcgacatgtcatctcctgtcgatagtgatcatacttatgttgtccttagctctcagctcgacgtagaagcagagtgtgtagctgatagaaatgacgatcttagattatagngtgtatcgcactcgcgactaatgaggatgatgtcgatgtgtcgcatgagatcgaatgtgttctagagccatgacgatatcactgagaccgttaccctgctntagtcgacaagtactgcaggtgtgagntagcgtaatagatccgacgacacttcattnacacan

SEQ ID NO: 1788 - DNA, 504 bp, Glycine max
  Peptide Sequence Number=SeqID_9390
  Probeset Number=SeqID_11567
acacaacataataaaaaaaaagaagatatacaaaaagttgatagtaggatacaagttcgcttttgatcactgtcctcaaaaagagagaaaaaggaccagctgaaatggggcgttgggtgagacctgaggtgtaccctcttctcggagcaatgggatttgtaacatctatggttgtgtttcaactcacaaggaatgcattattaaaccctgattgcaggataagtaaagagaacagaaaaatgggaattctggaaaatgaagatgaaggagaaaaatatgcacaacacagtcttcgcaagcatttgaggacccgtccacctcaagttacgccttctctcaaccgtttcttctctgaagaggacaactaaactatttcaccttatcataaaagttacttatatactagttattatacaaattaaatctagtttgggattgcttaatgtgtattgtaatacttagtatggctggacaatttatccgttaaatttgattcgatttgtt

SEQ ID NO: 1789 - DNA, 444 bp, Glycine max
  misc_feature (393)..(393): n is a, c, g, or t
  misc_feature (426)..(426): n is a, c, g, or t
  Peptide Sequence Number=SeqID_9398
  Probeset Number=SeqID_11568
gaattcttttttttttttttttttggagtgagatttttaatttcaacttctgcccattccaaggaattggacaaaagatgattacagaataaaaccagcccgtaaaacaaaggttgagcgaggcctacagaattcaaataccaaatggggatgcccggaggtcgtctccacttgccatctttggaaatggcttgcgctggctttccagcgggagcgatgcgtgaactgtttattcgtcgaaggtggtgcgctttccgccagcaccgcctccacgtcctccgcgtccgccacgtcctccgcggtctccgaatccaccgcgtccgccgcgtcctccgaatccgccaccacgtccaccgcgtcctccgcggtctccgaatccaccgcgtccaccgnggcctccgccgaatccgccacgtcctccgcgtncgccacggtctccgccga

SEQ ID NO: 1790 - DNA, 1435 bp, Glycine max
  misc_feature (24)..(24): n is a, c, g, or t
  misc_feature (26)..(26): n is a, c, g, or t
  misc_feature (28)..(28): n is a, c, g, or t
  misc_feature (30)..(30): n is a, c, g, or t
  misc_feature (37)..(38): n is a, c, g, or t
  misc_feature (69)..(69): n is a, c, g, or t
  misc_feature (77)..(77): n is a, c, g, or t
  misc_feature (135)..(136): n is a, c, g, or t
  misc_feature (138)..(138): n is a, c, g, or t
  misc_feature (159)..(159): n is a, c, g, or t
  misc_feature (175)..(175): n is a, c, g, or t
  misc_feature (182)..(182): n is a, c, g, or t
  misc_feature (214)..(214): n is a, c, g, or t
  misc_feature (230)..(230): n is a, c, g, or t
  misc_feature (240)..(240): n is a, c, g, or t
  misc_feature (242)..(242): n is a, c, g, or t
  misc_feature (248)..(248): n is a, c, g, or t
  misc_feature (295)..(295): n is a, c, g, or t
  misc_feature (323)..(323): n is a, c, g, or t
  misc_feature (454)..(454): n is a, c, g, or t
  misc_feature (479)..(479): n is a, c, g, or t
  misc_feature (499)..(499): n is a, c, g, or t
  misc_feature (612)..(612): n is a, c, g, or t
  misc_feature (614)..(614): n is a, c, g, or t
  misc_feature (713)..(713): n is a, c, g, or t
  misc_feature (715)..(715): n is a, c, g, or t
  misc_feature (879)..(879): n is a, c, g, or t
  misc_feature (891)..(891): n is a, c, g, or t
  misc_feature (957)..(957): n is a, c, g, or t
  misc_feature (1050)..(1050): n is a, c, g, or t
  misc_feature (1186)..(1186): n is a, c, g, or t
  misc_feature (1235)..(1235): n is a, c, g, or t
  misc_feature (1239)..(1239): n is a, c, g, or t
  misc_feature (1259)..(1259): n is a, c, g, or t
  misc_feature (1270)..(1270): n is a, c, g, or t
  misc_feature (1284)..(1284): n is a, c, g, or t
  misc_feature (1287)..(1287): n is a, c, g, or t
  misc_feature (1295)..(1295): n is a, c, g, or t
  misc_feature (1309)..(1309): n is a, c, g, or t
  misc_feature (1344)..(1344): n is a, c, g, or t
  misc_feature (1349)..(1349): n is a, c, g, or t
  misc_feature (1407)..(1407): n is a, c, g, or t
  Probeset Number=SeqID_11569
gtttttttccgcgctgcgcggctntntntnctgctgnnttctttctctgcgtgcgctgcgcgccgccgncgtcgganactatatagtaattaatatcaaagacaacacatgacgagcgacaacaagagggtgtgnngngatgatgtgagtgtattctcnctgcactcgtacgcgnctacccncgcactccacgcgacggtagagtatatctcangaagaatcatatgaangctaaagatnanataagnacgtatgcgagcggctgatgtcgagcagggcgtgtgctcactatcantagctgatcgtcatgctctgttagctgnagcacgcgctgctgtattacgcatgtcatcatatggaacgtcaagtcagcctcatcgatgccgcatctactctcatacttctacgctctcaatgagctgcgtctcacgctactcaatatgcgaagctgagngctgcgcggaagcatacagtcgtcntatcaatcttcctacatacncaacgttctctactcagagctcacactcacgaggactctcgcacgcgtacttggtcacatccgacctctactatactcattcctcatgcatacaatagcatatacaatgctantngtctctatactgactcatcgccactatacgtgaagagatataacgatatacgaagagtgtaaggaatgacactagtgaatgagatgcgaaattcacganantaataatgtgatatgacgagcgagctacatcgtctgtgtcgatgcagtcgcgctgctcgcgctaggcgctgctccgttgcgatgtaagtgcgcaggtgtgactgtgcctcgtcctcgatacactatgtgttgatgatatatacatatatagatacatgagtganatagcatcacancgcgtacacgacttcaacaccatacacacgaactcaactcgaccgacactgacagcatcacactanagtgtgtagctacaggatagtgaatgcgaccccgcacacatatgcgtaatacgctagcagtatgacatacagcatgtacagagatatgagacntctactgcgacatcgatcactatactagactataatcgctatactcgtctcgtgacgagaccataccatcgacgtcacacacagcgacgtcgcgagactacgtccgtgcgctgcgtctcgtactcgaaatgtactnactatctcagtgtgtgcatggtgcactgcgtatagatatcagagtgtcngtcngagtacgactagattccgantacgagcacgncgatgaatagtacnganacatcgtnacacacgctgaatnacacctatagcgtcagtatatcatcagatacgttnagganggtcgttcaacacatgactacagtgcgtcgacagctacgacagacgcacgtcgcatcngtgtgatcagtacgtgataagtcatatg

SEQ ID NO: 1791 - DNA, 1496 bp, Glycine max
  misc_feature (11)..(11): n is a, c, g, or t
  misc_feature (23)..(23): n is a, c, g, or t
  misc_feature (56)..(56): n is a, c, g, or t
  misc_feature (99)..(99): n is a, c, g, or t
  misc_feature (261)..(261): n is a, c, g, or t
  misc_feature (278)..(278): n is a, c, g, or t
  misc_feature (969)..(969): n is a, c, g, or t
  misc_feature (1014)..(1014): n is a, c, g, or t
  misc_feature (1017)..(1017): n is a, c, g, or t
  misc_feature (1030)..(1030): n is a, c, g, or t
  misc_feature (1047)..(1047): n is a, c, g, or t
  misc_feature (1114)..(1114): n is a, c, g, or t
  misc_feature (1132)..(1132): n is a, c, g, or t
  misc_feature (1176)..(1176): n is a, c, g, or t
  misc_feature (1464)..(1464): n is a, c, g, or t
  misc_feature (1472)..(1472): n is a, c, g, or t
  Peptide Sequence Number=SeqID_9399
  Probeset Number=SeqID_11570
aaagaggaggnagaggaggaggnggagaagggaccggtggtccaaaaccacatganccatcacgcaaacccgccaacacccatgagtgtcctgcccccnacaagtgcgctctttcttcctcttcttttcttctctgcatcttcttctctaacaaagcagactcttaacctctgtttctctgcttatccataccacagccccctttgtgaggagtgtatcaacagaagcaagcagaaacaatgatagacgtcaatgtttgcngctgtggagttaatcantaatgcaacaatgatgtgtgtgtgtactccgcaagaaggagttataggtattttcggttatcattaatatacgtgactcgcaacggagccatttaactccatcacgtagttgctcggcctgactttcttctcttctctttcttcttctctttcgtcaccactgtgtctcgccctcctcacgactcccctctgcatctcccgcctcgccatgtggaatcgtatacttgacaaatattagagtcaagtcttgtggtggtatattgatgcgtatatatgatagtattcttaaataaatgtttaatctcttatgatattatcacatgtgacgttgttaatgttattattatattatatacatagtgttaatatacacgttatatctccttctcttatacacaataatcatctcttctttcacctcatgtctgtgtctcttagttatagtgtcgtttatcaatcaatttatttgacacacttatctatctctaactgattttaactatcatctctatacaccatagatcctaatcctccatactccttctctccccacaagctgtgatgtcacgtagtatcacacgacgtacatatcactctacttatcgaatataatagtcaatacttcgactctctcacctaccctctccacatacactcaccatccattcctcactacctgcctaacaaccgnacaatctctttatcttccttctctttcaatttcttgtctcttctngtngttgtcggttatnaatcataccacctactnttctcatcactatatctctatccctactatctcaaaagtattcttattatatatccacatatgtacnctaactctctatgtatancgtcctctactctaaagagcacatctgctacatctctacacccncactctccactctctctatcacactcatcgctactcattaacacaacctctcatcacctctactcttgctatccatctctcttatatcatctcctcactctgcactctgtcacttagtactctctcatctctcactcttatctctttcttcattattactacttctacatttatactatatctctcttctctttgtctatcatcatatttcatacatcgtcgtgattagacctaacttatacacaacccactctcatgtcatcacacacaccatcactactcatctanccttcctngtcttcatatctgtctcgcgacgg

SEQ ID NO: 1792 - DNA, 1438 bp, Glycine max
  misc_feature (1)..(2): n is a, c, g, or t
  misc_feature (18)..(18): n is a, c, g, or t
  misc_feature (24)..(24): n is a, c, g, or t
  misc_feature (39)..(39): n is a, c, g, or t
  misc_feature (43)..(43): n is a, c, g, or t
  misc_feature (58)..(58): n is a, c, g, or t
  misc_feature (67)..(67): n is a, c, g, or t
  misc_feature (165)..(165): n is a, c, g, or t
  misc_feature (298)..(298): n is a, c, g, or t
  misc_feature (305)..(305): n is a, c, g, or t
  misc_feature (344)..(344): n is a, c, g, or t
  misc_feature (481)..(481): n is a, c, g, or t
  misc_feature (549)..(549): n is a, c, g, or t
  misc_feature (862)..(862): n is a, c, g, or t
  misc_feature (935)..(935): n is a, c, g, or t
  misc_feature (976)..(976): n is a, c, g, or t
  misc_feature (1050)..(1050): n is a, c, g, or t
  misc_feature (1271)..(1271): n is a, c, g, or t
  misc_feature (1313)..(1313): n is a, c, g, or t
  misc_feature (1411)..(1411): n is a, c, g, or t
  Probeset Number=SeqID_11571
nntttttgtttgttaatntctttntctcttggtccgaanaatnacaaccacaattcanccagacaangttgcaacaaagtatcaaacgccacgtagaacttgcccccccatgacccgtcccacatctaatattctagttaccgtcgaaacaaccactataggagntacttttatgttgtttctgtctattacttacttcatatcgtgaattgttattggtggtttgtgattattatagatagacgatccagcggcgctggccagcgctgatagatgtgagaaaggggagagcagcccnaaggagngaccatgtacatatccacgcacctagaatacaacatacnccatacgactcgtatacgtaatgaagcagcagcaacacacaaaacacgagcatagttagatagtagcccatgagtatggctcaatgtcagagatttaacataacattttagatgaaggagtgggagagttgatatcnttactccatcactgacggtatgttaattataacttatacaacctcacgctatctcaactcacccttcntcacccacccgctcctgcttctactcgtattatggtgttttctgatatgtatatgctctattgtgccctcactcccctctctgcttatatagaagtagaggtatgggagcgcaggtgataaaacaacgaaaccaaatatatatatacaatattaacatcgtgataatgacacgtatgttaccacaccttgtctcgcacacctccctagtgtgcgtgggcgagctatagtatatatatatattctctcctcctctacacacaatatacgaacatatgcgatgtatgcactacacacactcacttcatagttagngatctcgaagtcatctcattcacacctctcattatcctctcatgcaatatgatcatacacctgcgagcagccncatagatagtctcacttgtgatcagtgacgctgcacagtancaccgctctatgccacgtcacatcaccgccgcacatgcctcagcaccatttgagttaactcactcgtgtcaccntccctctgtagcgcacaatcgtatactgtgtacgcaaccctgtgagattcatacacgaataatcaaaatatacaacagcgcataacgtcctatacgcatatatagtatattatgatatcacactcacactctataccgcactcgctactgagatatacgctatctataatatacacactcttattcccctcgctacggggacatcatagtgcacatagtcncgtctctacgtcgtcaagatgagactacgactgacacacccnctcggtatattcgtgtatatatgagacgagggtctcgcgctctaatcaatcgtactatcatatatcatacagacatacatcgctcgtacagccgcgcncgtcacgcgactatatcgcgccactcg

SEQ ID NO: 1793 - DNA, 1514 bp, Glycine max
  misc_feature (9)..(13): n is a, c, g, or t
  misc_feature (15)..(15): n is a, c, g, or t
  misc_feature (19)..(19): n is a, c, g, or t
  misc_feature (31)..(31): n is a, c, g, or t
  misc_feature (47)..(47): n is a, c, g, or t
  misc_feature (1320)..(1320): n is a, c, g, or t
  misc_feature (1404)..(1404): n is a, c, g, or t
  misc_feature (1514)..(1514): n is a, c, g, or t
  Peptide Sequence Number=SeqID_9400
  Probeset Number=SeqID_11572
tcacacctnnnnntntctnccctctcccctntctccctctccgtttnttttttgttaaaaagctggggagctacaccgtcgtgtgggctggcccgctcctagaaactcagtggcatcaccccgtgtgttgtcttgtaattttcccttgaagacccatacaacctatttaacacccataaaatatagcgaacaagctctgtcccctcctccctcctctacatttaccccttctgatctcccttccttgctccgcacccatccatcccgaggaatctgtctctactctagttaatagtgattattgtcttcacttccctcataatacagtcgaatctcgctagacttattcaaaacagcaccccacgacaccatagtacccgccactcacgccagcgctctgagcgaagaccggtatccaacacatccccgctcccgccgctctaacgccgccgtcagttaccgtcctcccctcacgtactagtgctcccccctctccctccttcccccgacctattcacagcccttcgccctcaactttcttcttatagcttatctatattttgtctttctacgccccatcctcatctatgtattgctcaacgagacacatactcacacatattggatctcgcaatgtatgtactatttcctcttgcagccacctcgagtctacttgacttttcctcccactccgagcccctatgtgcaccaatgtaatatttctatattaccgcaccgacaccactggtgacatctcgatatctcgatcccgcccaccccatacaatctactatatcgctctcacatctcacatatatcctgtttcacaaccctccgacttatttttattagaccgcacttcatacgccacacctagtcttacttctcttacgcccgaccagtaacctcctgacaaactcctattattaaatattagctattcattattatcagatacgagatgtgcgcgcgctatttagatacatcattccctccttgttgtacatttctgtctcatgtcgtttatgctacctccactcgtgggatactttattctcttcctctctcttttgaccatctcacccactccatcatcactttaacaatgaagcgcacatcccacatggcaccagcccacacatctctctacgcctcctctctcagataactcaacattctgtctcacacgccacgtgcgctagactcctcatgttcgaaagacacaataaatgctgtgtatatcctttatcacgcgcatgtatgacctgtccacttacctacaatctcacctatcgccagccctcagatactcatatcctncatacaacctacgccatatggcgtcgactcaacgtacgctacgccgccctatcgtgtcaatctgtgtagtatctctcgctgcangtttaacaaacattactcagctcaccttctcactgcacccccctctgcacccatcgccacggacaaacagcacgtcatcacctctacaagctaattctatcactgtatan

SEQ ID NO: 1794 - DNA, 1945 bp, Glycine max
  misc_feature (1)..(1): n is a, c, g, or t
  misc_feature (1862)..(1945): n is a, c, g, or t
  Probeset Number=SeqID_11573
ntttttcactacttcacttgactagtccaattatctgatgccatatcaaaaccatgtctgacccttctaccctcttaccctcctcccaccaccaccacaaccaccatgtgccactcatccaaggcggcgccaccgcaccctcctcctcctccaccaccctagcccgagaataccgcaagggcaactggaccatccaagagaccctcattctcaccactgcaaaaaagctcgacgacgagcgcaggctcaaaacccctgctgcatgtagcacctccaccaccaccaccagaaccagcggcgagctccggtggaaatgggtggagaactattgctggagccatggctgcttgcgaagccagaaccaatgcaacgacaaatgggacaacctcctccgcgattacaaaaaggttcgcgactacgagtccaaatcaaacgacaacgacaacaacaacaacaaacacttcccttcttattggaccctcaacaaacaacaacgtaaggaacagaacctcccctccaacatggtcttcgaagtctaccaaaccatcgccgatgtcctccaacgaaaacaaacacaatcccaaagacaacatcaacaacctctggctattccattagttacttcctcaccctcaccacttcaaacacttccaccacctcctctaccaccaccgccgcctccgccacctcctcctccgccagttagctccaccactccggtaggctcagagagatcggaatcatcaggaactgagcacagtgaggatgatgatgatgggtcggaatcaaaacgtaggaaagttaagaaccttggttcaagaataatgcaaagtgcatcggtgttggcacgagctcttaggagttgtgaggagaagaaggagaaacggcaccgtgaaatgattgagctggagcaaaggaggattcagatggaggaagctcggaatgaggttcaccggcaaggcatcgcgacccttgtcgccgccgtcaccaacctttccggtgccattgagtcactcattaataattctgaacgccatggccaaagataattaattaatatggcaccatataataataataatatatgcttcctcgcctagctagcagtttattattattatgtgattgatcagaaaatcatataatatctatcggccattctttccctcttcaaattcaattgttgtctaatatttttgagtcggttttaccaccaattgatttctcatgattatatgtcagcagctgatatgtgatcgatccatatggtatatgtttcattattctttggtggagatcaaaccaagccctaacattgattgtttataaaaaaaaaaaaaaaaaagtagcttatcccacaaccccccccccaaggggggggccggggacccaatttccccctaaaagccctccgaaagggaccccggaatcttggccgcgctgttctatggcggccggggatgggaaaaaccccggggggtaagactcggggaaaacacttggagaaaatccccccttttccccatttgggggaaaaagaaaaaaggaaccaaacatttccacccccttttttccaagcagacgacccccgaagggggcacacgaaacaataaaagagcgcccccgccacccggatattgtccctctttctcccacaagacgttattcctcacaccccctttaaaagtggtcataagagggacaacccgtgcgcaaacacgattataaatacttcttggaacaacaacattccgggtgtagaatagatttttttcccgaaaaccaacctcctattcttttcttagcacaaataatgagccacaatactgcgggagtcactcctcctcttgtaccccccacannnnnnnnnnnnnnnnnnnnnnnnnnnnnnnnnnnnnnnnnnnnnnnnnnnnnnnnnnnnnnnnnnnnnnnnnnnnnnnnnnnn

SEQ ID NO: 1795 - DNA, 579 bp, Glycine max
  misc_feature (277)..(281): n is a, c, g, or t
  Peptide Sequence Number=SeqID_9401
  Probeset Number=SeqID_11574
atggggccatgtggagctttctcgtcgaattcctgagagtcttccttctccaaatgctatttgcttcacatccatgatcaatgcatatgcccgaaatggagcggggaaagaaggaattgcagtgcttcaagctatgattgagaggggactaaagcctgatgatgttaccttattatgtgcactaaatggttgtaaccacacaggattagttgaggaaggaagattagtctttgaatcgatgaaatctcttcatggggtcgatccagatcaccgccannnnncatgcatggtggatctcttttgccgtgcaggacttctacatgaagctgaagagttgctgctacaggcaccgggaaaaggagactgttttatgtggagctctttgctgagaagttgcagggtccacaagaatgaagaggttggaacaagagcagcacaagtgttagttgagctagatccagatgaccctgcagacacgatagagcaaaagttacaaattgaaaggaggcttggtagtgtgaaaacacgcaaggaccgtccgagccctcttggtcctaatgggaagaacaacagcattgg

SEQ ID NO: 1796 - DNA, 601 bp, Glycine max
  misc_feature (601)..(601): n is a, c, g, or t
  Peptide Sequence Number=SeqID_9402
  Probeset Number=SeqID_11575
aaaaaattattataaaaaaataattatttttatcttatttaatgaaattatctttaaaacatctttcatttaataggagacttataattaacattaagttttaattaaaggtaatttaagaattttttaattagaattaacgcaatttaatgaaattaattaattttttaatgttatgaaaaaaaaatttcttatttttatttacttataattgagactaaaggagtgacattttgtgtattatgggcccactattttgtttttcctttaaccattaccttctttcttttagcctctcttgtactcttttccttcctcctgttcctagaaagctgttttagttattagttaaaacttattgaaaatcttaaaatttgttagttttacttcttatttaataatttttttttgtcactaatgtgttaaaaaaaaaagtgttggcttgggaaaattgtattcattttggaaaaatgtctaatattaatggagcttgcagttaaggacgctatccaagaaacaactagagctccttaaggcaccattgggcccagagtttaagcacaacgcaaggcctcttcagcaattgaatggacgtaaaatn

SEQ ID NO: 1797 - DNA, 445 bp, Glycine max
  Peptide Sequence Number=SeqID_9403
  Probeset Number=SeqID_11576
tcgagtyagctacgtaggcccccccccaagaagaaatcatggtcaaccaaaagcccatcattgaagaaggtgtcaagactttgttgaacaaagacaacacgttgaaccccacactttcatgaaagaagttgatgtcgttgaaaccagacctgtcgaacaaactatcgaagttatggaacccagaaaggtcctcaaggaagttcaatacactgaagctgtccccgtcatgaagaccattgaaactatcgaaccccaagtcatcaagaaggaaatcgaagttatggaacccaagctcgtcaccaagactattcaagtcgtcgaaaacgttcctgtcaagaaggaagtcgaagtcattgaatctgtccccatcatgaaggaagttgaaactttcgaacctcaaactttcaccaaggaagtcgaagttatcgaacaagttcccgttacc

SEQ ID NO: 1798 - DNA, 1930 bp, Glycine max
  misc_feature (1)..(1): n is a, c, g, or t
  misc_feature (67)..(67): n is a, c, g, or t
  misc_feature (78)..(78): n is a, c, g, or t
  misc_feature (82)..(82): n is a, c, g, or t
  misc_feature (87)..(87): n is a, c, g, or t
  misc_feature (115)..(115): n is a, c, g, or t
  misc_feature (122)..(122): n is a, c, g, or t
  misc_feature (136)..(136): n is a, c, g, or t
  misc_feature (138)..(138): n is a, c, g, or t
  misc_feature (140)..(140): n is a, c, g, or t
  misc_feature (152)..(152): n is a, c, g, or t
  misc_feature (170)..(170): n is a, c, g, or t
  misc_feature (227)..(227): n is a, c, g, or t
  misc_feature (311)..(311): n is a, c, g, or t
  misc_feature (376)..(376): n is a, c, g, or t
  misc_feature (388)..(388): n is a, c, g, or t
  misc_feature (420)..(420): n is a, c, g, or t
  misc_feature (518)..(518): n is a, c, g, or t
  misc_feature (597)..(597): n is a, c, g, or t
  misc_feature (652)..(652): n is a, c, g, or t
  misc_feature (682)..(682): n is a, c, g, or t
  misc_feature (684)..(684): n is a, c, g, or t
  misc_feature (722)..(722): n is a, c, g, or t
  misc_feature (858)..(858): n is a, c, g, or t
  misc_feature (1034)..(1034): n is a, c, g, or t
  Probeset Number=SeqID_11577
ncacgactaccatggcatttatgtgactgcagtgagtagtcactcactagtcatcacggtcatcagnatattattgtnatcntagtnctagacgacgactcgaactggtcacgancacgtcncgtcgtaagtctancngnatcgtcgaaacntccgtcacgcaacaccgncgtatctacagtcgcatagagcagcgctcgatgtagtcgtatacgtgcgcgtcaganacacacgatagtcaacggtcgatgctgtaatgaatacatcgtatatcgtagatagagttcgacgtgtgcatctcgattagttangcatatgcgtgtcgaagtcgataacagcagcacagagaggcatcgacgtgatagcaagtgtagcnacgctatcacantcagaacaagcaactcatgtacagcgtcaatnatctgagaacacactgagcagtgtacatactgcgagtcagataacacatgatcgagtcgtgcggcaactgtgacagcgcagtgtcgcatgcatcatgngcaccactacgtgagaatacgtcgtgagtcatcagcatatagaccacgagtctgacagacaatgtccctgcgcagggtnactctatagagatctcgtgcacccagtgtgtctagtaatggacttaacgttacanacaagcgatatgcgttcgtgtcgatttacnanacatagcatgttgtcgcacgcagtgcagtctactagangtacagatcgcaccgatagcagcagctcagtgagtgcagcgatgagacgaatgcaccgtagatgagagtcgcacatctatgttgtatactcttctatgcgtctacactagccgatggctctccgtctagagcgcgnctcgccgtacaatccttcattctaatcaaccgctacagactagtgagcgtcagtgagtagtgccgcttacgacacccacgacacattatataccagacgtagcgcctatcgagttatatcggtcagatgtcagcacgtgtcgactattgagctcggattatctacaatccactgtnagctacagtagcgacgtcgcgcgtgctagctacatgaccgcgcgctgctgtgtatctcgcgccaatcgtcttgtcatacgtagttcaacttcatgcagttagctgcgagatcgagttctctgttcatcgcactgtcgcgtccgtgtcttgtatgacgttctatattgtaattagccggtctctatgcagcgaacaatattagctggcgcagcctcttaggtgtagtcggaatcgctcacagccactagtacgacgtctgcgcggtatacgtggaccgctgcagtacgatacgtcgcagctccgccgcgaggtcgtgtcgcgcgagtcgcgacgggcgcgagaatgatacgagcgtgtttgtcggttgctaccacgttcacaagctaatggccgacattagtaaattaatatccacgcacataggatacgagtgccaatatattacgccctgccgcagacatccgcgtgtgatcgtaaggtcggtcagctcacgcttcacccggcagcgcctcattgctctaggcattccaccttctcggagcgcaaaccggttataagtcgtgaacgtaatgtcgtgcgagttaggcatgcgaagagtgcgaactcagacgggagtcgacgcgcatgtgggtcgtttgttatagtcttagagaatccattcatattagatatatctgcacgacatgtattaaatacaggagatagaaccttagtccaagtctccagtatccgcatagcacacataacatttcacctcacccatagaagacccaagcagattctctgtccttggtgtgttgaaattccactaagcgtcgtcacagattccagtgacgctccgagtcccgtggtgcgcaggcagtcgtcgagcgaggaatctagcggagagggaagga

SEQ ID NO: 1799 - DNA, 1422 bp, Glycine max
  misc_feature (10)..(12): n is a, c, g, or t
  misc_feature (15)..(18): n is a, c, g, or t
  misc_feature (20)..(26): n is a, c, g, or t
  misc_feature (28)..(28): n is a, c, g, or t
  misc_feature (31)..(34): n is a, c, g, or t
  misc_feature (36)..(37): n is a, c, g, or t
  misc_feature (42)..(42): n is a, c, g, or t
  misc_feature (45)..(45): n is a, c, g, or t
  misc_feature (106)..(106): n is a, c, g, or t
  misc_feature (128)..(128): n is a, c, g, or t
  misc_feature (130)..(130): n is a, c, g, or t
  misc_feature (166)..(166): n is a, c, g, or t
  misc_feature (179)..(179): n is a, c, g, or t
  misc_feature (227)..(227): n is a, c, g, or t
  misc_feature (230)..(230): n is a, c, g, or t
  misc_feature (425)..(427): n is a, c, g, or t
  misc_feature (429)..(429): n is a, c, g, or t
  misc_feature (437)..(437): n is a, c, g, or t
  misc_feature (488)..(488): n is a, c, g, or t
  misc_feature (526)..(526): n is a, c, g, or t
  misc_feature (528)..(528): n is a, c, g, or t
  misc_feature (539)..(539): n is a, c, g, or t
  misc_feature (547)..(547): n is a, c, g, or t
  misc_feature (552)..(552): n is a, c, g, or t
  misc_feature (784)..(784): n is a, c, g, or t
  misc_feature (877)..(877): n is a, c, g, or t
  misc_feature (912)..(912): n is a, c, g, or t
  misc_feature (1037)..(1037): n is a, c, g, or t
  misc_feature (1051)..(1051): n is a, c, g, or t
  misc_feature (1203)..(1203): n is a, c, g, or t
  misc_feature (1241)..(1241): n is a, c, g, or t
  misc_feature (1247)..(1247): n is a, c, g, or t
  misc_feature (1287)..(1287): n is a, c, g, or t
  misc_feature (1351)..(1351): n is a, c, g, or t
  misc_feature (1406)..(1406): n is a, c, g, or t
  misc_feature (1422)..(1422): n is a, c, g, or t
  Peptide Sequence Number=SeqID_9404
  Probeset Number=SeqID_11578
ttttttgttnnnttnnnntnnnnnnntnttnnnntnntatanttncttctctttcttatttattttattctctgtcgacgatatctcttcttgtatctccacaccnccacctcccacacaacacaaananagcaacgagaggccgcgacagcgcacccgcgctctnattgcctctcgcngcgctctgttgcgcgctgtgtagggtgcctgtggaagtggattattanatncttaatattaactcttatcttattcactttctatcttaccgctactctactctccttcacgatcggtacgtatgtctcgcttctcgtcagtcggatgcctgcgtgttcgctctgcgctctatgttgcagtaccgcagtcgctatcagaacgtacacacccccaacttctctcgatatctttcttcatatctcctnnntnatacatantcaatctatgtttgtatatattcgtatggactagtcgatatatgatgctgntgtagtggttagttcgtgttgtgcctcctcgctgcctncntgcgctgcccngtgtgtgnctatngtccgcggtgtacggccgtgcgcgtcggcggtgatgatgactgtgagaggatgtgatgaatgtgttatctgatgtttctactcgcgcgcgcagctccccacgttgcgagccgggtgtctctgacctctaacggctgcgctgcgcccgcggcgtacccgtcagtatatctcaatactctctcaatagttgtggtcagcgtgtgacctcgcaacgtctcgcactgtgtcgcctngctgcggcggcgcgacgcggcgacgttcgtgtagtggtgctgtgtcgtgtagacgagcgtgtcatctagttgccatcctccactgttcttaanttgtcgagtctctctactcacgtccaccaccgtcnactatatctttcctcgacgactatctccatacagcacgacaaacgtattgattatcgatactagatgaccacaccacgtgaccgatgtaattagtaatctgcgcaacacactcatatcacgttcngcgccttcgagagnacgcgcggtgtctgtcgtaatgactgccgtatatgctgctgctatttatctctctatgacgcatgcgtgtacgtcgcgatctcctctgttatggcgttgcgtctgcgatatcgtcgtatcttcttagagttatcagactatggtctgtttangtctcaccacaccgatgcgcatgcaccgagtatgctcnctctcntctactgccgctgtgccacctacatctgtcctccgcagcncaccgcactctagctactcacgacatatatattaagcgtccaactagacatagttcagcctganacgactgcattgatgtcacagcacgtgcacgtacatctccgagtccacagtgctngacatcgcgagcgtcn

SEQ ID NO: 1800 - DNA, 362 bp, Glycine max
  Probeset Number=SeqID_11579
ccacagaagggggcccggggggcttttttaaaccacacggggggataaaacatggcctcattgggagggttacaaaatctaagcggcatcaattctcttatcaaaaaacagggcccaaaagtcaatgcgaagctctagcctgaacccgccaccctatccactgaatggtctggagcctatgatgagccaccacacacttgagtttaattgggggaaacaactacagaacatatgtggaaaacctgaaaaaacaaattgatggcacagaccttgatgggaaatcactctaagagattatagccacatcatatactaagggggccatcctctcagctttcaacaaggcactacaggtattgaac

SEQ ID NO: 1801 - DNA, 1638 bp, Glycine max
  misc_feature (1)..(1): n is a, c, g, or t
  misc_feature (8)..(9): n is a, c, g, or t
  misc_feature (24)..(24): n is a, c, g, or t
  misc_feature (29)..(30): n is a, c, g, or t
  misc_feature (70)..(72): n is a, c, g, or t
  misc_feature (614)..(614): n is a, c, g, or t
  misc_feature (1153)..(1153): n is a, c, g, or t
  misc_feature (1194)..(1194): n is a, c, g, or t
  misc_feature (1438)..(1438): n is a, c, g, or t
  misc_feature (1441)..(1441): n is a, c, g, or t
  misc_feature (1451)..(1451): n is a, c, g, or t
  misc_feature (1475)..(1475): n is a, c, g, or t
  misc_feature (1481)..(1481): n is a, c, g, or t
  misc_feature (1492)..(1492): n is a, c, g, or t
  misc_feature (1573)..(1573): n is a, c, g, or t
  Peptide Sequence Number=SeqID_9405
  Probeset Number=SeqID_11580
nggggttnntcccccccccccctnccctnncccccccccccgcccgtcgcccttgtgctctccatcctcnnnttttttttttgacatgccccggaaccccacaaagaaaacacacaagcgccgacgcgcggccgagagcggcgcgaggccacgcgggagtcgaaggtgggatttgttttgtatatgcttctttattgttgtttgttgtttctttattactttgttattatttattctgtttatttgtatgtgttattatttgatattattattacatattatttcttgctgttggtgtgtgggtcatgttgttgggggtagtctgtgggcgtgtggggtgggtataaagaacgtttattctaattaagttgatgatagaacgagggggaattacactgaacttgtcgtggaattcgcggtgcgtccgggccgagcgcgaggacggggtcatcggcgtaaacctcccccacctcgccctccccgcccgcgcgccctgttccgtcctgcacccggcaacaccaaacccgccccaccgaacaccgagccaccacacaaaaacacaaggagcaaacaccgcgcgcgacatgtcagggcgcggatcggggcggacgccncagatcaacaaaacgaacaaagaacggggaagcgcagagagaaggcggagaggggaggaccagcgcgaggataggacagagagacagacaccgagccgcgggccgcgcgcgccgccgcccacgccgggcggaggcaacccgggcgcagcaacacgcactgcaccctagcccaccacacccgcagaaccacaccaccccgagcagagcgcgacagacacgacacggcgcgacacagcccgacgacagcccgcgtcccacacgtgggggcggcgcgccgagcccggccgagcgaacctggcacgacggagaacatacgaagccgcgtagctgacgggcagagacgacagaacaaaggcatacaagacggagcgagcacgagacgcctgacacgcacgaggcgcgaggctcgcacgcagtgcagcggagcggcgcacacggcgaggacgccgcaccgcgcgtcgaccgaggcgtgtcgttcgccgcgacgcgcgggtgcgcgcccgcatcgcactctataatgccgacgcatacgacagagnagcagagacggggacaaccacacgcctgatgtgacgtgagngtagtcggcgccggcatgcgcacgccgctctgtcgccgtacacgagcctcgcagatacagcacgcgaccccaccgcagacagacccagccgcacgaccgacacacgcgcgcaggcgacggcaactcgtctcacacacgcgcgcgccagcagcagctgatcgagagacgaggatgcgtgtgcgcgcacacaacgcaggcggcggacggcggagaagtgtagatcacgaaataatgacaacaacgnggngaacatgatngaacacacagcacgtcgagacagnacacgnacatacgcagngacgtaggagacctggacacacagcagcgagacgtagagactcggcgcgctgcgagcagaggacgctcgacggagagagangcaacgagatagagtcgcagcgagacacggctgtagcgtggacgcgactgggcagagcggatacg

SEQ ID NO: 1802 - DNA, 649 bp, Glycine max
  misc_feature (1)..(27): n is a, c, g, or t
  misc_feature (251)..(251): n is a, c, g, or t
  misc_feature (503)..(503): n is a, c, g, or t
  misc_feature (537)..(537): n is a, c, g, or t
  misc_feature (540)..(540): n is a, c, g, or t
  misc_feature (548)..(548): n is a, c, g, or t
  misc_feature (578)..(578): n is a, c, g, or t
  misc_feature (584)..(584): n is a, c, g, or t
  misc_feature (587)..(587): n is a, c, g, or t
  misc_feature (593)..(593): n is a, c, g, or t
  misc_feature (597)..(598): n is a, c, g, or t
  misc_feature (603)..(603): n is a, c, g, or t
  misc_feature (610)..(610): n is a, c, g, or t
  misc_feature (622)..(623): n is a, c, g, or t
  misc_feature (640)..(640): n is a, c, g, or t
  misc_feature (647)..(649): n is a, c, g, or t
  Probeset Number=SeqID_11581
nnnnnnnnnnnnnnnnnnnnnnnnnnngggaaaaaagtatatgccaaactcattttatattctcttccaccttactccatcctcgatcatgtgaaaaaagtttattttaccaaaaatgtggttatggttctgactgaaaccagtttatgattggcgtatatgcaaaatttgaatggtctaataatgccgattaaatttccgagctaattcctgagattgtgttgttatgcattgttgcagatgaaggtganaaagcagaagaggcataggaagattttgacgttttacactgcttgcttcggttttcggaagcctttcaaggttctatgtgatggcacattcgtgcatcaccttcttgtgaatcgaataacccctgctgacacggccattggcaatgttctcagtgctacggtcaagctctacacaacaagatgtgttctagctgagttgaatcgactcggtagctcgtattctgaggctctggacttctggagggcagtctncataaaagctgtattagtttggcacagatggtgnagncattgaanagaatgttaaggagcttgccagcatggctntggcantcnatcggnaggnnttggntcgggantgggccatatannaacttctggaaggccanttttccnnn

SEQ ID NO: 1803 - DNA, 504 bp, Glycine max
  Peptide Sequence Number=SeqID_9406
  Probeset Number=SeqID_11582
tcccacgcgtccgcccacgcgtccgcccacgcgtccgctcagacatatctgtaacgctgcttcttctgtgaggcatcaatggagacaaaagctttgtccttcgctctgtctctcaatgacctcaccaacaaccgcttctcttccaatacgccacatgctgccgccaaagtttccgtctttaccgtcagatgctctgcttcgggcagtggagagaggccttggacgacttcagacgctagacttgtgcttcaagatggttcaatctggagagcaaggtcgtttggtgcttcagggacccaagttggcgaggtcgttctcaatacatcattgactgggtatcaacaaagtctggctgatcctggttatgctgggcactttgggctcatgacatacccacatattgggaacactggcgtcaatgttgatgatgacgaatcaagacgctgcttccttgccgggcatgcagttacaaactgcgagtgaagtacctcaagctgaagatgt

SEQ ID NO: 1804 - DNA, 1492 bp, Glycine max
  misc_feature (45)..(45): n is a, c, g, or t
  misc_feature (60)..(60): n is a, c, g, or t
  misc_feature (73)..(73): n is a, c, g, or t
  misc_feature (77)..(80): n is a, c, g, or t
  misc_feature (90)..(91): n is a, c, g, or t
  misc_feature (95)..(95): n is a, c, g, or t
  misc_feature (102)..(102): n is a, c, g, or t
  misc_feature (105)..(105): n is a, c, g, or t
  misc_feature (174)..(174): n is a, c, g, or t
  misc_feature (241)..(241): n is a, c, g, or t
  misc_feature (273)..(273): n is a, c, g, or t
  misc_feature (291)..(291): n is a, c, g, or t
  misc_feature (297)..(297): n is a, c, g, or t
  misc_feature (315)..(315): n is a, c, g, or t
  misc_feature (374)..(374): n is a, c, g, or t
  misc_feature (435)..(435): n is a, c, g, or t
  misc_feature (437)..(437): n is a, c, g, or t
  misc_feature (1019)..(1019): n is a, c, g, or t
  misc_feature (1366)..(1366): n is a, c, g, or t
  misc_feature (1453)..(1453): n is a, c, g, or t
  misc_feature (1465)..(1465): n is a, c, g, or t
  misc_feature (1492)..(1492): n is a, c, g, or t
  Peptide Sequence Number=SeqID_9407
  Probeset Number=SeqID_11583
ttgtttttgggtgtggtgttttgtttgtgggtgtgtttttttagntatcttattatatcnttattttgtcttnacannnnacaggacaanncaangcgaggncgngagagtgggggagcagtggtgcgatgaatactgtctactgtggcttgactcgtggtgctactctagacnccactgatcgtctccgctcacactctagcggtccccggcggtgtttgtagtattgagacactaaagnagaatggaggagcggaagtacagcgaggtgtngcgtgcccggggtcgatntttgcnatgtattacgtgtggttntattgtttgttatgtattgtcttgtggtttagttctttgtctcgtgtccgcctgcgccngccggtcgtgctttgtgaggcggtgtaggtagtgctgggacgagtggtggtgcagggcgantncgagaaggaggggttctgtgtgctgcgtgtcttgtgtgtgtctatctcttgtatgagtaagtgggatgtgtgattgtatcattatcagaaggagaagctgagaggcgggtgggtgattcagacgctgagaaggacgaatctgtgtgggctggacaaatatattgtagtattcctctctctcaatattgtgttcagcttgcttgggtcatcatttaacacgtcacaacgcccgcactcgcgcgcgcggggcgcccgcgagagcagagaaaaaccaactataacgtgcattctttcttctgaatattatattgagaagcgtagcaacatatcactctcatctccgtgccgcttctctctgctgctcttccggtgctggccatcctcttactcctcttgtcattctctgttgtatcaccccgatgcatgtggcatataactatatagagtgagatacaacttatgttgtttctgtctagctgcgtcacgcacccacccacacatcagctgtaattagtatatatacctcaacctagacgagctatcgcgtctctccgccgcgcctgcttcctcctctcacgtccntatctctcttacttctccctctcctcctctatctcttatgctgtgtctcaatccgctcagcgcgacgtagtggcgctatggtcatactcactacgagctagccattgttactctctgcactctacaatcactcgacgcgtagaatcacagcgcggcgacactatctctgctcatggacacactatgcgtgtgacgtcagacggctgacggcaggcggcgagtcgtgtgtgaatgtggcggagtcatctcactcgtccgtcgagacagcacactgcgctcatgactgcatgcacacgtctcatgtctcactcatctcgttcatgcgtctcatctcacatacacatcancctgtgactctctctgcgactcactaccgtcgccctactcacgtcatcaccacacactatcttgtcgagatccaccatcagacgaanacatcagacccncaatactctcctcacacacaactcccn

SEQ ID NO: 1805 - DNA, 1531 bp, Glycine max
  misc_feature (28)..(28): n is a, c, g, or t
  misc_feature (63)..(63): n is a, c, g, or t
  misc_feature (76)..(76): n is a, c, g, or t
  misc_feature (82)..(82): n is a, c, g, or t
  misc_feature (87)..(87): n is a, c, g, or t
  misc_feature (93)..(93): n is a, c, g, or t
  misc_feature (106)..(106): n is a, c, g, or t
  misc_feature (135)..(135): n is a, c, g, or t
  misc_feature (291)..(291): n is a, c, g, or t
  misc_feature (294)..(294): n is a, c, g, or t
  misc_feature (302)..(302): n is a, c, g, or t
  misc_feature (304)..(304): n is a, c, g, or t
  misc_feature (307)..(307): n is a, c, g, or t
  misc_feature (430)..(431): n is a, c, g, or t
  misc_feature (454)..(454): n is a, c, g, or t
  misc_feature (479)..(479): n is a, c, g, or t
  misc_feature (564)..(564): n is a, c, g, or t
  misc_feature (870)..(870): n is a, c, g, or t
  misc_feature (1026)..(1026): n is a, c, g, or t
  misc_feature (1032)..(1032): n is a, c, g, or t
  misc_feature (1210)..(1210): n is a, c, g, or t
  misc_feature (1428)..(1428): n is a, c, g, or t
  Probeset Number=SeqID_11584
cagctatctctctcgacgacgacctatnatcgcgtatccgagtatcgccgctgactcaacatntataatgtagtancgctgngaganaatacncctacgcgcacgncgatcgaattacgtgagtctatcgatcanagtatatctcatgctactgcactctgcgctcgagcgagtatacttagccaatcacaacggaatactgtctacagtgtttcgtcgttcgtgcgcgctgccattctaccataatacaattacgcacagcagtgcacgcacatgcccgcgtggcagatngcnacaacatnangtncgacaccgtattcgccaaatatcgagcgactagagatccgtggcgggcgcatgtaactaacgagtatacgactccgcacacaccgtgtggtacgacgatgacactcgcgccgtcgtcggaacnncatccagtacctattccagccgncaagcgacatagagagagggtcgcngctgtcatatcattcatactcagtgccatatcacgcattccctatctcgcgaatacactgtaataatgacttggacatagtcagnggcgtctatacatatcgtacggacgagagtagcacgcataataggcacatcacaaagactggcgagccactcgtcattcgtgttgattatgtggcaccacaaccagtaccacacaccacgactatccgcaatcgcaacgcgcgcgctactcagagccgctactcgcctcttacgacgtacgcatacactacacaccgatcgcgtatataaccacggcgataatagtggcgtgaagcgccgcgcctcgactactgactcgcattgttagccgtcgataacatatagcgcacacaaacaatgcgagtnatgcgacgtgcgtcgacgggcgtagttacgacacacccaccgctccacacgcggcgcgagacagcgacgtgcgcgaccacagtccgagcgccagaatttatagatatatcgtagagcggcgacagcggaagttaagcatttttttatctaaacgcncgaganatataagcacgcgagatcactcgcgcgctcatcgacgccatcatcgcgtacacagtatattgcggcccgcaaccatgcaagatataataagcgtacgtgcgtcgttcagtacgcaggggcacttagtccgcgatgcgtaagcatatacaccgccgattaacacgcgagccgcaccggnagtgagtaattggaacaggcgcatatggacgcgttcagacgcagtttgatacgttacgacaaagagacatatatcaaccgccacgcagcacgtcgatacggcagccggcacggtaaaatgaagaaataccccagacagagctgcgcgcgcggcgggacgttggcctacctcgatatgttatcccgctaatctccactaatatatagattgcctattantagccgtggtgagacagtgaaagagggtagatgcgtcgacgataatcaccggacacacggccgacagacggacgagtatacctacgcgcgcggccccacacac

SEQ ID NO: 1806 - DNA, 638 bp, Glycine max
  misc_feature (145)..(145): n is a, c, g, or t
  misc_feature (162)..(162): n is a, c, g, or t
  Peptide Sequence Number=SeqID_9408
  Probeset Number=SeqID_11585
gttttggtaagtttatatatgtccattaattgctcatactatatactagtaatatctgatttttttccactcaagtagtattagattcctttccccttgcttgaaatttcatttattatatagttctctttaacttctaatagcnatagcacaaataatgcnaagccatttattactccctccatttcttaataattgtcgtgcaaaaattaaaagtaaaagcgatttcatctattatatagttctctttaccttttttttacttaaaggttttttttaagttaaaattaaaaataagagtttataaaaatataatttttttaacataaattaaaagaaccttttaagaaaaaagttgtttggtaaaaaaatttaaaaactttaacctgcttgtttaaaaatagttatcttgtccgataaacaattattagtaaaatttacattttttaaacatctaatgtatatttaaatttttaaacattttttagggaagattttttttaatatttaaaaatgtaaaaaaaaaagttaataataatttcttatgaaaaataaactattttatggataggaatttaataattagaagttaatggagatcatataatttccatcccactattgtaaatttgtgaaag

SEQ ID NO: 1807 - DNA, 1567 bp, Glycine max
  misc_feature (1)..(1): n is a, c, g, or t
  misc_feature (6)..(6): n is a, c, g, or t
  misc_feature (21)..(21): n is a, c, g, or t
  misc_feature (133)..(133): n is a, c, g, or t
  misc_feature (223)..(223): n is a, c, g, or t
  misc_feature (304)..(304): n is a, c, g, or t
  misc_feature (322)..(322): n is a, c, g, or t
  misc_feature (338)..(338): n is a, c, g, or t
  misc_feature (352)..(352): n is a, c, g, or t
  misc_feature (364)..(364): n is a, c, g, or t
  misc_feature (836)..(836): n is a, c, g, or t
  misc_feature (935)..(935): n is a, c, g, or t
  misc_feature (1245)..(1245): n is a, c, g, or t
  misc_feature (1274)..(1274): n is a, c, g, or t
  misc_feature (1322)..(1322): n is a, c, g, or t
  misc_feature (1491)..(1491): n is a, c, g, or t
  misc_feature (1495)..(1496): n is a, c, g, or t
  misc_feature (1503)..(1503): n is a, c, g, or t
  misc_feature (1507)..(1508): n is a, c, g, or t
  misc_feature (1510)..(1510): n is a, c, g, or t
  misc_feature (1517)..(1517): n is a, c, g, or t
  misc_feature (1536)..(1537): n is a, c, g, or t
  misc_feature (1542)..(1542): n is a, c, g, or t
  misc_feature (1548)..(1548): n is a, c, g, or t
  Probeset Number=SeqID_11586
ntgagntagtcgagacgcggnatagatgtgtgcggagtgtgctgtgtcgatcgcacgccagacgcagctgcagtgtgtggcgctcgacatgagcgtgagcgcgcgtagacgcgcacgtcagcacagtaacatnaccatcacagacactactaccagtcacacataccacatctaccctatccgtctcgcacacctactattctcaacatcggtactatatgtntatgacgtatcatgttagatcactgcatacattagtgttgttatgttatacgtcatcacatccttatcatatactatgatnactcatactgagtacgcngtagctcgcgagtatnagtgtgtcagtacncgatgtgacgcngctaatctggtataagttgtgagcgatcgtgtatatagatcgcatttgttgagtgtgtcttctttatgcatgcatcgtgtgagatatgagttagtagtgtatgcacatgtggtgtgcgctgagagcagtatatatagcatgtgagcagtctgcgtgattcgtcgtaatgtatcgcatacttgacgagagcgcgaaagacacatgaagtataagcatagtgagagttgatgattgacaataacgagacacgctcgcaccacgattgactcgtagcttatctttgttggagtattcgtatcataacacaccgctgagtcgctgcgtcaatagcacatgtctatcaatattattaccgcgatttcagtacccatacaagatgaatatcgttataagaaagcaatgctacctaagataatctgactctcagcataacgcgcgcgatcgcgacgatcccgtagcgcgacacgtcgcntgcgccgacactagcaccagaacgtcatgccagactacatctcttttagcgagatctcgtatacacatctctctcacatcctctccatcccatatcaantgatatagccagacacagccagaacacattaagaccgttcaagtagatatacaacgatcagagcagaactacaaaacgaagaaggtagagagaaaagaggtaaggagagtcaggatggcgcgaaaatagacactacatgaatcacaacacgagagacagagacagattactcactcattagagacacacactctaacgtgcaagtctctccatgcattcgtttcgactgcttatcgttcttctctcccacctctatacttaagtacacgagttacagaagaaaacgcacgcgtgggcgtctttgcatatnagagcgctcatatgtacgcggcgggacgncgccacctcgccaacgagagacccaacatccaatcaacaccgatactnaacaaaccatagggaatttatttgttgatatgcatgtacattacactctatcacctctactacacacaaaacacacacactatcataggaccgatataggatacgatatgaacatcacacggcctaagcgcaacacgaggacgcgcggagggcatggagtctattgtgngagnnctataanccannantattatnacatatatccactaatttnnttttntttttncttttcctctcttttcccc

SEQ ID NO: 1808 - DNA, 510 bp, Glycine max
  misc_feature (92)..(96): n is a, c, g, or t
  misc_feature (258)..(280): n is a, c, g, or t
  misc_feature (359)..(363): n is a, c, g, or t
  misc_feature (419)..(423): n is a, c, g, or t
  Peptide Sequence Number=SeqID_9409
  Probeset Number=SeqID_11587
gtggatgagcatgacttaatcttttgctctgttggcgattaattagggaatgctgatactaacactaacagcctgggtgccacaatttcatnnnnnaagatgcacatctgacccttctggccagcaagtgcgtcttaccccaacgactactcagattgccatcttaattttagggctgagttggatggccgtaggcacaggtggaatcaaaccatgctctattacatttgccattgaccaatttgacacaacttcttnnnnnnnnnnnnnnnnnnnnnnnaacttctttagctggtactacactgcacaaacgttggtccaattgaccagtttgactataatagtttacatccaaaacnnnnnctgggtattggggtttggcacactaggtttgctcatggtatgtgcagttatcttannnnncgcaggaacaagagtttatgcctacgttccacagagtgaagcatattttctagtatcgcacaagtgttaatttgctgcaggtcgatt

SEQ ID NO: 1809 - DNA, 737 bp, Glycine max
  misc_feature (737)..(737): n is a, c, g, or t
  Peptide Sequence Number=SeqID_9410
  Probeset Number=SeqID_11588
acttttgttgtctaacatggctttggtgaatccgtttctgtgtaccactcgaacgtccctccctctgcgagtttcaggtccaccaaaccaagtcctaccacgttggactctctgctcccaatattcattcaaaacatcatcactaagatcgaagcaactcaggtgtggcgccactgcaaacattcaagcagatcacgccgcttcttgtgccccccaccagggaggaggagagcaaaagcggactatgacttggacacagggaactgcaccccctttgtatctcccctcagaaggtgccccgaaaatgcacccttttgggcccccaaagtgttttgaataaaccggtctcgtggttgtttcaaggggttgggcaatgggcccagtttctcccctggttaaagaaaaattcggcttggccccccacaggggttacccggatatctttccctggcagggcacaccttttgatttggattggaacacctctccgaagtggcccttataccctgggcgatggcccactttttgaacaggggcaggggcaaacattgtgtcggaaaataaatcctccccgcctttcccaggtgtgagaggcccaaaaaattccccacggggctctgttttttgtgtttaaaacccttctcttgacggcggcgcgcgcccctctcccaggggtgttttctttcggcggcatctggacgatcccctctcccagaaaaccctccccaaatcggttn

SEQ ID NO: 1810 - DNA, 2567 bp, Glycine max
  misc_feature (23)..(24): n is a, c, g, or t
  misc_feature (31)..(31): n is a, c, g, or t
  misc_feature (34)..(35): n is a, c, g, or t
  misc_feature (43)..(43): n is a, c, g, or t
  misc_feature (59)..(59): n is a, c, g, or t
  misc_feature (67)..(67): n is a, c, g, or t
  misc_feature (94)..(94): n is a, c, g, or t
  misc_feature (108)..(109): n is a, c, g, or t
  misc_feature (134)..(134): n is a, c, g, or t
  misc_feature (138)..(138): n is a, c, g, or t
  misc_feature (149)..(149): n is a, c, g, or t
  misc_feature (154)..(154): n is a, c, g, or t
  misc_feature (164)..(164): n is a, c, g, or t
  misc_feature (168)..(168): n is a, c, g, or t
  misc_feature (170)..(171): n is a, c, g, or t
  misc_feature (174)..(175): n is a, c, g, or t
  misc_feature (179)..(179): n is a, c, g, or t
  misc_feature (220)..(220): n is a, c, g, or t
  misc_feature (229)..(230): n is a, c, g, or t
  misc_feature (232)..(235): n is a, c, g, or t
  misc_feature (237)..(237): n is a, c, g, or t
  misc_feature (250)..(250): n is a, c, g, or t
  misc_feature (254)..(254): n is a, c, g, or t
  misc_feature (265)..(266): n is a, c, g, or t
  misc_feature (277)..(277): n is a, c, g, or t
  misc_feature (286)..(286): n is a, c, g, or t
  misc_feature (329)..(329): n is a, c, g, or t
  misc_feature (336)..(336): n is a, c, g, or t
  misc_feature (371)..(371): n is a, c, g, or t
  misc_feature (376)..(376): n is a, c, g, or t
  misc_feature (380)..(380): n is a, c, g, or t
  misc_feature (387)..(387): n is a, c, g, or t
  misc_feature (415)..(415): n is a, c, g, or t
  misc_feature (418)..(418): n is a, c, g, or t
  misc_feature (431)..(431): n is a, c, g, or t
  misc_feature (459)..(459): n is a, c, g, or t
  misc_feature (470)..(470): n is a, c, g, or t
  misc_feature (501)..(501): n is a, c, g, or t
  misc_feature (517)..(517): n is a, c, g, or t
  misc_feature (544)..(544): n is a, c, g, or t
  misc_feature (571)..(571): n is a, c, g, or t
  misc_feature (616)..(616): n is a, c, g, or t
  misc_feature (631)..(631): n is a, c, g, or t
  misc_feature (663)..(663): n is a, c, g, or t
  misc_feature (667)..(667): n is a, c, g, or t
  misc_feature (669)..(669): n is a, c, g, or t
  misc_feature (734)..(734): n is a, c, g, or t
  misc_feature (758)..(761): n is a, c, g, or t
  misc_feature (857)..(857): n is a, c, g, or t
  misc_feature (875)..(875): n is a, c, g, or t
  misc_feature (890)..(890): n is a, c, g, or t
  misc_feature (911)..(911): n is a, c, g, or t
  misc_feature (955)..(955): n is a, c, g, or t
  misc_feature (961)..(961): n is a, c, g, or t
  misc_feature (971)..(971): n is a, c, g, or t
  misc_feature (998)..(998): n is a, c, g, or t
  misc_feature (1008)..(1008): n is a, c, g, or t
  misc_feature (1155)..(1155): n is a, c, g, or t
  misc_feature (1170)..(1170): n is a, c, g, or t
  misc_feature (1219)..(1219): n is a, c, g, or t
  misc_feature (1225)..(1225): n is a, c, g, or t
  misc_feature (1266)..(1266): n is a, c, g, or t
  misc_feature (1295)..(1295): n is a, c, g, or t
  misc_feature (1361)..(1361): n is a, c, g, or t
  misc_feature (1410)..(1410): n is a, c, g, or t
  misc_feature (1431)..(1431): n is a, c, g, or t
  misc_feature (1438)..(1438): n is a, c, g, or t
  misc_feature (1445)..(1445): n is a, c, g, or t
  misc_feature (1447)..(1447): n is a, c, g, or t
  misc_feature (1454)..(1454): n is a, c, g, or t
  misc_feature (1510)..(1510): n is a, c, g, or t
  misc_feature (1536)..(1536): n is a, c, g, or t
  misc_feature (1541)..(1541): n is a, c, g, or t
  misc_feature (1560)..(1560): n is a, c, g, or t
  misc_feature (1565)..(1565): n is a, c, g, or t
  misc_feature (1577)..(1577): n is a, c, g, or t
  misc_feature (1583)..(1583): n is a, c, g, or t
  misc_feature (1611)..(1611): n is a, c, g, or t
  misc_feature (1627)..(1627): n is a, c, g, or t
  misc_feature (1636)..(1637): n is a, c, g, or t
  misc_feature (1640)..(1640): n is a, c, g, or t
  misc_feature (1645)..(1645): n is a, c, g, or t
  misc_feature (1649)..(1649): n is a, c, g, or t
  misc_feature (1663)..(1663): n is a, c, g, or t
  misc_feature (1729)..(1729): n is a, c, g, or t
  misc_feature (1731)..(1731): n is a, c, g, or t
  misc_feature (1739)..(1739): n is a, c, g, or t
  misc_feature (1748)..(1748): n is a, c, g, or t
  misc_feature (1751)..(1751): n is a, c, g, or t
  misc_feature (1753)..(1753): n is a, c, g, or t
  misc_feature (1810)..(1810): n is a, c, g, or t
  misc_feature (1819)..(1819): n is a, c, g, or t
  misc_feature (1839)..(1839): n is a, c, g, or t
  misc_feature (1843)..(1843): n is a, c, g, or t
  misc_feature (1868)..(1868): n is a, c, g, or t
  misc_feature (1880)..(1880): n is a, c, g, or t
  misc_feature (1903)..(1903): n is a, c, g, or t
  misc_feature (1924)..(1924): n is a, c, g, or t
  misc_feature (1945)..(1945): n is a, c, g, or t
  misc_feature (2024)..(2024): n is a, c, g, or t
  misc_feature (2027)..(2027): n is a, c, g, or t
  misc_feature (2031)..(2031): n is a, c, g, or t
  misc_feature (2034)..(2034): n is a, c, g, or t
  misc_feature (2046)..(2046): n is a, c, g, or t
  misc_feature (2077)..(2078): n is a, c, g, or t
  misc_feature (2091)..(2091): n is a, c, g, or t
  misc_feature (2109)..(2110): n is a, c, g, or t
  misc_feature (2128)..(2128): n is a, c, g, or t
  misc_feature (2131)..(2131): n is a, c, g, or t
  misc_feature (2143)..(2143): n is a, c, g, or t
  misc_feature (2151)..(2151): n is a, c, g, or t
  misc_feature (2159)..(2159): n is a, c, g, or t
  misc_feature (2188)..(2188): n is a, c, g, or t
  misc_feature (2210)..(2210): n is a, c, g, or t
  misc_feature (2213)..(2213): n is a, c, g, or t
  misc_feature (2227)..(2227): n is a, c, g, or t
  misc_feature (2253)..(2253): n is a, c, g, or t
  misc_feature (2264)..(2264): n is a, c, g, or t
  misc_feature (2267)..(2267): n is a, c, g, or t
  misc_feature (2274)..(2274): n is a, c, g, or t
  misc_feature (2288)..(2288): n is a, c, g, or t
  misc_feature (2296)..(2297): n is a, c, g, or t
  misc_feature (2304)..(2304): n is a, c, g, or t
  misc_feature (2306)..(2306): n is a, c, g, or t
  misc_feature (2310)..(2310): n is a, c, g, or t
  misc_feature (2347)..(2347): n is a, c, g, or t
  misc_feature (2354)..(2354): n is a, c, g, or t
  misc_feature (2363)..(2363): n is a, c, g, or t
  misc_feature (2382)..(2382): n is a, c, g, or t
  misc_feature (2385)..(2385): n is a, c, g, or t
  misc_feature (2397)..(2399): n is a, c, g, or t
  misc_feature (2403)..(2403): n is a, c, g, or t
  misc_feature (2405)..(2406): n is a, c, g, or t
  misc_feature (2411)..(2411): n is a, c, g, or t
  misc_feature (2434)..(2434): n is a, c, g, or t
  misc_feature (2455)..(2455): n is a, c, g, or t
  misc_feature (2469)..(2470): n is a, c, g, or t
  misc_feature (2481)..(2481): n is a, c, g, or t
  misc_feature (2509)..(2509): n is a, c, g, or t
  misc_feature (2542)..(2542): n is a, c, g, or t
  misc_feature (2548)..(2548): n is a, c, g, or t
  misc_feature (2553)..(2553): n is a, c, g, or t
  misc_feature (2565)..(2565): n is a, c, g, or t
  misc_feature (2567)..(2567): n is a, c, g, or t
  Probeset Number=SeqID_11589
ggggggttttttcacacactcgnngcccgcncgnngtcgcgcngcgcgtagcgtcggcngcgactcnctacaccgccatatagtacttcatacnactactctctcgcnnctctcgcccccgcccccgctcgcgncccngctacgacctnctctntgtgatttantcantnnctnntctnatgctcagcctcgaacgagagcgagatagaagatgtagaanattgagagnntnnnnantcacatattagcnccanaaatagacatnncactacacacncgactagcnagtcaactaggcaagcactcacatacgcatcatcatagttaantaatagncgctcgaacacactgatggacacctccattgcacngacancgcnatagagntacgacgagaggagtatgcgcgcctcgngcngggacgatcgctntcagtacatctatgagacatatgcgatncataatgatgnggacttatacgtccaagtcttagttcatacncgtacgtatgaggtanctgacactatcgaactacgaaagcganaccaatatacagcacacgactaccacnatctactactagactgcactcatcatcatcgccatctatctcganactcatcatcacaanatcataactatacagctcacctgacatagccnctangngcactgcgcacgcgctacacagctctatgatatcgcaaccactacatacgagtcagcactaaaantcatgatactatctacgtcgtgannnnccgatcggagacgtgatacgtgagtatgaatgcggtggatgtgtcgggcgcaacatgaagctgtcgtcgatcgtctttcgttagcactgatacgcngcaactacgtgcccatanactacgcaggtaatntattactctctcttacatatntgtacgctgctgactcttcagtaagatatgacaatcgtagatantcgacnacgagaccanattgatgtcgatcatactagactgtangacggtctgncgtgcaatgagatctcgacggcgatgatacgtcataagtcatcatgattcgacacgagacgctatcgctgtatctgattacgtagctagatgcatatatatgcgcacgtcgcacgatagctgagatgtacgtagatgctgcatcgtngatgatgtgagtcantgtcatgatgatgactgtgtgatatgtgactttggagttgtgtacgttnagcganagacagagacttacgcaactgaacagagacacggcggctancatagcgacgcgactgcccgacacgtcgntacgtacactatacagacgtcagcagcgctatacgtcgtagtctgtcgctcgccgcatgcagatgnctaccacgatctcgcgacatactcatgaacgcacgtgcgcgtcaagcgncgcgatgtctcagttctgagntacgtcngtgacangncatcgcncgatagcagcagtagctcagatatgatatgacctatctgctcctgccgtcgtacancactgatcgatcctatcaacacgtcnactcnacgatcatctgatgtctanttgtnactatgctaganttgcantcgtaagacttgctgcgtatatcatcangacgtgcgctgcagcntcatgccgnncgnatcgnactncagtgtcgttgaanactcatcagtaattcatgcgctgacctacctactacatcatactgcctactatatcctagctgacngntactgtcntcatcaaanctncntctactacagtgtagtatcgcatgaccaactcatcgacacgcatgcagtcagaccancgacgggtngtatctacgtctcgactgantcgnagcggtttcactagtacgtctgacntctgctgacgcnacgtctgtctccgtgcgctagcngctgccattcgtcgacgtcanctgtgacgctgagtatcaggntgccggcgtcgcgctaatgcgagacgatctggtacatgcgatcacgtgactggtcgacagtcagaattcagcatctgcngcntagnatnagtgtctcatgnacgaccgcatgctcctcgtcgcatatgcttnnatattcgagatanagctgcgcgcagcgcganngagcactcgagtcagcanagnagtcactgtgcnactgacgntagtgatnattgaacgttggactgtcacgacgcgacnattacgtcaatgtgcagcgagncgnctagtctacgctgnagtgacgtcgacgtgccacgacgctngaggttatcgnacnccgtgtnaccactcgtccgcnatccgcgnncgcacantncatnacactcaacgacgtgcgacatcttcaatacgacgcancatagtncatgatcanccctgcgtccacgagatcncgntcgctacgacgnnncatnanntgtgntgctaattggtcgacagtgcagncacacgttcgacgtcgcgacntcgtactcaccacnntacttcattanctcatacgcagctctactaccgactggnactagtcatatgatactgctggggaccccagcncggtgnagcantctcactgcagncn

SEQ ID NO: 1811 - DNA, 2011 bp, Glycine max
  misc_feature (5)..(5): n is a, c, g, or t
  misc_feature (20)..(21): n is a, c, g, or t
  misc_feature (23)..(29): n is a, c, g, or t
  misc_feature (31)..(38): n is a, c, g, or t
  misc_feature (40)..(42): n is a, c, g, or t
  misc_feature (44)..(45): n is a, c, g, or t
  misc_feature (55)..(55): n is a, c, g, or t
  misc_feature (65)..(65): n is a, c, g, or t
  misc_feature (68)..(68): n is a, c, g, or t
  misc_feature (70)..(70): n is a, c, g, or t
  misc_feature (72)..(72): n is a, c, g, or t
  misc_feature (76)..(76): n is a, c, g, or t
  misc_feature (94)..(94): n is a, c, g, or t
  misc_feature (102)..(102): n is a, c, g, or t
  misc_feature (220)..(220): n is a, c, g, or t
  misc_feature (250)..(250): n is a, c, g, or t
  misc_feature (408)..(408): n is a, c, g, or t
  misc_feature (1070)..(1070): n is a, c, g, or t
  misc_feature (1086)..(1086): n is a, c, g, or t
  misc_feature (1097)..(1097): n is a, c, g, or t
  misc_feature (1295)..(1295): n is a, c, g, or t
  misc_feature (1303)..(1303): n is a, c, g, or t
  misc_feature (1446)..(1446): n is a, c, g, or t
  misc_feature (1496)..(1496): n is a, c, g, or t
  misc_feature (1576)..(1576): n is a, c, g, or t
  misc_feature (1606)..(1606): n is a, c, g, or t
  misc_feature (1656)..(1656): n is a, c, g, or t
  misc_feature (1724)..(1724): n is a, c, g, or t
  misc_feature (1801)..(1801): n is a, c, g, or t
  misc_feature (1818)..(1818): n is a, c, g, or t
  misc_feature (1931)..(1931): n is a, c, g, or t
  misc_feature (1943)..(1943): n is a, c, g, or t
  misc_feature (1966)..(1966): n is a, c, g, or t
  Peptide Sequence Number=SeqID_9411
  Probeset Number=SeqID_11590
ttttnccctctcttcttccnntnnnnnnngnnnnnnnntnnnanncagcgctgcncgcggtggtnggntngntagnatccgactcctttgtatntaattgtngtatgtgatgttatataatctctttattattattgatagaggagagagaaataccttttataactttgagctggcaaccaccccacacaccattccgaccggccgaagaacatcattntccactactgctgaggcggcgacctgatcngaacgacacccaactattctctcactcgtctctacgtctcgcttcgtattgtgactaaaggataatattatcataggtggttgttagacggattacaacgcaggtttataaggtcgagttatgcgtttgtttcttatgtctctgtggtggcggggcgntgtgtgagctgtgggttgagggcccgctctctgccgcggctcgttgtgtgacgtcgttgttctctccgtctggtgcgctcgcctcgcgcctctctagcgcgtacacaccaccgtaacactacgccatacacacacacgaaacccaacacacccacacacacagacatcacgacattacgtaccacacccttacactatactcactgttcatatcttattttctgtcgattgtgtctctccgtcctttttctcttgctctttcctctatttctctaccttaccaccaccttcgctcttcttttcggtgcgtcgtgcccggtgccggcggggtgtcgccatcaccgcgccgcgcctggtgcggcctctctcccgctcggtgtgcggacgctagtcttctcggtcacacctcacttttgactagagagataataagaatactttgtgagtaacgtagcgtgtgtaagttgtgggatagtatgctcatccccgcctctcgatatgctttatccaatctccccccgccagtcccgcgcgcgtctccttcacgcactcgtgtggatatcttcccaccccactccacgctacactcgaccaatataccagcataataacaatcaccaccactcaccactactattactgtccgagctctaccatgttcngcgctctatccatcanacagaggacanatatagattgatgctgcacgcgacgccgagtccgacggcgaataatgctgtgtcttacgcggtgtcgcgacgtcgctctcactgtggtcgacatgtatgattcgacatactacgcatcatactcacactctactagtctacatcctacacgtacacatacctccgacgttcatgtggccttgcgtcgtcgcgcacgantctctctntctatcatctgctgtgatagtgagtatgaacatgtgtagtagacacacatctctacacacggtatacacgcataactgaggctgttccactgtctctcgctcaccagcgtccccctcactgagctcctgcgtcatccatactngattacacctcgatacacgctctatacgcttgtcctacctcgccgacacnctgacgcactgcatgatgttctgtctcgttactacactaggggtatctaatcaatggagagattatatctcgtctctccnctcctttactaggttcactgatgtccgtancattacatgactacggtcgcggtgcgtcgctcgtacgcgagcgacatcgnatatatcagatgctcaagacgccgtcttataatactcacttactacgcacactcacctgctataatanctacctcgttcatccgcatgccatctcagactctgcgacacacgtttctctagactcatctgcatcgtgcgtgaggnctgacgtatttgtcgtntatgcgtccggcttgacttcgagtattattcttacgataccagatggaatagtaatggtagttttaaggccgagtggtaggtactcgctagtaatgactcaaataagattaantaccgacgtcgnagctgtaccgttacggcagcaangataacgcggcgccgcttggaacgcccgcgcacgcttcatctcgg

SEQ ID NO: 1812 - DNA, 1769 bp, Glycine max
  misc_feature (1648)..(1648): n is a, c, g, or t
  misc_feature (1684)..(1684): n is a, c, g, or t
  misc_feature (1688)..(1688): n is a, c, g, or t
  misc_feature (1715)..(1715): n is a, c, g, or t
  misc_feature (1717)..(1717): n is a, c, g, or t
  misc_feature (1730)..(1730): n is a, c, g, or t
  misc_feature (1732)..(1732): n is a, c, g, or t
  misc_feature (1769)..(1769): n is a, c, g, or t
  Probeset Number=SeqID_11591
tcagctacgtaggccccccccccaatgtgagacccatcattgaaagcttctttattatccacaagatcttgaatgatgaagaatatactgaagtctctgttgctaaagttgctcctactaggaccaacaaagcttccattgctcaagttgttactggtgatgatgatgaaattgacactgcagagttgtctcttgcaccaaaactcggtagagaattctctgaaatgagagaaagaaaattggattcgaatgaaatctttgctttcatctgcgaaaagaacaagaaagttatcaataatatgatcaagcaagattacaatctattgaatgattctatgagtatgatcgccaagaaagttcccaagactctcgacttcgaaatccgtagagcttacttccgtaaagaactcagcaaaatgcaaagatctggtggtattcgtctcagaatcaagagatctagacttatggaaaactccttcaatcaactctattctcgtaatgctgatgaactccgtagaaaactacaaatcgaattcgttgatgaagaaggaatggatgctggtggtgttgcaagagaatggttccttgaactttcaaagcaagtctttaatgccaactataatttgtttatcccatctgctaatggtaatactttccaacccagtcttatctccgatcctgccaatctcaattacttcaaatttattggtaaattcatcgctaaagccttgtttgataaacaattattggaatgctatttcacaagatctttctataaacatattcttggtcaaccaatcaattatcatgatattgaagatgttgaccctgattattacaagagtcttaaatggatcttggaaaatgatatcacccaagctggtcttgatttaaccttcagttatgaattcgataaatttggtcaaattgttgttgaagacttggtaccaaatggtcgcaatactgcagttactgaagagaataagaaagaatacgtccatttgatctgtaaccacaagatggctagaggtatcaaagctcaaatcgaatccttcctttctggcttcttcgaactcatccccaagagtcttattgccatctttgacagtaaagaactcgaactcttgatctccggtcttcctgatattgacacaattgatttgaaagagaatactgaatatcatggatatgatgctaattctcaggttatcagatggttctgggaaattcttgaagatatggatagcactcaaagagctaatctcttacaattcgtcacaggaacttcaaaggtgccattggaaggtttctcagttttgagaggtatttcaggacctcagaaattccaaatccataaagctggtaatcctgaagctcttcctactggtcatacatgcttcaatcaattggatctacctgagtatagatcaaaggagcaattgattgaaaaattgatcattgctattactgaaggtaaagaaggcttcggctttgcataaaggtcatattctggtcgagaataattcaaattgctttttatacagtactaattatccaaagagttttctttttataactgtgttccatttcgtttgataaatattataataataactttattaattacagtatatgtgctcaatacccnaataaaagcacattttattgtgatatatacacactnttanattgtgtaaataaacatacctcattananaaataaattatcncncttaaaaaaaaaaaaaaaaaaaaaaaaaaaaaaaaan

SEQ ID NO: 1813 - DNA, 1884 bp, Glycine max
  misc_feature (32)..(32): n is a, c, g, or t
  misc_feature (78)..(78): n is a, c, g, or t
  misc_feature (91)..(91): n is a, c, g, or t
  misc_feature (379)..(379): n is a, c, g, or t
  misc_feature (384)..(384): n is a, c, g, or t
  misc_feature (444)..(444): n is a, c, g, or t
  misc_feature (509)..(509): n is a, c, g, or t
  misc_feature (520)..(520): n is a, c, g, or t
  misc_feature (544)..(544): n is a, c, g, or t
  misc_feature (588)..(588): n is a, c, g, or t
  misc_feature (599)..(599): n is a, c, g, or t
  misc_feature (692)..(692): n is a, c, g, or t
  misc_feature (739)..(739): n is a, c, g, or t
  misc_feature (754)..(754): n is a, c, g, or t
  misc_feature (803)..(803): n is a, c, g, or t
  misc_feature (845)..(845): n is a, c, g, or t
  misc_feature (869)..(869): n is a, c, g, or t
  misc_feature (927)..(927): n is a, c, g, or t
  misc_feature (1006)..(1006): n is a, c, g, or t
  misc_feature (1060)..(1060): n is a, c, g, or t
  misc_feature (1141)..(1141): n is a, c, g, or t
  misc_feature (1148)..(1148): n is a, c, g, or t
  misc_feature (1159)..(1159): n is a, c, g, or t
  misc_feature (1169)..(1169): n is a, c, g, or t
  misc_feature (1179)..(1179): n is a, c, g, or t
  misc_feature (1186)..(1186): n is a, c, g, or t
  misc_feature (1188)..(1188): n is a, c, g, or t
  misc_feature (1290)..(1290): n is a, c, g, or t
  misc_feature (1309)..(1309): n is a, c, g, or t
  misc_feature (1349)..(1349): n is a, c, g, or t
  misc_feature (1358)..(1358): n is a, c, g, or t
  misc_feature (1360)..(1360): n is a, c, g, or t
  misc_feature (1366)..(1366): n is a, c, g, or t
  misc_feature (1368)..(1368): n is a, c, g, or t
  misc_feature (1444)..(1444): n is a, c, g, or t
  misc_feature (1453)..(1453): n is a, c, g, or t
  misc_feature (1478)..(1478): n is a, c, g, or t
  misc_feature (1480)..(1480): n is a, c, g, or t
  misc_feature (1603)..(1603): n is a, c, g, or t
  misc_feature (1620)..(1620): n is a, c, g, or t
  misc_feature (1674)..(1674): n is a, c, g, or t
  misc_feature (1775)..(1775): n is a, c, g, or t
  misc_feature (1779)..(1780): n is a, c, g, or t
  misc_feature (1785)..(1785): n is a, c, g, or t
  misc_feature (1787)..(1787): n is a, c, g, or t
  misc_feature (1797)..(1798): n is a, c, g, or t
  misc_feature (1805)..(1805): n is a, c, g, or t
  misc_feature (1807)..(1807): n is a, c, g, or t
  misc_feature (1833)..(1833): n is a, c, g, or t
  misc_feature (1861)..(1861): n is a, c, g, or t
  misc_feature (1866)..(1866): n is a, c, g, or t
  Peptide Sequence Number=SeqID_9412
  Probeset Number=SeqID_11592
tggaaattagtgtactgagagtgatcgacagncgatgtgtcatcactgtatacactaatcgagagctggtttagtcgnttcagtcgtcgtncacacctcgtataactgcagagagttttatgcgatgtcaaggaactgcagtgcgagtacgtcgcgtagtgatacagagcagcatgtgagatcgtgaacgaggctgcgaggcgcgacatatgatgcagtaatattatgtgtatgtagtttagttatctacgagtgatacagagagtgttagatgtatgtgatatcgtctgtaatagatatatgtctattgtgcatattgtgagcgtcgatcaattatcactatccatctctcagctcagtctatgtcacatgtagagantagtnatatagatcatcaccagagtatagcgacaatcggatgatagatggcagcgagtcgagcanaaaagtacatatgtgtggactgtctgtaggtgaggtgatggagtgtgctcatccctctcgatgcncagcgtatacnacacccacatatacaggtatcatncatacacgtagagttcatagtcgactctagagggcgtcatacanttgtcacactncggcatacagtacatatagtacgataccatatcgatcatcaccatcgcccacgcgcctgcgatcatactaacattcatagtatatcttatgantatcgacgaatgaatcatgcatcattgtttgtcgcgctgctcgcgcngccatggttagctgngagctttcgcatgagagctagtctactatataatggtgtattatgacanacacattatatgtctcgtgaggtcacacagtctgcgatcganacgtgagcatcatcacctacacanagactgatgagtagtgctcattatcatatatatcagtgcttgatgtcatgacactcancgtcattccgcatcattatatagtgatgagagttagaatcatacgcatagtcatgctgtacgagtatacacaagatatngctaagcgatagacactaaataatgatagagagtgaagtacttaccactgacancgctcaacacaccagcgcagcgcgagcggcaacattagaccaataatgcgctctgtgtgcggccttgggcgtcgtaacgcncccgccngggcggcgcangccgcacggnctgcgggcgncggatcngntggagttgctttatcattccgtaccgtctatagcatcttatatctccccatctctattttatctcgtgttattgtatatactgtatagcttcctgacctaantctctatcttctcacattntatatcgtacgtggtagtgtgatgtctggagtctcacttncgttgtggngngttttntntctctctccacaacacttagtattcatcatatctcgctactaagtctctcttgtatttcattatatacattatgtnttgagcagngtgtgtgctcaccaccactcttatntntactcccctgcgctgcagtggggtgtgtgcctcgtgcttcctggcgggaatataagtagaggagcacagcactgcacgcccagagcaggatactgaatgtttgctacttcctgtgtgtatggnggatgtgcatattctantaggtatgtactcagcaacgcgatgtgagattatgatataataagtaaatgaantttatttagtactagtatctatatacaataaccaagactacaagagatatagaatataaaatctccaagactataatactctcacataagaaagagagagngganntcgcngngcgccctccnnctccccncncccagcacccaacacccgacgcagcncacgagagagagaggaaaaaccaggcgnggcanagggccaccaccacacac

SEQ ID NO: 1814 - DNA, 1961 bp, Glycine max
  misc_feature (1658)..(1687): n is a, c, g, or t
  Probeset Number=SeqID_11593
acggctgcgagaagacgacagaaggggacattcaatccctttggtttaatctctctagggttattttctctctcttggatacaaatagaatcttcgattttctctttctctgactctagggtttcattattttcttctgtagatccatctatctagcttcggagctgccaaatggacgtcgcagtcactgccttccggtcaccgctgtatcatcctccgaagaccggctcaacgagtcctgcccgtcagctcccggttccggtttccacttttgggttttccagaaagcagcaacggttcagttcaggtatgtatccccaaacacaagcacaagcaaggtcgtagaagagggtttgtagttagagcttctgcatcctcatctccggagtcggatgatgccaagattgctcctcttcagtttgagtcctcaattgggcagtttctttctcagattttgaaagatcatccgcatcttgtgcctgctgccgttgaccagcagctccagcaactccaaactgaccgcgatgctcatcaacaaaacgaacaaccttctgcttcaaccactgatttagttttgtacaggagaattgctgaggtgaaggctaatgaaaggaggaaagctctggaagagatcttgtatgcattggtagtgcagaagttcatggatgctaatatttctttgataccctctgtaaccccagatctttctggtaaggttgatttgtggccaaatgaagatggtaaacttgagctgcttcactcacacgaagcatatgagatgattcaaaaccacctggctctcattctcggtaacagagctggagatttaacatcaatagctgaaatcagcaaattcagggtagggcaggtctacgcagcatcagtgatgtatggttattttcttagacgagttgaccaaaggttccagttggagaagacaatgaaagttcttccaaatgcaacagaaaaagagaatagtgctcatcaaactacaatggacaatgcaagacccagtattgaagaggacacttctcaagtgatgtctcatcctgaagtatctacctggcctggtggtgatgtccgtcccggtggatttggctatggtgtaaaggcaaccaggttgcgtaactacgtgatgtcctttgatggtgatacactacaaagatatgcaacaattagatccaaagaggctgtcagcatcatcgagaagcacacagaagcattgtttggaagacctgaaattgttgtaacacctgagggggcagtctctaaggatgaaaacatcaaaattagctttggtggtttaaagaagcttgttttagaggctgtgacatttggttcttttctctgggatgttgagagctatgtggactcaaggtaccattttgtgttgaactgagtaaatctttatatgtgtatcctttttagatcccaccaggtgggagggaacctcgtgcattcagttgtccttttgagttctgtttgctctcatacatcacaaggcatagtttatagtgtgttggtactgactgatggagtaaatttgaatgtaacttcggtgttaaaagtccaaatattgtttcactaattaatatgtatatactgtagtggtagtggctctggatttcactaataaagggaagcttattttctagttnnnnnnnnnnnnnnnnnnnnnnnnnnnnnncagaagaaaagagaggagtgaaccagcatcagcggaattacacaaaacacagattccgtgaggcccggtgacccatactgtcccctagggcagtgtcttcctccccgcgcggaggcggcgggcccgctgggcggggaggtgaaatccggccaacgggatcgcagacctatgggatatccctgctttgcgcggctcggcgaagaggtgcggcggcggcggccaaagaggctgtcagcatcatcgagaagcacacagaggcattgtttggaagtcc

SEQ ID NO: 1815 - DNA, 781 bp, Glycine max
  misc_feature (460)..(460): n is a, c, g, or t
  misc_feature (781)..(781): n is a, c, g, or t
  Peptide Sequence Number=SeqID_9413
  Probeset Number=SeqID_11594
aaagttttgatgccaaggatttatttcggatcccggggatgtatctcagagggctatgagctttccaaaagaactcccagatcctgaatgcaaggatcctgaagatggggttatgtggacgatgctgagcgttcacccccttgcattcacgccctcgagtacaaggacgcatgtcaggcaaagcaaatctagagccccatgtatgacggcatagggtaagtcacccttgattgatggctcagatctcaaggatggccccgacctatatgtattccgcaaccagaagtacgtggccattgaattgtggcaggtgaaatctggttctttgtttgacaatgtcttatttatagatcatcctgaatattgcaaacacctgggtcaagaaccatggggcaagcacgaggacgttgagaaggcatcatttgaagaggctgagaagaagagggaagaggaggactcntaggatgacccagttggctgtgatgctgatgaggaagaggacgatcatgatgaagctggcaatatctccgatgctgaatcagagacgcaacctgggggaggccccaaggaagagggtgtacatgatgaactctaggaagtttgcgagacggataaagattgagcggaagttattttcccgatagttatatttcagtcgtagctagatagtcttccctagataagcagctcgtggaagactgatagtaaaatctggagcctttgctttgatcccatttgtctatcacacagattagtacaggcaaagatgtctctcttgggn

SEQ ID NO: 1816 - DNA, 585 bp, Glycine max
  Peptide Sequence Number=SeqID_9414
  Probeset Number=SeqID_11595
ccacgcgtccgcggactcgtgggcttgtttccggttcttgatgaaccacagtctttgctcatatgtctctgagctaatccgcctatcagctacagctagttggctgacggtttacaatggtacttacaaataacctaacaattaaggaccacctggaggatttgaaatcaaaaccaaaggcgaacaatatcacaatcatgcccattttgccgcgacagtctgaagagagtgaactcaggtgatctctgggtattcaccgatagaagggatgtggtagacatggcaacagtgacaagggagaatctcagaaggcttttcatgtacatagataagttgcctctgattgttccagactccctttttgacacatatgactctcacataaggtaagtgattgcaacagaacagattttaatgcatgctgttgtcttggattgatagagctataatcccttccacttaaagttagtcacataaaaacccgaacccgagtcggctaattgagttcgtactatatatagagttgcagtacttgcttcccacttctgctgccagaagtatccagccctgtgttaattgtgggtt

SEQ ID NO: 1817 - DNA, 324 bp, Glycine max
  Peptide Sequence Number=SeqID_9415
  Probeset Number=SeqID_11596
ttgctgcctgcaggtgaccaaatgtataaatattgacctttgtctaagggtagtggttaaacacatgccaccatgagctgtgaataggtgctgaatctgctgatgatgtgccgagagtggcactcttcgtttgcactgccttaaggctgattaaaacagaatcgggtcttcctgaggatttcatagactccattactgcaaggtgtgatcgctatttcaaagaggcagatctggaggttgtggcattggttgatcgggactcctaattcacatgagcttgggttgaggaatggagggttagggagtacactgaaaagtggctaa

SEQ ID NO: 1818 - DNA, 637 bp, Glycine max
  misc_feature (436)..(436): n is a, c, g, or t
  misc_feature (581)..(583): n is a, c, g, or t
  Peptide Sequence Number=SeqID_9416
  Probeset Number=SeqID_11597
taagccccaccctaataacgggccgtaggtatccggggggtaagaaaaagcgcgagggggggggggcgcctgatacagtgccaaaaataatgggggagttgtctcaacccccacaatgggtggagaatgtgttataaaaaggaaacgcgggggggaggaagggagggtttatatgagcgttttggtggtgtaaaaaagcgtggggcgcggcccgaacaaagagggcgaaaaaaaaacaaaccaagacagcccggtccctaggggtgggaaataagacgtggtcgaaaagggcgtagagatttttttccccccgcggatttgatacccaatgggggtcccgtcttgggttaagcccaaacccataagcccaggttgccagctaagttagttgtgcacctcagtccggttcatggcctccggggacgtgtttggcggncctgcagcatcggatcaagtcgccgtggtacccacggccggcaagcagccccaccggccgcagggcccgtaaccgccgcccccgcggcccgggtaccctccgccgcggccccccgcggtggagttccagctttgagaagaagaannnaaaaggcgcgggaggaaggtggtgagatgggatgcgggcgcgggcggaagaagg

SEQ ID NO: 1819 - DNA, 1364 bp, Glycine max
  misc_feature (1226)..(1226): n is a, c, g, or t
  misc_feature (1276)..(1276): n is a, c, g, or t
  misc_feature (1305)..(1305): n is a, c, g, or t
  misc_feature (1317)..(1317): n is a, c, g, or t
  misc_feature (1364)..(1364): n is a, c, g, or t
  Probeset Number=SeqID_11598
acgatgtttcgcaataaacactgccacaacccctttcacttcttctcttattacccgacgtcgccttttcacgtaacattattccaggccgtcttttgtcgttccgtcatctctccatctacgattttatttaccatcctccgccccgcagatggttagactcccggatgcgaggctccccactatctaacgcatttgttgtcaggtgttttagagagcaacgtgcatatcgcggcgcgcgagcgcactttatgtagtcttatatccctcgagcccacgacacatgctctctgatacgagaataaatattgttggtgagagactgagtgcattattcaccgcataactcccgtaccgtacgacgacgtataggcttattaaagtattcattaataatatactaggttatagcatagatgtaacggatacatgctgatcattttatctatcgcctccacgcagcccgcgcccgcacgcggtttgatcacctatttattcatccgtacggcgctaccggaatagagcctggagatatactatatagcgccgagtataacagccgtcaccacctcattctcgtgtctgtattatgtactctcatgcgcgcccgtctcgccgttctatgtgttatttaagatctattactcgccgcgatattcctcccgaagattatttacgcgcgtattgccgggcgagggatattgaacaaccacccggttttgatgacatagtacaggcgcgcccgtatctttaagtagtttatcacagcatagccggccgtttgtgtcggcgacgtgcgcgggataaagctgtgcccccgccccgccgctccgcccccttatatatactctctgctatgtatgttatgtcgataaagcggcgtgcgcgacagaaaacataattagttctcgcgaatatatgatacgttcacacacgtatgtagatgtgtggttatacaatgatagcgataataaagacgtaggttggtgtgtgcggcgcttgcctctcgcgccgctatctacacccgaacgttatattatatataaaaccgtgcgggtgacgcaccataagttcatgtgtgcgaacgaattgtgccgcacagtcgagctgatatgtatgtgtcgcgtgcgaaaaaatatataattatcaactctgtttatcgataccaaaattataacagtgtgcgcgcgcatggacgcgcggaacgatatacttagtttagagtntgatgtggtatatatatcgagttatgagactcaactcattcgcaacacgnacacgctagtgatagacatggcatcatancttcacgactgnatgggcgcccgggtaatatacgggcctatcactgactgtacttatan

SEQ ID NO: 1820 - DNA, 738 bp, Glycine max
  misc_feature (696)..(697): n is a, c, g, or t
  misc_feature (699)..(699): n is a, c, g, or t
  misc_feature (706)..(707): n is a, c, g, or t
  misc_feature (709)..(709): n is a, c, g, or t
  misc_feature (718)..(720): n is a, c, g, or t
  Peptide Sequence Number=SeqID_9417
  Probeset Number=SeqID_11599
gcctccctaagtataattagcagatgattaatgtgctttataacaatatggctgttttcaaagttgaatacacaagcttctttcgtacgctttcgaatgtttaagcacacatgagcattccagatgattacctgttagtcccgctaaagtttgtaatggtacatattggtaaagagcgtaaggaagcatgggccagttggtttaaagcttatatacatgaggtctcttacagtgggatacctgatcccgaaaggaagatctgttatggactcagtgaatccttaatatacacttagtaactatctctgcctccctgcaatttatgcatcacaaataggtgactttggagaggtttgcagcctgttccaattagtggagcatccgtatcatgaactccctggaatggaaagatatgctggcttgcccccagattgggcatatcgcccaggggtatgcaagtctttatgttattccttacgcttcccgttaggtgtaaaggcgtcctataatttaaccctataaaatagcgcttaacttatagcggataaaatagtagcgcgtttctaagatattcttttcccgtaggtttacgataaccggccccgagtattattgtcacacgagcaatgcggtcgtcttggtctcagaaacgaaataaaagaaatgaaaaaaacaggcgcgcgccgcttctagagnngnatccaanngncttacgtannncgcggtgccatgcgacgt

SEQ ID NO: 1821 - DNA, 1383 bp, Glycine max
  misc_feature (485)..(485): n is a, c, g, or t
  misc_feature (571)..(571): n is a, c, g, or t
  misc_feature (638)..(638): n is a, c, g, or t
  misc_feature (1185)..(1185): n is a, c, g, or t
  misc_feature (1377)..(1378): n is a, c, g, or t
  Peptide Sequence Number=SeqID_9418
  Probeset Number=SeqID_11600
tatgcatggatctattactatgatagtgttatattgactgtccgtagggtaggatacgcaggctccgcacgcgactaaatgaataatatatctctatgtacgtcgttgtaggatgtagtttgtaggatgtattgatgtaagagatggagaatgaggttagatacatagtaagacagagttagtagtacgtatttacaagttatacttgatatattgcgttgtgagtggtgctgtcgcagttacaatcggcgctctcaacgtaccgatagggcgtctaaggtgttgttttgatagtcttttagtaaaataattaaacatagtccgagggtggtgagatcgaaggtatgagggtacttacaagtaagtagtgtcttatcattattttatttgaaagctgagcggcagaactgcagatatgggacagataagataggattaagtggatgatcaatctactcatagactcatactccgatacactatgngatatgaggtaatgatgagataggtggagcgggcagacgattatgacgtattatgtatcaagatggttctcgtgtctggcttgtanttgtgatgtgttgtctttggcgttacgccgctcatgtttagagcatcgggctgatggcaggttaggngacggagccataaacacattgcagagaggatcgggtgggctagctaacaagaggcaaagtgatgatgggcagaagcgagcggtagggtgctgtgcatcaagagtcgcgacacgagtctagagctacgaattcttaatgagggtcggagacggggacgagtataaactataaacgagaattaattggtggtgtttatttggattagaactcattcgctagttgggcatgaatgactaagcaaccatcatcctcgctcgccgcgtagacattatatacttagcgctatatctgtggcgggaggacgatcgacggtgggtctatagtatgagttcaagtgtatatagagaggaacagcggtggtgggaggagagaacagcgtcgtgaggtactcgtaacaggtacgtatgatgcagtaataacgaaagtgggcaaagacgagaggtggagacgcggagacagccacataggttaacacgactgatgtacgcagcacggaacagaaagagtgatggtatatatatcaacacattcatacgcaactaatcanaagtagggtggattagtgtagttgagaagtacgtgcatgtcagggtggtgcgttgggtgttggtatatataggcgacgagatgttctatcgcagaggttgttgggggttctggttcattaagttgtccgcctttcttcgtctagagtctatttattttcttgtatttcttgcgtattgatagatatgattannttaat

SEQ ID NO: 1822 - DNA, 1914 bp, Glycine max
  misc_feature (1)..(1): n is a, c, g, or t
  misc_feature (63)..(63): n is a, c, g, or t
  misc_feature (116)..(116): n is a, c, g, or t
  misc_feature (149)..(150): n is a, c, g, or t
  misc_feature (161)..(161): n is a, c, g, or t
  misc_feature (198)..(198): n is a, c, g, or t
  misc_feature (317)..(317): n is a, c, g, or t
  misc_feature (323)..(323): n is a, c, g, or t
  misc_feature (347)..(347): n is a, c, g, or t
  misc_feature (352)..(352): n is a, c, g, or t
  misc_feature (391)..(391): n is a, c, g, or t
  misc_feature (393)..(393): n is a, c, g, or t
  misc_feature (416)..(416): n is a, c, g, or t
  misc_feature (445)..(445): n is a, c, g, or t
  misc_feature (447)..(447): n is a, c, g, or t
  misc_feature (465)..(465): n is a, c, g, or t
  misc_feature (469)..(469): n is a, c, g, or t
  misc_feature (474)..(474): n is a, c, g, or t
  misc_feature (478)..(478): n is a, c, g, or t
  misc_feature (491)..(491): n is a, c, g, or t
  misc_feature (516)..(516): n is a, c, g, or t
  misc_feature (545)..(545): n is a, c, g, or t
  misc_feature (577)..(577): n is a, c, g, or t
  misc_feature (598)..(598): n is a, c, g, or t
  misc_feature (616)..(616): n is a, c, g, or t
  misc_feature (671)..(671): n is a, c, g, or t
  misc_feature (750)..(750): n is a, c, g, or t
  misc_feature (807)..(807): n is a, c, g, or t
  misc_feature (887)..(887): n is a, c, g, or t
  misc_feature (940)..(940): n is a, c, g, or t
  misc_feature (1094)..(1094): n is a, c, g, or t
  misc_feature (1505)..(1505): n is a, c, g, or t
  misc_feature (1548)..(1548): n is a, c, g, or t
  misc_feature (1565)..(1565): n is a, c, g, or t
  misc_feature (1718)..(1718): n is a, c, g, or t
  misc_feature (1835)..(1835): n is a, c, g, or t
  misc_feature (1857)..(1857): n is a, c, g, or t
  misc_feature (1867)..(1868): n is a, c, g, or t
  misc_feature (1874)..(1875): n is a, c, g, or t
  misc_feature (1882)..(1888): n is a, c, g, or t
  misc_feature (1890)..(1897): n is a, c, g, or t
  Probeset Number=SeqID_11601
ncgtcaaaccagtcgcactcagatgtgaatctacatgtaggcaggctcacgctgtacgatgcngttcggcgtcagcttgctacgcacactatacatagatgtatgatatatatccncgtataccacacgagatatacacacagttcaanngatgataatanacatcatctagatctcgcaaacgagagtcatctcagnagatatcatatatctattcatactctattcgtcatcagttgctatgatatcgctcacacacagactgatggcgtcatcctgctctctcgttagtaagcatctcactcgacagactcgtnactcangaggtctcgtacctatcacaagtnaactntcacgtgatacgactatccgtacgacatagttgcgtccntngtccgtctatcactctccgagantacgggtcagtagcgagcatgagagagcngntgcagcgcgcacaccgcncgancgacntggngacgcgcgcgcgntggtacgtcgaccatctctgatatntccgtgttgatatgtagtgtcgtgtcagntatgtgatctgttcgtagctgtaagatcgatnctacagtagcacgataagcantagtagcgatatcacacntggaccgatccatgactcgttcatgcatcgaggcgatcgccgtgacagacacgantcgcaggagtcgagtaagacgcgctactcgtccctgagctcagtagagtaaccgtgcgtcatatgacgttggttgtctntacatagtcgataatcgatgcacgcctagcgtactactgtatgtacatgagtcgtcntaagtatgtcgctttctgctgatcatcttacatgctcctcgtgtcgacaatgcatctctctccgtagactcagtatccgnctcgacgacgttgagcagagagctaatgacgcatagccgttatctagctagtnctacatactatgcatgagcgtgtacatgatcatacactctcgagaccgaatattcatacttgcatcgaagttctgaaccgagaatagcgtcttagctcatcgcacttaacatcacgatccttctctctatcctcatacttcgtgttgtggctcngactatctgtaggcacgtgtatcataacatactccgatacgcagagagttactattttgtgatgatgagtatgtcgtacatgattattattaagcgcgaccacatacaatatattcaacttacgcagtacatcattgctgacacagtcaactcagtcagatagtccacatgatgccacaccaacctatcactgcacatactctcgcgacaacacaaacataaatatcagaacaatacaaatagaaatgtaagagagactaacatcataatatagtcatataacgataaattattttatctagattatagagatagagatggtgtaagatatgacagtgtacagatatgtatgatagtatgaagttgtatatcattctcgcggtgagtagcgtgcgagggcgtcacgcggtntgaggcgttacatgcgtgaaggacgagatcatactgtatgtantcgtggctcggagccgngattgtaacgcagtgactgcatgtacggctagtcgatagttatgttcagatcatgagaactagagtgagaacaggataatgatcagagtcgataatgatgcgattctaagagagtaattacatatgtaggaaatagcgcgccccgcacgacgngactttcgcctcgccatcacgttcatgcgcgcgtaccccaccattgtcatgcttataagaccgtagctcactcctactcactcgcttatacgcaccctccatgaagtctgctcgcgnctgtcgtctaccgtcatgtttnttcctagtanntcatcnnatgtatnnnnnnnannnnnnnnaaaaaaaaataaaaaaa

SEQ ID NO: 1823 - DNA, 533 bp, Glycine max
  Peptide Sequence Number=SeqID_9419
  Probeset Number=SeqID_11602
gggaattctgctcgagcttcctgcttcttctgtatatctctctacgcctctccgcgtgtcgcttcaacgggatccgtcagattttccgtcagccttctagggctttctcgaccgctctgaactaccaccttgacacaccggacaacaaccctaaacttccatgggaattcaccgaggccaatcaagcaaaggttaaggagattttgtctcactatccatccaactataagcaatctgctacaattcctcttttagatcttacccagcagcagcataaagattaactacctattgctacaataaatacaatagctaagattatagaaattcctcccatacaaatatataagattgccacattttactccatattcaatcaacctgaagttgggaaataccatgtgtggggtgatagaacaacacctgatatgataaggaattcaccaaaaatggagagaacctgattgaagcacgtggaaataaatcacaatgaaatgagacgggatgagtggctttctgttacgagaatggag

SEQ ID NO: 1824 - DNA, 1509 bp, Glycine max
  misc_feature (60)..(60): n is a, c, g, or t
  misc_feature (67)..(67): n is a, c, g, or t
  misc_feature (69)..(69): n is a, c, g, or t
  misc_feature (181)..(181): n is a, c, g, or t
  misc_feature (238)..(238): n is a, c, g, or t
  misc_feature (247)..(247): n is a, c, g, or t
  misc_feature (297)..(297): n is a, c, g, or t
  misc_feature (415)..(415): n is a, c, g, or t
  misc_feature (613)..(613): n is a, c, g, or t
  misc_feature (936)..(936): n is a, c, g, or t
  misc_feature (995)..(995): n is a, c, g, or t
  misc_feature (1288)..(1289): n is a, c, g, or t
  misc_feature (1321)..(1321): n is a, c, g, or t
  misc_feature (1330)..(1330): n is a, c, g, or t
  misc_feature (1416)..(1417): n is a, c, g, or t
  misc_feature (1419)..(1420): n is a, c, g, or t
  misc_feature (1433)..(1433): n is a, c, g, or t
  misc_feature (1478)..(1478): n is a, c, g, or t
  misc_feature (1481)..(1481): n is a, c, g, or t
  misc_feature (1486)..(1486): n is a, c, g, or t
  misc_feature (1491)..(1491): n is a, c, g, or t
  misc_feature (1493)..(1493): n is a, c, g, or t
  misc_feature (1499)..(1500): n is a, c, g, or t
  Peptide Sequence Number=SeqID_9420
  Probeset Number=SeqID_11603
cgcgactctaatatattagtattcctcgctcccctctcaccgtatccctcacgcacacancacacancncccagcatgagtaagatttgatttatatctctacgctcgccgcgcgccaccgccagtggtcttgatatgtagtagagcggtctccgcgccgcgtgatctactatttgtgtantatttttctttctgcgcgcgcgcgcggtcgatggtttgacgcacaccgcgtagcgangcggagatnatatatagatagtttcaccccgctccaccaccgcgcccacgctcatcccngtgggttattctgttctctcttctgacatactgtacctctcacaagcaacatagtatgtgagtcgcgctatggtgcggcgcgcgcggtggtggttgtgatttgctgtgtatgtggagnaccgatcccctctcactctttcgttgtattatgccagcagccataagcacatcgcgcgtgtgtcagtgtgtgtgtttctcatacttgttgtcgcggcgcgcgctcctctagtatgaccacatcccgtcccacaccacaaggaagtaagcgatgtgagagtgctcctctacccccacatatatttgtatctgttctcgnctcatccaccacaaaatcgcggggtgcggtgttgtgtatatttacacatagtggtgttccacacatttttatgtacctaaccacaccgccaaacaatatattcccatgcttatttcgcccataaagatcgctctcccccgattatattttttttccctcccccctcgttgctatgtttttctggccccctctttcttctctcccgcggcgcggttttgtttccccctttgttctataggcccccctctgtgtgggggggtacattctcccccttataaggtttttctttattaagtaaaagtagttgttgatccccggcgacngcccacaatagggtggcgagagggggaaagtgtactttcgcaaaaggtttattgtgggncttggccccgtcgacaaccgagcccccagatcccggcaaccccaaccccacactcaccaccatctccatactttcctatattagatcttcttggcgccaggagcgttgagatgtgaggccatcatcgccactcgcgacagatggtaacagtgatctgtgtggttaacacattatttaagagccttatttagcagagatgtgatctaatctctcttcatcaaatgtagtctgctgtatatagaatcgctttgttcctctctgtccatcttcggaattggtctccatattaacannaagccaacacctacagaccaacgcagtcacgnattaattcntgtttccaatcccaccccacctccactatatttcaacctcgcactctctccattctctccttcccacccttcttctattcatcctnnannaacctttcctacnacctataaaatactactattccaataacttcttccctttaccccntcncccanccccncncccccnnccccccccc

SEQ ID NO: 1825 - DNA, 1673 bp, Glycine max
  misc_feature (293)..(293): n is a, c, g, or t
  misc_feature (827)..(827): n is a, c, g, or t
  misc_feature (951)..(951): n is a, c, g, or t
  misc_feature (957)..(957): n is a, c, g, or t
  misc_feature (1160)..(1160): n is a, c, g, or t
  misc_feature (1168)..(1168): n is a, c, g, or t
  misc_feature (1244)..(1244): n is a, c, g, or t
  misc_feature (1283)..(1283): n is a, c, g, or t
  misc_feature (1295)..(1295): n is a, c, g, or t
  misc_feature (1308)..(1308): n is a, c, g, or t
  misc_feature (1331)..(1331): n is a, c, g, or t
  misc_feature (1349)..(1349): n is a, c, g, or t
  misc_feature (1397)..(1397): n is a, c, g, or t
  misc_feature (1399)..(1399): n is a, c, g, or t
  misc_feature (1404)..(1404): n is a, c, g, or t
  misc_feature (1431)..(1431): n is a, c, g, or t
  misc_feature (1447)..(1447): n is a, c, g, or t
  misc_feature (1454)..(1454): n is a, c, g, or t
  misc_feature (1456)..(1457): n is a, c, g, or t
  misc_feature (1515)..(1515): n is a, c, g, or t
  misc_feature (1549)..(1549): n is a, c, g, or t
  misc_feature (1580)..(1580): n is a, c, g, or t
  misc_feature (1619)..(1619): n is a, c, g, or t
  misc_feature (1660)..(1660): n is a, c, g, or t
  misc_feature (1663)..(1663): n is a, c, g, or t
  misc_feature (1673)..(1673): n is a, c, g, or t
  Peptide Sequence Number=SeqID_9421
  Probeset Number=SeqID_11604
tatgaaaggcgatagagctatatatgatgttcatctatagtgaatacatgtgattatatgactaagagacacgtgtgatgaatactgatatgctccacctacgctcgcgccataacccgcaccacacgcagacgaaacgtccgcagcgcgggagaagagggtatagaatataagtatccaagaagtaacgtcacataacgaacgtgtgggtgagaagtagtaattgtatgaaccacttatactcttctacatatgcagttacgtggtataaagataatatgtccaatttagtntcaacatatatactgatgaatggtgaactgtatatctctccgcacgtggacgaatcggatacgggttatggcgcgtcgctaaaacgataatgataaggagaaagcaaaagtgcaataacgaaataagagcaatgagcaaagatacaataagcaaagaacacagagtactataacgtagagcatagacggcgacgcgaaacagcccgaacgcataattagccttgacttatgtcagaaggatgtaattaaaaacaatccaccaccacacccatatcatgaacacacacattacccgcgctaacagcagcgcgacggtaagatgatgtcggattctgtgtactatgatgatccctcgcgataaaaccatattcatatataaagacatcgccgcgcgcctagctccgcgcgtgaggaatctcatgctggacgtagtataatggcgtatcctattgcgagtacgcgatatactaactgactagagatcagaagaggtggcgggatacgcagaagagacgaccttcaaaaaagacaggngtaataacgcatcacttatgattggtatgtgatgcaggacgagaagaatatgaaaacgagaagcatagagaggcacgagagaccacatacaccggatgctgattcgtgcaatcgatctctcgcnaatgcnagacacgcatcgtaatacaacctgactgataatgtatgaatgtcatatcacataaacgcgatcacatcgccacgaggtatgtaaccaccaaatctacaccgaccgcacatcatcatatagacacatgtactcgacgactatatacacgagcaactcatatctatgagagttatatgatgtgttagacatcattctcttcgtcnacacacanaaacacgatgagtatatccgaacatatgtacatagtctagacatatatcactcatgtgtgtgctgtaaggcaactnagatagatagtacacacatcttaactattcaacacaaancgtacgcgcgtntataagtagatangaatagacgcaagtgctaatatntatacacatgcaatatanatcgcgacccagcatgcacacagcgatataaatatgggaagtgctgtnantatantactatgcagacgcgtcgcgctataantcgcagacgatggaantgcatgntnngtcgatgtacgactcaagggaacatagtctgatagacgaacaaacatacacgcaacanagaggacactcggatagtgagatatcagcacatncaccatgcagtaaagactacatagcgtaacncacagtgcggtaacaacatatatcaataactacgatcantgcactgcgcttctagactgagcactatcatcacggactangangacatcgcan

SEQ ID NO: 1826 - DNA, 462 bp, Glycine max
  Probeset Number=SeqID_11605
ccatactcctagggaacccaagggggggatttttttatctaatactcttttgacctacttacattctgagatcaacttcacatcgtcaatgccatagcagaaacatggggagcctctaaccactacttatatctcgttaccttcacttcttatatatgagcactattcccacaatatcatattgtcaaccaatcaacaaacacgtgggggaagaaaatatcaggctgaagccaacttttgcatgtgcctagccaattcttggtgctacacatacctaactcaaaattgagtccatacagttattgagaatggtttcagattagatgcaccacgggatggtacattggtgattaacaagggtcgatttctagtccgcttgggaattactcttttgtgcttataaatacacgggctacctaagggtttgaaatgtggatttagaagagtgtgtgggtgaagttg

SEQ ID NO: 1827 - DNA, 1780 bp, Glycine max
  misc_feature (1)..(1): n is a, c, g, or t
  misc_feature (41)..(41): n is a, c, g, or t
  misc_feature (46)..(46): n is a, c, g, or t
  misc_feature (102)..(102): n is a, c, g, or t
  misc_feature (112)..(112): n is a, c, g, or t
  misc_feature (121)..(121): n is a, c, g, or t
  misc_feature (125)..(125): n is a, c, g, or t
  misc_feature (130)..(130): n is a, c, g, or t
  misc_feature (138)..(138): n is a, c, g, or t
  misc_feature (179)..(179): n is a, c, g, or t
  misc_feature (184)..(184): n is a, c, g, or t
  misc_feature (186)..(186): n is a, c, g, or t
  misc_feature (238)..(238): n is a, c, g, or t
  misc_feature (240)..(240): n is a, c, g, or t
  misc_feature (247)..(247): n is a, c, g, or t
  misc_feature (263)..(263): n is a, c, g, or t
  misc_feature (276)..(276): n is a, c, g, or t
  misc_feature (286)..(286): n is a, c, g, or t
  misc_feature (340)..(340): n is a, c, g, or t
  misc_feature (363)..(363): n is a, c, g, or t
  misc_feature (476)..(476): n is a, c, g, or t
  misc_feature (511)..(511): n is a, c, g, or t
  misc_feature (531)..(531): n is a, c, g, or t
  misc_feature (546)..(546): n is a, c, g, or t
  misc_feature (553)..(553): n is a, c, g, or t
  misc_feature (607)..(607): n is a, c, g, or t
  misc_feature (616)..(616): n is a, c, g, or t
  misc_feature (619)..(619): n is a, c, g, or t
  misc_feature (627)..(627): n is a, c, g, or t
  misc_feature (642)..(642): n is a, c, g, or t
  misc_feature (645)..(645): n is a, c, g, or t
  misc_feature (656)..(656): n is a, c, g, or t
  misc_feature (658)..(658): n is a, c, g, or t
  misc_feature (708)..(708): n is a, c, g, or t
  misc_feature (893)..(893): n is a, c, g, or t
  misc_feature (918)..(918): n is a, c, g, or t
  misc_feature (1086)..(1086): n is a, c, g, or t
  misc_feature (1186)..(1186): n is a, c, g, or t
  misc_feature (1191)..(1191): n is a, c, g, or t
  misc_feature (1466)..(1466): n is a, c, g, or t
  Peptide Sequence Number=SeqID_9422
  Probeset Number=SeqID_11606
ntatcgtcattcgctgttatcgagctactaacattgacatncatancctatcatatagcgtgctaacagatatactatacatagtcactagtatatgcggantgtaatcaangtcgatgantcgnagatnagtattantagtacatcactaagtactgaagcttgtaaagatagtatanagtantngacgacgagatgtatgatagtgatatgtgcgggcgcaggcagtaggagtgantntatcatngcgattaacacttagngcgtatttcgcgntgtgtaggcngcgagatagactacacgatgtgacgtcagtccgaggtgcttagagcagtgtgangtcatgatcatcactgtcgtcantgagagcatagctcaacgtcatatatgagatagcatcgtcagcatacgagtggtggtacgcagtgcgtacgtcgatacgagtaagatgtggcagtgatatgagatacgccacnatcatacgagcgagtaagatagcgaggatgtgtgnagagtggcgcgttcagtagnggcatgctgagcgantcttacnaacgcgtgatgctgcccatcagtatatgacacagcagcaccatgtaacaacgantcgtcggangancgtcgagnagagtagaaatacgnctnctgaccgcgtntnccatcgatttacgcaatatgtatgtcgtcatcgacgagctacgactatancgtgcgatatcgagagtgacgcagatgatgtgcgtcgttcagcagatagtagacatcgtacggatagctctggtcacgttacatatcatagcatcgtacgatacgagagagtcaatcttgacattggaggtcgcgacgtcctactacgtcatgtatatagtgtcagacatgatgtaagtggatcngagcgtagtggtccgatgagagggntcgcgcaagctgtagtatcattaattcatcatataaactacacactcgtagatctcagagtgcagatgctcggttatcacagtgaagaagcatacatggtcattgttgtaacagtagtcgttatagagtagcgatagtctaatcaactgcaattatatagtgaacganaaagagttatcacgtagtagcgtacatagtcagacagaatcaggatatcatagctgtacacaatcatgagtgcggaggctatcgaacgacgtcgctaagnacctnctcgtccagccatggcaatagacagtcacgcgcgggcgtcgcagtagccagatgtgtatgagacggcgatcagagaaggaagtgtatgttgttgcctagagagagaggagcgcgcaagcacgtacgagtgatatagatctcgacgtgagagatcactgatggtagagtatggttgtgatgagagtagatgtaagtataggtaggtagacgacgatcacgaggtgtggctagacgtagcgcggctgccccagctgattcctcactctccacgctcnaacaacgtatctataaatacacgtagcgacacgcgcagactcacgtctctacttatatagtattatcttcatttatgtagttcgatagagaggaatctggctctctatctagttgtagtcactatcaggataatgataagagaaggaagatgagaggaggacgcagcatgcgctaatcgcacgcgtatccatactcagagagagtagcgcggctccctttcgaacatagatatattacatgcacactagcatatataataaaatcagacagagcgagagggagagaagtgagataacgaacaagacaagaaaga

SEQ ID NO: 1828 - DNA, 468 bp, Glycine max
  Probeset Number=SeqID_11607
tctatgcactctcattcatcttccttcatcatccccttcatcatcttcttcttctttttcttctctcaatccaccatgttcaactaccttctctccctctaacgatgggcctctcagatccgttgatttgaatagttgcaaaggaaatgattacgaccatgcagattcattaccgttggtttgattctgaggctaaaatacggttgttatctaactgtatatccagtccctattgcaactgataagccgctttcaaggtgttatcagcttgctgaccctggggactttggtctgagtgaatagataagttggtcgcaagtttgcaagatgccatattatatacagagactttataggctatgcaatgcatccttttcacctgatggacctgcgtctgaagaggccatcgagaaagttcgtgagaagttagaaagaatcaagccatcagatgtaggtcttgaacaagag

SEQ ID NO: 1829 - DNA, 461 bp, Glycine max
  Peptide Sequence Number=SeqID_9423
  Probeset Number=SeqID_11608
acgagtttatatttgaattatacaatgatgtaaatgctcaaactttggcgcaaattactggttcagtttcaccacctactgtacctaaactgaaccagattgaggatctcaatgcagattttaaccaggggggtttggaagattctcaatatgtcatggtagaggcagttagagaacctgaaaatgttgaaatcagacatcatgatcagaagaagtgtccatataacaaattctgggaagcattattgaaaataaacgatccagagagtcctatctcatcaattgattccatcacaaacaggattgatccaatattggatgatgtagatgttggagaatgtgagattctatggcaggatctggttctcgatgaaagaatgtggatatgttcatatggagaggtctaccatgcgtactggaatggcacagacgttgctgagataacgatttaggatcaggat

SEQ ID NO: 1830 - DNA, 1394 bp, Glycine max
  misc_feature (874)..(874): n is a, c, g, or t
  misc_feature (937)..(937): n is a, c, g, or t
  misc_feature (958)..(958): n is a, c, g, or t
  misc_feature (1103)..(1103): n is a, c, g, or t
  misc_feature (1185)..(1185): n is a, c, g, or t
  misc_feature (1189)..(1189): n is a, c, g, or t
  misc_feature (1316)..(1316): n is a, c, g, or t
  misc_feature (1394)..(1394): n is a, c, g, or t
  Peptide Sequence Number=SeqID_9424
  Probeset Number=SeqID_11609
ctcccccccctcctcatccactatccacgcttcatactcgcgccggtacgacacaccacaacagatgcgaagacatcacccccagaggggagagccgacactcttaaagaaagtgggagccctcccgggtgtggagaagagaagcacccctaggagacaacactctagagcgagacgccagcgaacacctcgtctaccagagaacgatctcataactacgactaactccaggcctctgatcaagccaacgccatcggctggcagggcgccgcggttctctcgagcttaagggtagattaacagcgcagccgtccacagctctcaacaggaacggcaagtatggcaatgatcaggcattaaggctagagcgaacacaggaccatcaatagccaggaagaaacgaatagcttttgactaccggagatatactgttccgattggaatgtctcttgccgattacgtgatctcacgtgagtatcatcctgggcaacgccaaccatcacagattctacagaaaagacatattaattatacctcatgcgcgctacgtcaatcaaaactcactattagattagaacgaatgacacgatcctcgtgaagcgatcgccttgagttcttataggctcccccgcccccccgccagcgttctcggcaacaggctactcacggggaagatacacacaagtccttccatcagataaacatagagaagcacgaacgaactacatgtaatgtaccttatttccacatcagtgaagccgaggttattgcagagactcacagacgatgaatgtgtcgacgtatacgtgacccgtctcaccagtaagcgtcctcttcgctcagtctctacacccatcgtgaagcgctccgtctncctgggcaccatccagtgtgtgatcggagctatgcatacgctgtaatttacacatatcatcgnttgatatctcccacatccaanccgaccgtcattctgtattatattgatcgttgcgcgacagagataagtatgtgtacgacacgacgtcgcaccaggtactcgaacgaccgcgcaactcgacctcacattctaccgacagtgtcacatgactctctaccatatcttnaaatcgaccctgagacatatctacgaacacatgaagtcgtagaggaatcacttattatacgtagagaggatggtcacttgtntatnacttatgagcgtgtcgatcgtactgcatggaatcgacgcgagtgagagacttatacacactcgcgtctctacggacacattataatcacgactacagcgacgcgatcagcgcatattgcgctacatncgcgcgtctctacacgtagactgactctgactacaggtgatcctccatgcgacgttcttgcgtgttcagcgtattatn

SEQ ID NO: 1831 - DNA, 1488 bp, Glycine max
  misc_feature (259)..(260): n is a, c, g, or t
  misc_feature (952)..(952): n is a, c, g, or t
  misc_feature (954)..(955): n is a, c, g, or t
  misc_feature (958)..(962): n is a, c, g, or t
  misc_feature (964)..(966): n is a, c, g, or t
  misc_feature (968)..(971): n is a, c, g, or t
  misc_feature (1012)..(1012): n is a, c, g, or t
  misc_feature (1486)..(1486): n is a, c, g, or t
  misc_feature (1488)..(1488): n is a, c, g, or t
  Probeset Number=SeqID_11610
gttcccctctgcccgtctcacagcacactattatgacccccttaatttatattcccacaccacacctggcgttctgttgtacacgcctctcggagtgtctttgccgtatcggctccaccccggctaacatgtttcttttgtttctcgtcgcagtacttgatgctatgcggttatttcccagtgtctctacctttcctttacacacaatatattctgttagattacctggccgcacaaagactggtaagtgatttgccanncaatatacaattatctaaacgctacaattggcgtgagacgtttctgcgtcaggttcagtcggttaatccgaccactcaccgcgcatggacctgctcccaataatatctcttattatgtattatctcactgttctctctgtctggtcttttcctcattgtcgatctcaatcctacgctttgctgactgactccttgctcttactagcgatgtcggttcgtgttgtcgaggaagtatcgcagtttaaagaggatgaatctcgggatacgtcgcctttacctcacagctcaaagcgtccctccctacacggcttcgactatgtacctgacattattactcttgcgctcgctctctatatctctctatcgctcctgtacctactgccaccgttgctagacgtctagcgacgctgttagcgtacgccctctgcaatttgactcctcgtgatcctagtgatgttctgcaatctcattactttctcatgctgacgtattacttcaacccgcgcccaccagctctatactacctaatctcaatgtcatagccggtgcactcctctatcaccgcgtctattatgcgtcgtgctgatctatcgactaatagattctcgactatgctgtcttgcggtctgcggcacgcgagacgcgggcggtggtgagttcctcgcccttgcatgagagggactctctccccntnnttnnnnntnnntnnnngtgggattcactctagatgtatttttttttataatatgcantcgctgcccagacaactggcggccactcgagcgttgataattatcctgtggtaatcgtccgcggcaggaatacacatctatagtctcttaatagtagacggctctgcccaccccgctgggagtggaattcttcccaagccttttctgatgctcattcttaaagtggacggtgacttaatatggcggcggctttggcgagaaatcatcctggaggcacatcagacttgtcatcacactcggtgcgcacaaattgtgtttatgcccgcattccacaaattctgcccgtgagcacactattcctgaactccgggatagactcaaataactacgttacaagctccttggattgttggtcctcacatcaggaatgtgagcgcacattcgtcagcatcttacattgtgcgtgtattgtcggctgtcaacgcgggcagcgagtgtatctctacgtgcgggcgcaaagaacacatgacacgngn

SEQ ID NO: 1832 - DNA, 1539 bp, Glycine max
  misc_feature (16)..(16): n is a, c, g, or t
  misc_feature (56)..(56): n is a, c, g, or t
  misc_feature (66)..(66): n is a, c, g, or t
  misc_feature (99)..(99): n is a, c, g, or t
  misc_feature (103)..(103): n is a, c, g, or t
  misc_feature (116)..(116): n is a, c, g, or t
  misc_feature (178)..(178): n is a, c, g, or t
  misc_feature (209)..(209): n is a, c, g, or t
  misc_feature (270)..(270): n is a, c, g, or t
  misc_feature (345)..(345): n is a, c, g, or t
  misc_feature (424)..(424): n is a, c, g, or t
  misc_feature (943)..(943): n is a, c, g, or t
  misc_feature (948)..(948): n is a, c, g, or t
  misc_feature (1078)..(1078): n is a, c, g, or t
  misc_feature (1117)..(1117): n is a, c, g, or t
  misc_feature (1274)..(1274): n is a, c, g, or t
  misc_feature (1319)..(1319): n is a, c, g, or t
  misc_feature (1398)..(1398): n is a, c, g, or t
  misc_feature (1405)..(1405): n is a, c, g, or t
  misc_feature (1407)..(1407): n is a, c, g, or t
  misc_feature (1412)..(1412): n is a, c, g, or t
  misc_feature (1414)..(1414): n is a, c, g, or t
  misc_feature (1441)..(1441): n is a, c, g, or t
  misc_feature (1501)..(1501): n is a, c, g, or t
  misc_feature (1514)..(1514): n is a, c, g, or t
  misc_feature (1522)..(1522): n is a, c, g, or t
  misc_feature (1526)..(1526): n is a, c, g, or t
  misc_feature (1538)..(1539): n is a, c, g, or t
  Peptide Sequence Number=SeqID_9425
  Probeset Number=SeqID_11611
cgcgcgcgcgcacgtngtcgaggaggcaggcacagcgctagcgtagtcgacgctgnggcatgtccnaatagatgctcctcatcactagtgtcaatagtntcangcatgtgtgatcntattgtgcagtatatcatacgtcagagcactcacttgtgctcgctctacatcacgtagccgnagacgtgggacaaggatcttgatatacgtanctcgaattcccgctcgtctacagttctgttgagatcgttgcacgtggcgtcgctcgagtgntctgtgcgttccgagcctcatcgtcctcgtgggtgccatccatgcgatacgcgaacgcacacgcttggcgctgcncgctactgctgatgtacgtccttcagcagtcgtgtctatgtgtgtgggttgtcacctctcgtctagacgcgacggtgtntgacgagcgtcgtgtgcgctggccaactcacactaggttagtggtgtgcgtcgtggcgagagtgtgtgcgcatatcgagtcggtgtgagtaccgtctcattactcgacagaatggaatcatatagtatggatgttgtgtgagtagagcgagccacctatacagtcacgccgcccgcacacgtccgaccgtcctggcctgtgcgcgcagcgcgacagcggacatctgctgcaatgaagcgcgctcgtagatgatcatagttgtatcgaagatgtacagtgtatctacctcctactccgcacgacgctccacatgccgtgtgcggtgggtgtactactcacatctacgggaggtgtcggttgatgtagctttgtgtagcgtataatgtgtctgtgtgtctgagctactatctattgttatacgtcggtctcaccgagcaggggcgtggcgagactctaggtgcgctagcgaggcagggtagctgaggggcgatggtagttatattgctgcgacaaataaanagganatccactccatcaagaggtgaataaatatattattgtcataagtagcatactaactcggggacaactgtcgagatcatatacattcttctatctgatcatactgttctcacgccgctgttaagaactggntccattaataggcagtctccattctgcgaactctaatanttcatccctctgtttctcgtgtgatatggcactgaactgagggatgatgggcggattggcatgtattagtagtgggggccccgtatcgaagctaggcttccaatataaagtctctgaagcgccagacatctcaaactccagatatctctgctacagnttctcctgctcttgaagaggagagaaaaggagataagagagtaanagactctgatactgattctcctccttctaacccttatggatgggaggcaggacccgcgcgttatcgctctatctcgggnctccggngngaganancccacacataataattatcatcaccancgagagtcacggagtgaaaatagtgtggtggggggtagttggccggtgtgcgtcgatgcngtgaaacaacacnaaaatcanaaantttaaaaaaaann

SEQ ID NO: 1833 - DNA, 1705 bp, Glycine max
  misc_feature (50)..(51): n is a, c, g, or t
  misc_feature (66)..(66): n is a, c, g, or t
  misc_feature (102)..(102): n is a, c, g, or t
  misc_feature (144)..(144): n is a, c, g, or t
  misc_feature (179)..(179): n is a, c, g, or t
  misc_feature (181)..(181): n is a, c, g, or t
  misc_feature (241)..(241): n is a, c, g, or t
  misc_feature (315)..(315): n is a, c, g, or t
  misc_feature (351)..(351): n is a, c, g, or t
  misc_feature (490)..(490): n is a, c, g, or t
  misc_feature (710)..(710): n is a, c, g, or t
  misc_feature (777)..(777): n is a, c, g, or t
  misc_feature (829)..(829): n is a, c, g, or t
  misc_feature (901)..(901): n is a, c, g, or t
  misc_feature (991)..(991): n is a, c, g, or t
  misc_feature (998)..(998): n is a, c, g, or t
  misc_feature (1064)..(1064): n is a, c, g, or t
  misc_feature (1100)..(1101): n is a, c, g, or t
  misc_feature (1108)..(1108): n is a, c, g, or t
  misc_feature (1111)..(1112): n is a, c, g, or t
  misc_feature (1139)..(1139): n is a, c, g, or t
  misc_feature (1183)..(1183): n is a, c, g, or t
  misc_feature (1244)..(1244): n is a, c, g, or t
  misc_feature (1316)..(1316): n is a, c, g, or t
  misc_feature (1384)..(1384): n is a, c, g, or t
  misc_feature (1407)..(1407): n is a, c, g, or t
  misc_feature (1411)..(1411): n is a, c, g, or t
  misc_feature (1413)..(1413): n is a, c, g, or t
  misc_feature (1483)..(1483): n is a, c, g, or t
  misc_feature (1485)..(1485): n is a, c, g, or t
  misc_feature (1550)..(1550): n is a, c, g, or t
  misc_feature (1619)..(1619): n is a, c, g, or t
  misc_feature (1626)..(1626): n is a, c, g, or t
  misc_feature (1634)..(1634): n is a, c, g, or t
  misc_feature (1645)..(1645): n is a, c, g, or t
  misc_feature (1673)..(1673): n is a, c, g, or t
  misc_feature (1676)..(1677): n is a, c, g, or t
  misc_feature (1685)..(1686): n is a, c, g, or t
  Probeset Number=SeqID_11612
cactaatcactctggtgattacacgctacatctaccattatcgatagatnngtcgccggagaacanaaagatcatgcagatgtgatcaccgagcacagcgtnatcgcactggacactagggcagctgtaggaggagagatgagnggacagtgtgagagagagacgcgcgtacacagtancntcgagagtggcgaggacagacagagagatgatgtcggtgatgtggcagcgtgagacgctnttattgagatccgcacagagtcatgtgtgcggaagatagtgactgcgcgcgtgggtctagctgttggtcacgcnccccgcctatacgggtgcgcgcgctggtgagtcggngtgggtgatggattttgggcagcacgatactggctggagtgatatggtggagtagtaatgtggatggtgagggagtcgccacccacacatagtatattgtgtgttccatccatgctgcgcgagtgtggacgccagcagntgggtaattatggatgagcggtgacagcgtaggttgctacgtgtagagtagcggctgcgtgcattattcgattgtgcatcgcgagcgataacacagcagtcagtgagtaacagagaggagcgcccccggacaccagaagacaagaccgcgaggcgcggtggtgagaagtacaagacacagtaggacgatctcatatctattagcgtgtgtcaatagtggntggctgggaggtaggcggcaggtacaatatacagcgaagtgtcgtgtcatacatacacagaacacanctctcagcgagtctattgaggtccgacggagatgctgacacgtgtggatctnaacgcccgcacttctttcatgtgtatgtgtcaccatcatacacttattatccagtgtgcacttaatagagantatgtatacagatatgagagacaagaaacagcttgaggcgagagtggatgagaccgggactcacagatgaggtttatagtgactggagangtatganaggcggagacgagaacgagagagcgccggcgaagagccacgtgctggacagcgcgtgtgacattangtgtacaagataggtatggaggaacagagagcgggnngggagantgnnagatgctcatgactaccgcatgactanaatgccaagaggctacggaggtgagagaaaagagtagagagaanaggtcacagcatagtacttatagattaccaccaatcacacgcagatacacagcacgacgcncagcccgccggagcagatcagcagcgcgaatggcgcgaccccgccgccgctcggtagtgtgagtaggcggtncagccgctcgcgccacgcgcgggcagggacggcgcccacgagggctcgccggcgcagcgctacgccancatcccggcctaacccgtgcccncccncnaaatccaggtggtcggtgtgtggtctctcgtggtatataatatgtatagagatgttagtgtttctcgtgntnagatgtgctccgtcacacttggctctccctcagctctgtcccaggtcgcgcgtgtttgtattaanccaccataggcggaatgagtaggcggtggtgcccgagctcgcgctctggaatataggctttttcttatncagaatnttttggtnggtttttgttntttttatattactttattactctttaanttnntgggtggnntggtggggggcgaggcacc

SEQ ID NO: 1834 - DNA, 1079 bp, Glycine max
  misc_feature (1079)..(1079): n is a, c, g, or t
  Peptide Sequence Number=SeqID_9426
  Probeset Number=SeqID_11613
agcaatatctatttcctcttcagagatgttctcctggacaatcacctcatgggagtctatgttatttaaggaaaagatcttaatccaactcaaactacaaatctccttgtagtgtatgacatgaatgctttgtccgttccactgcacagctttatttttgtgcagaacaccctgtcccattgaaaatcattgatcgccctcttttatgcattggtgttgttaggagtttgtccaaaggctaaggcttatgcttcatgaatgccaggaaccatggttggcagctgtggtaatggggtgggagagaaaaatgtactggttgggtttgagatgggagcagagaaacaaaaacaaccaaaatgcgatctaaattttttaatttgaatgtgattatggaggacaatttttcataataataatcagataaaagaatatgcaaccaaaatgtattcttttcatctttccatttttaaagggggaaaaatgttttagagaatactgatcaagcaggcccctagtctccataatatgcttcaattattaccttttggattccaaatcatgtaccacagattttcaaaatgtgggtgcattcaaagtccaaaggtttcctgcttttgaatcatccaattgtctacacgaaattcatttacagtagtagttcttgttttcttgtttactgtcattttctcatgttaatattcattgtggtttcccagccctgcatttcagaggtttgcagtgaggacatcaaaaagaattgaagatatttctaacaaagctgttcagaagaggcaggagctagctgagcagatcaaggacatctcgaaaaatatggaggttgtatgctgacaaaattaatatttaaatcaatattgacaatgtgattatcatcttttaacttttcctttttcttttgctgcttccagtcattcaagaacaagtaattttggtatttttgctacattgttgaaggtccatagtcacgattttctttagccaaagatgctgctggagacaaaggccgggtgtttgtaaatttcttttttaacaatatattttggttcttaactcgtgatctn

SEQ ID NO: 1835 - DNA, 600 bp, Glycine max
  Probeset Number=SeqID_11614
tcgagtcagctacgtagggccccccccccccacaaaaagctcctcagaacctatatggcaaggacctcatttttccaagcattggagctaatagagacgctcaaacaagcgcacctctcttctttccaaatgcaagcttctttaaaaagagtgatactaaaaagacactggactgtctcaaactgccaatgaataatctcagagaagacttttcagtgtcgtcttcaagcagatgcgactttgctaaccatcccaaggtcaaggaaaataactgtaaggagagattcaagaaaagcgaatgcatactggcccctccacaaaagagaaagcgctgtcagattcttaacgaattttcccaagaggactatttgagcccaaagcaccctcgagtcaaagctttacaaggaaatttgctcgatctcgcacgaaccgactctgaatccaggaaatcatcaaaatttgaggagtggcaaacacctcaaaagaagttccatgtcttttgggatcatcatgaaaatgaaaagcaagcaaaattatcagaaatgaagcatcatttgtttgaaagcgagtactccagactcaatagtgactataaaattc

SEQ ID NO: 1836 - DNA, 553 bp, Glycine max
  Peptide Sequence Number=SeqID_9427
  Probeset Number=SeqID_11615
gcctaacgacatcaaactgagtgtgttgttcgtcggtaccgtgtatagatgcctgatatgtgttactttgcacgatgaccatatggaactaccgaggcagctgcatgacgatgactcagtgagttgcactgcgaccgacccatgccttaactacaagccggtgatcggaatcctgacccaccccggcgacggtgcctctggccggctcaacaacgccatccgggtttgttacatcgccgactcctacgttaaattcatggagtccggtggtgctagagttattcgacgtatctacaatgagacacctgagaacctgaacaagaagctcgattgggtcaatggagtgctcttcactgctgggaaggctgatttaggaccatattgggatactctaggaaacttctgcaagatagctctagataaaagctatgctggagaacatctatcgggaatcgactatctctgatgaggagacctcatcatcaggatcgtgagatagcaagactgaatccttgatccatttactggatagagtaagacaagtactctagtt

SEQ ID NO: 1837 - DNA, 1410 bp, Glycine max
  misc_feature (18)..(18): n is a, c, g, or t
  misc_feature (1236)..(1236): n is a, c, g, or t
  misc_feature (1410)..(1410): n is a, c, g, or t
  Peptide Sequence Number=SeqID_9436
  Probeset Number=SeqID_11616
gggggggagggggggggngggggggagggggcggcgcgtgggctgcactcgcctcctcgagccggccagggtcccaatatatttgatgctcgtcgccaatcctgtcccatcaaagaagggtgaagtattccactagtagttattccctattataagctatgagtagtcttcttctaaaaaccatcatcgagcagatgcctgtttcattcaggaggtgcaacccgtagaacaccgtgatgataaataatatcatgatatcgtagaaagctagatgatcagccacacaatgtatatacttcattcttcgtggggtggtagtaacaaagaacctatgcgaggctctctgtttattaatagaatcaacagcacaaactatagaggggcagtattatctcttgaagcacccatcttcatcagatgctttaatcaatacaataacaactatatatcgtaggagacccgttgtgtggagcgaggaaggctcgggagaatggagtatttgttttcgctcctccaccgccggttatggctcatcagatacgcctaatacgtattatggagcgcgcctcgtcacccctcctatccacattatacgccacccctgccgtcgacgagcggcgccgcacaatcataaagacagttgctttccgcgcgggatagtcctcatagcgcaacctatccccgtttgtggagggagtggtttctcaacctactatacatcgccgccgtacgttctatataacctatcggggcgaatcctctcccccctcgtaattggaacatggttcaccattccccgcggctgcctcttccacctgctcactccacaaggaagaatatttgcgaaagcgacacacacctcggagcacgcgcccccgtgaatgtgatagcaaattactatatctccgacttctgtgacatatctcatcccaaacaattctcttctgcgcttggccgcactcgcccccctcactttcgtatcttcacaacgacacgcacacacagaccttccctaccgtgcaaaccgcgcgaccccgaaccacgacaccacctctgcggcgtattacagatgagagatgagacatctcatacatacactaggcggtgtgggtggtggcttctcggcacattcccttggttctactttcgcgctcaattagaaaaacataatcataccatatagtcatccggcacatctacctgcgcacactcccccctccagcgccaccactcaanaacatttcgtcctctcccctgattggcaaaatcaggctcgaactcgtgcgagaggacgcgtctactgctaactcaacaccacagcctgtggcgcgcggcgggcgggtcgttgctcacacagctgtggtgtatcacggcccgccgtcctcaccaccaaaataatacatgcaagan

SEQ ID NO: 1838 - DNA, 451 bp, Glycine max
  misc_feature (439)..(439): n is a, c, g, or t
  Probeset Number=SeqID_11617
acaacaaattgacccaaacacatcattagggtataaactactcacgcaaagtcttttcacttcaaccttctttgttgaatttgcgagcagaggaaggaaggaatctgcagagagaatgttgttcttctcgtacttcaaggatttggtgggacaagaagtgacggttgagctgaagaacgatttagcaatcagagggacacttcactcggttgatcagtacctcaacatcaagctcgagaacactcgtgttgttgatcaggacaagtaccctcacatgttgtcggtgagaaactgtttcatcagaggatcagtggtgaggtacgtgcagttgcctcctgatggagtcgatgttgatttacttcacgatgctgctagaagagaggccagaggtggatgattccgccacaaccgttttatctctccaaacttttaatctgtngatcaactagac

SEQ ID NO: 1839 - DNA, 1369 bp, Glycine max
  misc_feature (16)..(20): n is a, c, g, or t
  misc_feature (23)..(23): n is a, c, g, or t
  misc_feature (26)..(27): n is a, c, g, or t
  misc_feature (29)..(32): n is a, c, g, or t
  misc_feature (59)..(59): n is a, c, g, or t
  misc_feature (78)..(78): n is a, c, g, or t
  misc_feature (110)..(110): n is a, c, g, or t
  misc_feature (571)..(571): n is a, c, g, or t
  misc_feature (751)..(751): n is a, c, g, or t
  misc_feature (858)..(858): n is a, c, g, or t
  misc_feature (977)..(977): n is a, c, g, or t
  Peptide Sequence Number=SeqID_9437
  Probeset Number=SeqID_11618
gtggtgtggggtttgnnnnnctnccnntnnnnctctgtactcttcctgccctcccttcntcgcacgcgcggacacgcncggcttggattcaattccaccaaagaaaatanctttatgtgcttattactgttactttcttgcagtgataatctttaacaaactttcgccatgatatatatcgtctaaatatcatgaaggggaaaattttataaatggcgcggattttgtatcgtatattgtataagagggagatgttgtgtgtgttgagatagtgctgtgtgagtgttcccccccccactcgtgttccccccctctaactgaactccctcctcgcaccggccccatgagcgaacccgacaatacaaaaattaaaatacaaaggtgggagaagggcccctattatagcattcccccctacctcccacccggaataaaacctgtgcaaatttgggttagaacaattgggggttcttgggggtccctcccttaacaaacaagaggcacacacaaaacgcgcaactataaccccaaatgtgggaagaagttggaagacctcgcgaaactgcccccncgccctttatacaatgaggaagaagtgaaagagagcgagacgctacaatacacccaaacagaagaaaatgtctatggagctaactactgtgtgactgcctctatttgggcaatgaatgagatagagggggcggctatcaacgaagttccatcatgttgtggcggcgagtgattattatgnattacgaagagatgagtggtgtggcactatataccaactcgacacaatattagtaatgtgacccgcgagtgcactcccaccgaagcctatcaccagccacgcgtggngttgatcatataaagggagaagggggcgtgagactagaaataacatcacaccacagatatcggaatgtgcgtgtgtggtagcgatacatataaactgtatgatctgtatgatgcgtagntcaggtgtcttgttatcaggtcaccctccacgttcatgactaaatcttcgggacgacgtgtgcgtggggagatatacacacaaactcatcatctggtaatataaataagaatgaaagcaccatcactactagacatatccattagtaggaggaacacaatccactacccccacgcccttatctatgtgtagatacgctagcgatgtgagacgccgctctcacattgagaaggaatggtactcctaacaccatctcctagactctcgatgttccagatcaataaaaactaaccaccacacctgtagcagagcagagagagactgtctctctacaagctcgcacctggtgagatgcaacgaccaggatcagtcgtgtaggcgagagcacaaccg

SEQ ID NO: 1840 - DNA, 1889 bp, Glycine max
  misc_feature (13)..(13): n is a, c, g, or t
  misc_feature (21)..(23): n is a, c, g, or t
  misc_feature (26)..(28): n is a, c, g, or t
  misc_feature (32)..(34): n is a, c, g, or t
  misc_feature (41)..(42): n is a, c, g, or t
  misc_feature (64)..(64): n is a, c, g, or t
  misc_feature (90)..(90): n is a, c, g, or t
  misc_feature (154)..(154): n is a, c, g, or t
  misc_feature (220)..(220): n is a, c, g, or t
  misc_feature (237)..(237): n is a, c, g, or t
  misc_feature (285)..(285): n is a, c, g, or t
  misc_feature (293)..(293): n is a, c, g, or t
  misc_feature (329)..(329): n is a, c, g, or t
  misc_feature (357)..(357): n is a, c, g, or t
  misc_feature (389)..(389): n is a, c, g, or t
  misc_feature (414)..(414): n is a, c, g, or t
  misc_feature (553)..(553): n is a, c, g, or t
  misc_feature (628)..(628): n is a, c, g, or t
  misc_feature (847)..(847): n is a, c, g, or t
  misc_feature (922)..(922): n is a, c, g, or t
  misc_feature (942)..(942): n is a, c, g, or t
  misc_feature (1074)..(1074): n is a, c, g, or t
  misc_feature (1089)..(1089): n is a, c, g, or t
  misc_feature (1106)..(1106): n is a, c, g, or t
  misc_feature (1123)..(1123): n is a, c, g, or t
  misc_feature (1140)..(1140): n is a, c, g, or t
  misc_feature (1142)..(1142): n is a, c, g, or t
  misc_feature (1246)..(1246): n is a, c, g, or t
  misc_feature (1377)..(1377): n is a, c, g, or t
  misc_feature (1495)..(1495): n is a, c, g, or t
  misc_feature (1497)..(1497): n is a, c, g, or t
  misc_feature (1501)..(1501): n is a, c, g, or t
  misc_feature (1508)..(1508): n is a, c, g, or t
  misc_feature (1521)..(1521): n is a, c, g, or t
  misc_feature (1525)..(1525): n is a, c, g, or t
  misc_feature (1545)..(1545): n is a, c, g, or t
  misc_feature (1570)..(1570): n is a, c, g, or t
  misc_feature (1590)..(1591): n is a, c, g, or t
  misc_feature (1599)..(1599): n is a, c, g, or t
  misc_feature (1604)..(1604): n is a, c, g, or t
  misc_feature (1619)..(1619): n is a, c, g, or t
  misc_feature (1641)..(1641): n is a, c, g, or t
  misc_feature (1667)..(1667): n is a, c, g, or t
  misc_feature (1749)..(1750): n is a, c, g, or t
  misc_feature (1764)..(1764): n is a, c, g, or t
  misc_feature (1805)..(1805): n is a, c, g, or t
  misc_feature (1826)..(1826): n is a, c, g, or t
  misc_feature (1843)..(1843): n is a, c, g, or t
  misc_feature (1877)..(1877): n is a, c, g, or t
  Probeset Number=SeqID_11619
ttgtttttttttngtgttttnnnttnnntttnnntcttttnnttcttatattttctctctctcncttcgtcgcggcctgtgtcatatcgnacattcatctaagaactgttgtaattcatttctacctctcccacacgttaactcccacacaccnctacgcgcattatcacccatcgctcgtatcgctacatcatctactacatatatacttcgactgtantatccacatacttttantctctactcctcactccttcgatgtagtaggacgccgcgagtcagcantatagagntggattgtcgctctgtcgtgcagatgcgcgtgctgncgtgatctcgtgtgcagtgtatagcgcntgcatgtgtatacggccgtgatgcgtatgcgntgtagtcttgtacctcgtgtcgtcngggcgttatatgtccgtatcgttcgcgactatggaccttgtcgcgcgctgctctccactctcgtctgtgtgtttgctgttcatcgcgtctgtatgatgtgcagacgaactgcgagagcgatgtagattgtcacgatcgntacatctcgtgctcgtctctcgccctcagctactctagtctccgcatccggcgttgtgcgttactcagcgtacgnacgtggaatgtgtttgctcgagcgagtgatgagttgacgagacgagctgcatgattctatctatctctacgataatccaattcacgatgagtagatgatattcgctatactctctagtgcacgttcatgttatctgtgcacgcctcgcgcacttattactccacgatctcgtacagtatgacgagtagtgctatgtctcgtgcatatgatccttactcnctcacatagatcagatagatagctgtcaccgtattctatacatacctcgtatctacgatagtgctgctcaatctnagtgtgatgcgtacatatancagatatagtattgtatcgcactggcgcgtactgaagtgctgtcgcgccgccactgtcatatacgtgcgtgcgtactgatattgtgtatatgtaactagatcagtgctatctactatatcagtcctctagancagtcaattactaanacatggacatcgatagntaacagacgacgaagcngacgtacgtctcactanangtatcgtgagtgtgcaccgtgcgtgcgcgctagctgtatactcgcgtcgtcagcatctgtgtgatcgtctatgatatccttacgactcagtcgatgcgtcgtantagtaccgagctcgtcacggacggactgatctcgagacgtaagtgcgatacgcgagtcagctgatacgctgcatgtcgtcgtactcgtgtcgagcgtgactttcatctgttcgtgtatgtcgaccacggtnaccccgacgacgattacatcgagcgtgcactgcgtatatcgagcgccgatactgataatatgcgtatgtctgatgctcgtgtgacgacactagctaagcacctgacttatcgtacatncnacgnactacgnctgttaactacantcgncgagtagtatgagtcgtcancgcgcgatgtatctgctgctcgcgntcgacgaactgacacgcgtnncgcgcgtnatctncgatatgattctgtncgttcgctcagacgactcgctntcggcgcgatagacgtccgcgcgggnacgaccacgcgtctgcgtgcgacgcatgcgtcgcctgcgcactcgacgtctcgtcgtcagtatcatcacggcgtctcgcatnnttctcgcgaagtgntgtcgtctgtatggacgtctctctgtcgactcactgaacgncgacgtcggtcagtcgtaatnctatcgcgtcgctcgantcgttgacgctgtgagtcagtatcccatcaccgntcagcacgcacg

SEQ ID NO: 1841 - DNA, 780 bp, Glycine max
  misc_feature (188)..(188): n is a, c, g, or t
  misc_feature (279)..(279): n is a, c, g, or t
  misc_feature (398)..(398): n is a, c, g, or t
  Peptide Sequence Number=SeqID_9438
  Probeset Number=SeqID_11620
tttatgtgtttcccccggattttttaaacacgggttaaaaaaatcatagattccaaagagaaaaagaatccttcccccccaattgaagagcgaaaaaaagtttttttaaaaccgggggtgggggcccccgcggccaccattaggaggcttccttaggcggtgtttatgatgatgttccggcggggcancatggggaggaggcaactaataccaaccacgagtgaggagaaggatcgtaaaaccatctgaggcatggatgaaccccatcacgttggtagncggggcgtcatcacaagagcagcagcatcatgttcgtcatatgtaaaccgatgagtcatgagcactgcgtcagacacctatgtgatcatcgtagaggcaaagattgatgatgtgagctntcagatgcagtagcagcacgcagagcagtaatgaatcctgatgtcatcagcgtgtcttcgcaacgagaataatcgtccagcactgcagcagtgcaagacgatgatgaggagattatcgaggatgatgttgacgcaaagaacgttgagtaggtgatgacccaaccgggagtagctagtacaaagactgtgaaagcacttaagaatgctgatggagatattgtcgctgccatcatggaacttcccacctaaatataaatcgtttcaactttaaatgaggtgcctctcaaaaatgaggaggaagaatgtttttcatcattcctccgaagaagttttcagcagtgtatcagcataatcctcatagagtatgaataacagcagatga

SEQ ID NO: 1842 - DNA, 584 bp, Glycine max
  misc_feature (153)..(153): n is a, c, g, or t
  Peptide Sequence Number=SeqID_9439
  Probeset Number=SeqID_11621
agatggtgttatatgcttcttgccgtggtattgcttctaaaatctctcactaaatcagccagctcttctgcttgtccttattttgtttaatattccttgattgttatgatgagttgagaaggccgacacttgacggatgcagctatggcgtgntggaggtggagctcgtcttgcctgacagccccttcgcatcccccaccaagaggagcctcatgcgctgatgctgtcaccgctgcaagcgctcggaaatgccagcagcaacaagcccctcgcctgttgttttccccgccccttttcgcacccgggtctttccaccaccctcgacctggccccctataagttcctcctgtttttttaagggggcccagtttttccccccgggaaaaaaacccttgggtttggaatggggaaagggccccgcaccaaaaaaaaaagggaggggaccccccctctccctaatttgggaaaaaggcccccccaaatttttggggaaaaaaaggtttcctctctttccggggaaaaaatattgggggtggttgggaatttcccgcccttaaaacttttttatttggcccccccccccc

SEQ ID NO: 1843 - DNA, 1586 bp, Glycine max
  misc_feature (29)..(29): n is a, c, g, or t
  misc_feature (53)..(53): n is a, c, g, or t
  misc_feature (59)..(59): n is a, c, g, or t
  misc_feature (61)..(61): n is a, c, g, or t
  misc_feature (68)..(69): n is a, c, g, or t
  misc_feature (80)..(80): n is a, c, g, or t
  misc_feature (150)..(151): n is a, c, g, or t
  misc_feature (254)..(254): n is a, c, g, or t
  misc_feature (515)..(515): n is a, c, g, or t
  misc_feature (531)..(531): n is a, c, g, or t
  misc_feature (584)..(584): n is a, c, g, or t
  misc_feature (711)..(711): n is a, c, g, or t
  misc_feature (724)..(725): n is a, c, g, or t
  misc_feature (773)..(773): n is a, c, g, or t
  misc_feature (776)..(776): n is a, c, g, or t
  misc_feature (807)..(807): n is a, c, g, or t
  misc_feature (820)..(822): n is a, c, g, or t
  misc_feature (835)..(835): n is a, c, g, or t
  misc_feature (860)..(861): n is a, c, g, or t
  misc_feature (875)..(876): n is a, c, g, or t
  misc_feature (891)..(892): n is a, c, g, or t
  misc_feature (907)..(909): n is a, c, g, or t
  misc_feature (912)..(912): n is a, c, g, or t
  misc_feature (915)..(915): n is a, c, g, or t
  misc_feature (1026)..(1027): n is a, c, g, or t
  misc_feature (1053)..(1053): n is a, c, g, or t
  misc_feature (1088)..(1088): n is a, c, g, or t
  misc_feature (1093)..(1096): n is a, c, g, or t
  misc_feature (1107)..(1107): n is a, c, g, or t
  misc_feature (1145)..(1147): n is a, c, g, or t
  misc_feature (1149)..(1149): n is a, c, g, or t
  misc_feature (1157)..(1158): n is a, c, g, or t
  misc_feature (1221)..(1221): n is a, c, g, or t
  misc_feature (1223)..(1223): n is a, c, g, or t
  misc_feature (1235)..(1235): n is a, c, g, or t
  misc_feature (1299)..(1299): n is a, c, g, or t
  misc_feature (1301)..(1301): n is a, c, g, or t
  misc_feature (1303)..(1304): n is a, c, g, or t
  misc_feature (1327)..(1327): n is a, c, g, or t
  misc_feature (1364)..(1364): n is a, c, g, or t
  misc_feature (1366)..(1366): n is a, c, g, or t
  misc_feature (1413)..(1413): n is a, c, g, or t
  misc_feature (1456)..(1457): n is a, c, g, or t
  misc_feature (1477)..(1477): n is a, c, g, or t
  misc_feature (1494)..(1494): n is a, c, g, or t
  misc_feature (1558)..(1559): n is a, c, g, or t
  misc_feature (1586)..(1586): n is a, c, g, or t
  Probeset Number=SeqID_11622
ttttgtgtgggttgtgtgtgtgtggtggntctttttttttggtatggggggcntctatngngccccgnnccttattcgcncggcgcggcgccctttgtcgcgttcgcgtcctgctgctccgtccccactggagcgaaagcgaacaaaggnntagacacacctccccccccaccacacaccgtgaacaacttatgagctgctctgctcgtgctatgatagccttgctccataggaccactatcaaggataagaangacaagatgaaatctagacaatagaacacactagtgccccagcccgcaagcgaggcgtcccgagcgctgcaaaatcgtgtgtgtcgttgtttgtgtcttctcatgtgtagggcacgagctcgcggctcccgcgccgtgtgctgggcgtgcgctctgggctcatgtcagccgctctctctcctgatctcctcctttgtcgcgcacgattgctcagcgcgatcgacatcctgaccgcgctctatactcagcagcttcctcttntctcgccctcattatngagtacaagaaattaacctccaactcaccaacctcaccttacggtatcatcanatacatatatacgtattccgttgcgtcgtggtcacattattattattagttgtggttgtttacacatctagcgtgtcgcgcgcgtgaaaaagcacgattcataatcgtatatacaccgattatatgngtggcatagagannttttatgtgtatttaatcttataccattcgtcttacatatgtcgaganttngtagtgatgggaggggaagatgttatagtgngagaatgagtggnnnaggaaggaataanatatataaagaaagaggtagaatgnnatatgagtggagannaaatatctgataagnngtagccagatcaaannnatngtntaggtgtgcttgtatgatataattaagattatgtgtgttgtttatatgcgtgtggttcacgcgcgtaggatgacgtgtcacatatacctgcacaatcacgagcggtgtctnngctgctctgcctcacacgcgatcgancacgcaaaactaacacaacacactacaaccaacanctcannnnggaggcactcngtgccgttccccgtccgcttccacctaactattccgcnnncnttttctcnncgagcctccatcgagccctccctcacctcctactcacgttattctcacattatttcctacagntncgtcgttctcgntgagagagctgagtaacgcatgcattcgtgcactccgcgaaggatggctgctgtccgctcttgngngnntctttcgcgctgttctcatgtanatgtctctaggatcttatatacaacgcacgtctcagntnataccaactatccatactcttcgctatgcgtccgatggtggtggtgnggtggagagactgatcgctgagtgacactaggtaatgatgatnnactcagtacgagtacagagncagccttctctagcaancttaccatcggttcaaccgcctcgcctcttgtccaagccttcgctcacaccaccatacatactnnaatatctgacgcagatatctacatcgn

SEQ ID NO: 1844 - DNA, 1527 bp, Glycine max
  misc_feature (19)..(19): n is a, c, g, or t
  misc_feature (32)..(34): n is a, c, g, or t
  misc_feature (37)..(37): n is a, c, g, or t
  misc_feature (48)..(48): n is a, c, g, or t
  misc_feature (52)..(53): n is a, c, g, or t
  misc_feature (60)..(62): n is a, c, g, or t
  misc_feature (74)..(74): n is a, c, g, or t
  misc_feature (89)..(89): n is a, c, g, or t
  misc_feature (107)..(111): n is a, c, g, or t
  misc_feature (116)..(117): n is a, c, g, or t
  misc_feature (128)..(128): n is a, c, g, or t
  misc_feature (130)..(130): n is a, c, g, or t
  misc_feature (156)..(156): n is a, c, g, or t
  misc_feature (166)..(166): n is a, c, g, or t
  misc_feature (175)..(175): n is a, c, g, or t
  misc_feature (178)..(178): n is a, c, g, or t
  misc_feature (207)..(208): n is a, c, g, or t
  misc_feature (212)..(212): n is a, c, g, or t
  misc_feature (217)..(219): n is a, c, g, or t
  misc_feature (221)..(221): n is a, c, g, or t
  misc_feature (226)..(228): n is a, c, g, or t
  misc_feature (282)..(282): n is a, c, g, or t
  misc_feature (354)..(354): n is a, c, g, or t
  misc_feature (492)..(492): n is a, c, g, or t
  misc_feature (563)..(563): n is a, c, g, or t
  misc_feature (567)..(567): n is a, c, g, or t
  misc_feature (1097)..(1097): n is a, c, g, or t
  misc_feature (1139)..(1139): n is a, c, g, or t
  misc_feature (1171)..(1171): n is a, c, g, or t
  misc_feature (1176)..(1176): n is a, c, g, or t
  misc_feature (1209)..(1209): n is a, c, g, or t
  misc_feature (1287)..(1287): n is a, c, g, or t
  misc_feature (1337)..(1337): n is a, c, g, or t
  misc_feature (1353)..(1353): n is a, c, g, or t
  misc_feature (1417)..(1417): n is a, c, g, or t
  misc_feature (1527)..(1527): n is a, c, g, or t
  Peptide Sequence Number=SeqID_9440
  Probeset Number=SeqID_11623
tgggggggggggggggggnggtgtccctctcnnnccntcttctctctncttnnctctttnnntgtgttttcttnttctctctcctctcngtctctccctctccctannnnntcccnngggcgcccgcngnggcgcgccgcggggcgctgcgtgcgntgggggggtnttggcggcnccngcggggggcggcgggcggcgcgcgcgctnnggtngattnnncnccctnnncttccttttttccctcgtccttctgatctcactgtctcactaataccagccacnattgctatattaggccgcacacagttaataaataggtataacatatatgttacataataatcatctattatntgtcacgcaggaaaggaatagtaaggaactagaaagaaacaagactcgtccgcacgagaaaacgcacacaaaacgagacagaacgccagcccggcgcgccggcgatcgtagatccgatgaactcgggcggtgagtagntaggcagagcggcgcggtgaggcacgatggaagtgtgaatcgagagcgttgcaggtgcatataaatacacntaanatcactacaacatcataaccgacaagctaccactcaacactcataatcaacacatcattgtctcacctacacaccgccctcaccaacacaacccacgtaccgcctccgcatagattgtctatgatatcttacatatatcctactctcgcattacgggtgtggatgagcgtgtgcgcgcgtacatatgcggtatggcctgcacgctatagagagtatgtgtagggtcgacagagagtgtttatagtagtctgtgtgtgtcggaattaagtgtgatgctatgcatgagaatgagcaggcgtacggacacatctctacaaatactatcgcgtatttaagcattaactaataaggtatacttgcgtttgatcacctcgctgccctcttgctgcgccgctgtgacacgagtaccgacggctgtaggcctcgactgacacgagctacgcctagctgcgcgccgacgtccaaacaagatagatctgtcccgcgcgccgatccgcgactgtaccgtcttaacccacggtcgccccccntagcgtcacgcaagatcggatatgtgcgagcatcgagtctcngccactgatcactctctccgacttctatgcgncgtantatgacgcttacagccatatctctctcgtctcnactctcgtctctctatatgctatattcccgctccacactctctcgttgactatcgcatagcgcttatcactctcaccncacacgtatgcgagtgaccgccgcatacacgttaccgtcacgcctgtacnagactcgactcccgcnctacaccgctatagtgatatatgtatcagctcaacaacctcgatgatctctcatgtgatcacgntagccaccacacactatacttaacagcgcgtgcggatcggtcgacccggcgactgtagcgccagcaatgactacttcacccacctcgtgttatagatagatataagagcn

SEQ ID NO: 1845 - DNA, 1360 bp, Glycine max
  misc_feature (1113)..(1113): n is a, c, g, or t
  misc_feature (1360)..(1360): n is a, c, g, or t
  Probeset Number=SeqID_11624
tccagtgtgtctgttgtgtggtcccgactactctctattatcactctactcagcactacctccacacagagagtagagacgcccccccccctcgcgacgcacaggaagagtcagaagaagcatgctttttttctttttttgttaggtgagcgaagcgtacagcctcattctacctatctataatccagcaaaagacgtcagacactctaagtgagtagtggaccatgtcctcatgtaatcacattggactttagttgtagtgtagatggaccaaccaaactcccaatccgctgcacctaaccagtttagttggtacctactcccacgcaccggtcagcgtagctgcctctcgtcttgctcccggcgggtctgggcgaggtcacccctggcgtatcctagctgtaggagcatagattcaaagccgtccacccatctctgcactccatcgattaccttcacatcctcctatctatctcgacttaacactcactccgcgcactgcataaactagaacagtgaacacctacttatggtatctctgtgcagtgggccggagttctgcgtgcagcgaagcttacgctcctgacgctcattattctctttttccgtcggtacttctttttgcctcgacaccactgagtgacgacttattatgattggcgcttccctagtcgacctcttgccgtatcattattctcgcccaccacacacataactctactccatctctatatgactctccccatcacacagtattagcgtcctcgagagctattatgtatctctagagcgcgtgcagcgttacgctgatcattgtctatactgattataatccttcctcctgccgtctcgatgatactctacctaggcaggggcgtcggtactctctgttatatacgcacctgcgacgtctgctcgcctatctcatctctaccttcggcgcctccagaaatgacatcctacgtaccacgcgcactgcatgtagacctaattctatctgtctctgattgtatcatactcaacgaacacgtctcttgcatttcttatctttctcttactcgactctcactcttgctctatcaattcttatcttcctcacctacactacactgnatatgtccgcctcgctcatgataattctcccacacgataacaatgtctatgacccgctgctactgagctgcacgcgcatcgacacgctcacgactgctgctgtcagtcgcatatctcaccgctacgtacaacaattattatggacaacatagacttattgctcggcatcaacgtcatatattactcactccgtcctttcctatcactcttaactagtcacacatacatattatacaaatatccctcn

SEQ ID NO: 1846 - DNA, 1972 bp, Glycine max
  misc_feature (1)..(23): n is a, c, g, or t
  misc_feature (30)..(34): n is a, c, g, or t
  misc_feature (54)..(55): n is a, c, g, or t
  misc_feature (62)..(62): n is a, c, g, or t
  misc_feature (69)..(70): n is a, c, g, or t
  misc_feature (86)..(87): n is a, c, g, or t
  misc_feature (215)..(215): n is a, c, g, or t
  misc_feature (230)..(230): n is a, c, g, or t
  misc_feature (313)..(313): n is a, c, g, or t
  misc_feature (325)..(325): n is a, c, g, or t
  misc_feature (327)..(328): n is a, c, g, or t
  misc_feature (340)..(340): n is a, c, g, or t
  misc_feature (456)..(456): n is a, c, g, or t
  misc_feature (711)..(711): n is a, c, g, or t
  misc_feature (799)..(799): n is a, c, g, or t
  misc_feature (867)..(867): n is a, c, g, or t
  misc_feature (976)..(976): n is a, c, g, or t
  misc_feature (1112)..(1112): n is a, c, g, or t
  misc_feature (1143)..(1143): n is a, c, g, or t
  misc_feature (1145)..(1145): n is a, c, g, or t
  misc_feature (1160)..(1160): n is a, c, g, or t
  misc_feature (1209)..(1209): n is a, c, g, or t
  misc_feature (1211)..(1211): n is a, c, g, or t
  misc_feature (1291)..(1291): n is a, c, g, or t
  misc_feature (1315)..(1315): n is a, c, g, or t
  misc_feature (1559)..(1559): n is a, c, g, or t
  misc_feature (1582)..(1582): n is a, c, g, or t
  misc_feature (1617)..(1617): n is a, c, g, or t
  misc_feature (1624)..(1624): n is a, c, g, or t
  misc_feature (1715)..(1715): n is a, c, g, or t
  misc_feature (1722)..(1722): n is a, c, g, or t
  misc_feature (1746)..(1746): n is a, c, g, or t
  misc_feature (1885)..(1885): n is a, c, g, or t
  misc_feature (1890)..(1890): n is a, c, g, or t
  misc_feature (1955)..(1955): n is a, c, g, or t
  Peptide Sequence Number=SeqID_9441
  Probeset Number=SeqID_11625
nnnnnnnnnnnnnnnnnnnnnnnccccccnnnnnccccccgggcgcggacgccnnccccgcncccggcnncgccccagcccccttnnacgcgggctgagagacactggtctttagttagctctattgttgtagcgcgtttttttttcctataaggaaggagttacgtggtaagtacgacacgcagacatttattgtccgcgcacaagagaagtanaagcgccgcggactntgtaatacatgaattatacagaacagactatagaacagatataaatagacaatagaaataattatatgttccgccctccaatnaaataagtattngnnacaacacaaagnatacacaaacatgtatagataaacaatcggagatattatgaatcatcatagaatatgagatatgaaataataagttgatattaagatataataactatagtatagagaatgaaaancacaaataaccagccacaacagacagcgaattagaatatagagactatacagaatagaacactaagagcacgaacacactgctatctcgtctcttcctcagtgactgttattatgaataaacacatcagattatatatagtataaactgtaatgatgatatagtagtactatcaatacgataatgatacatatatatagtataatgtaatatatatatatccagacatacacatagatatgcatagatatgatangcagagtagtatgaagatacacacatattataaatgtgaacgcgcggagcgctagccgatcaccgcacacatgtctatctgatgatgnatattgaatcgacgatatgttatatagagcaattcaagtagcgagcgtgtgacgacactgaggcatancagaatgagaagagcgcggcataagagaagagagaatgagtatgagacagcacacgagagaagagtacagaatacgtagatacgcgtgtcattcgagctgtgcgatatntataactcatatcaatattaacacctcattcagtgatcacaggcatgtgctgctcggagagtggacgagagtggcaggggacgactggagtcggctatttgcgacagtacactctgtattgtattagatagtatantgatcatatgttatatctacactatgacgtnancataatgtcgactgncatatatgacacaacatatactctctcttcatatcgtgatagttacgananactactatgtgtataagctatataaattcttatcatatagatataactatatatcatgcatatacggagataacaatcgntaactcactcgcaaatcacaatancatgtatactgagcacaatacatctcacagatgtataataggaacaagtaatatagataatgtagtattcaagtatagacacgacacatgccctacacatatacaaactgtgataaatgagatagacatacgaatctctacatcacacttcattcctctatgatccaatgtcggcgctgtacgtgatatgtctgcgtagcgctctgtatgtgtgaactatcatgtcacgcacacgatacacaangataacagacgatgctgatatcntcatgcattatacgtacgtgagctcccgcgagcgncgccggntagatataacgcatgatcacagcgcatcatacatcaatataatgcacgattctacatctcacagtgacacacatgtgtcgataaatgagcngaagacntgggagagaatcgagatagtatgngtgaaaaacggacgtacacgaatagtagcatgtacagcacgatgagcgcacgagcatagcgtgagaaaaagatatcacacaacacacatctcacacgaccaagtttcttatattatacatgactgcaccgccgagtgcngcgtntgttgtgtgcgtatacgtgtgtggagatactagttagtgtatgcagcgatatacgagatgacagnagtgaagaaaagtatga

SEQ ID NO: 1847 - DNA, 445 bp, Glycine max
  Probeset Number=SeqID_11626
tttaacatgagttgtataaagcagtaacgtacaacgccgtctctcgttcacatagtcgctcaccatcagactgtaatacattgttagctattaaagcccatggatatctcacagatgggtcctggagatgatttattcacagtacctctcaagcttgtagttgaatgtgccgcctatattcatgctcttgttgcatattttgatgtatcgttcacaaagtgttataaattgatggccttctctataggatcaagattatgagttatgcattggaaacaaacagtcctatacttggaagatgttttgaccatttgtgagggggaggcaattgtggggagcatggctgttgctccaaataaaaaaaatccttgggatgttgatataatgcttaagtattcattgaatggaaggtgatgcaatgtttcaagggttcagtactacaaga

SEQ ID NO: 1848 - DNA, 1498 bp, Glycine max
  misc_feature (1)..(1): n is a, c, g, or t
  misc_feature (44)..(44): n is a, c, g, or t
  misc_feature (54)..(54): n is a, c, g, or t
  misc_feature (110)..(110): n is a, c, g, or t
  misc_feature (147)..(147): n is a, c, g, or t
  misc_feature (226)..(227): n is a, c, g, or t
  misc_feature (665)..(665): n is a, c, g, or t
  misc_feature (838)..(838): n is a, c, g, or t
  misc_feature (880)..(880): n is a, c, g, or t
  misc_feature (1150)..(1150): n is a, c, g, or t
  misc_feature (1179)..(1179): n is a, c, g, or t
  misc_feature (1186)..(1186): n is a, c, g, or t
  misc_feature (1191)..(1191): n is a, c, g, or t
  misc_feature (1202)..(1204): n is a, c, g, or t
  misc_feature (1222)..(1222): n is a, c, g, or t
  misc_feature (1256)..(1256): n is a, c, g, or t
  misc_feature (1318)..(1318): n is a, c, g, or t
  misc_feature (1347)..(1347): n is a, c, g, or t
  misc_feature (1381)..(1381): n is a, c, g, or t
  misc_feature (1383)..(1383): n is a, c, g, or t
  misc_feature (1417)..(1417): n is a, c, g, or t
  misc_feature (1422)..(1436): n is a, c, g, or t
  misc_feature (1440)..(1441): n is a, c, g, or t
  misc_feature (1444)..(1446): n is a, c, g, or t
  misc_feature (1448)..(1448): n is a, c, g, or t
  misc_feature (1458)..(1458): n is a, c, g, or t
  misc_feature (1460)..(1460): n is a, c, g, or t
  misc_feature (1463)..(1465): n is a, c, g, or t
  misc_feature (1467)..(1468): n is a, c, g, or t
  misc_feature (1470)..(1476): n is a, c, g, or t
  misc_feature (1478)..(1479): n is a, c, g, or t
  misc_feature (1488)..(1489): n is a, c, g, or t
  misc_feature (1498)..(1498): n is a, c, g, or t
  Peptide Sequence Number=SeqID_9442
  Probeset Number=SeqID_11627
ntgagtgagagagaaatgatgtgagatgtgagagagtagagtgnaatacatagnatatatttgagcgtagtgaaaacatatagtcatcataatactatatcatcacatgncaacagaaccagtggtaagacgcgcaagatggaatgnagatagaaacaggggtgcttgataatatcgtcctctctctacatgtcctctccactcttcatctctctcccaatttgcnncgggggtcggccagtggtcgcgcatagaatacaattatgactctctagagacagtatattatgatatatgagggtggtggagtagtgagagaggatgatagaataggagataaatatagaagaagagaaagagacataatcacagagacagacatgctaataatgagatcgctatcataatctcaagaatatataaaacacatatattagattacgtgcgtttttatcaactatgagacagctagagagagtagaagtaataatcagcactgtagcagtgccaccgtcacagacgtacgcggtcacacacatgtaagccagcggactgtgatgtgcgtggcagagtccacacgcgtagggcgccgagacattcgctcctcatctatagcagtgtccgtctgtgtgtagtatctatcgcgcacaacgccacgagagagnccgtagatcagcatacaaatagtataacacgaaagataagtatcatcgataacgactcctcactcacagatcactgaatacacaactgcgcaggacgcagagtattaagagtagagatagtgagtgagttgaggcgagagtgtgctctacacacatcgtagtacggtgtccgngacatatacacaatcgccgaggcacgcgaggtgccaggcgtntctattagatcatcttcattatatatatagtcatatcgcacgtatataagcagtagatgctgttatagctagtatatcgaccgccaataaaattatcattatacgagataatagcaagaagagtataattttattactacaagtagtggagaggcagtgtagtgtgagagacttgccacagccacgctgctagcacagattatgaacagcaagataacgctcctatctagacagactaatcgcgactgtagtcaacacacacactacgcngcgcttattttccgctgacgacggtgtgngatattntatgntcgtgtggggnnngcgagtgtagttttattnattgtgttacttttgagaagagagagtagtaggnagaatagaggacacgcacacaatcaacacatagatctctctcttacaatcgaatacacaaanccctgccacggtcgtctctctttcatctntttatcattaagagaagagagagacccaggatcntntaatattatccacactaatcaaattgcgtgcccncccgnnnnnnnnnnnnnnntctnnttnnntntggggtgtgngnggnnngnngnnnnnnngnntttgttttnnttttttttn

SEQ ID NO: 1849 - DNA, 1587 bp, Glycine max
  misc_feature (1)..(1): n is a, c, g, or t
  misc_feature (14)..(14): n is a, c, g, or t
  misc_feature (85)..(85): n is a, c, g, or t
  misc_feature (165)..(165): n is a, c, g, or t
  misc_feature (255)..(255): n is a, c, g, or t
  misc_feature (297)..(297): n is a, c, g, or t
  misc_feature (331)..(331): n is a, c, g, or t
  misc_feature (397)..(397): n is a, c, g, or t
  misc_feature (603)..(603): n is a, c, g, or t
  misc_feature (616)..(616): n is a, c, g, or t
  misc_feature (620)..(620): n is a, c, g, or t
  misc_feature (625)..(625): n is a, c, g, or t
  misc_feature (636)..(636): n is a, c, g, or t
  misc_feature (640)..(640): n is a, c, g, or t
  misc_feature (744)..(744): n is a, c, g, or t
  misc_feature (877)..(877): n is a, c, g, or t
  misc_feature (969)..(969): n is a, c, g, or t
  misc_feature (971)..(971): n is a, c, g, or t
  misc_feature (974)..(974): n is a, c, g, or t
  misc_feature (978)..(978): n is a, c, g, or t
  misc_feature (980)..(983): n is a, c, g, or t
  misc_feature (985)..(986): n is a, c, g, or t
  misc_feature (993)..(993): n is a, c, g, or t
  misc_feature (1024)..(1024): n is a, c, g, or t
  misc_feature (1067)..(1067): n is a, c, g, or t
  misc_feature (1120)..(1120): n is a, c, g, or t
  misc_feature (1124)..(1124): n is a, c, g, or t
  misc_feature (1126)..(1126): n is a, c, g, or t
  misc_feature (1201)..(1201): n is a, c, g, or t
  misc_feature (1211)..(1211): n is a, c, g, or t
  misc_feature (1222)..(1222): n is a, c, g, or t
  misc_feature (1253)..(1253): n is a, c, g, or t
  misc_feature (1291)..(1291): n is a, c, g, or t
  misc_feature (1353)..(1353): n is a, c, g, or t
  misc_feature (1379)..(1379): n is a, c, g, or t
  misc_feature (1384)..(1384): n is a, c, g, or t
  misc_feature (1455)..(1455): n is a, c, g, or t
  misc_feature (1467)..(1468): n is a, c, g, or t
  misc_feature (1473)..(1475): n is a, c, g, or t
  misc_feature (1522)..(1524): n is a, c, g, or t
  misc_feature (1527)..(1527): n is a, c, g, or t
  misc_feature (1535)..(1535): n is a, c, g, or t
  misc_feature (1537)..(1539): n is a, c, g, or t
  misc_feature (1542)..(1542): n is a, c, g, or t
  misc_feature (1552)..(1554): n is a, c, g, or t
  Peptide Sequence Number=SeqID_9443
  Probeset Number=SeqID_11628
ntagtacgtagtangataggagtgtcttttcacgcgagatcattgtgatagctgtttacggtactcatagtgagtcgtgcgtgtnagtcacgctgtatgaatgtggtattagagacatgcgcactgtctcaagtgatgcgcatagtgactatcacgagccatcanatctgatgatgatgcagtcagtgctagagtcatcacgtgcacgacgtatctgtataactgggaatgtctgcatcgtgcatcatagacatnagtcttacatagtcagatcgctattaatcacgtgcgctgcgnttggattgatatgccatagcctagtgtcgatatntcacgataggaggatcgaggtataagtcgctgtactattactaagtgatagagtattactcaatanatataatatacagtacggagatcgaggcaggtggagacgtatattgtgcatgtttaatggtattatagtattgtgatgtatcgacacatgtatatagtcgtgagaatagtctatggcagacgcttatagatatgatcagcacacgtaacgctgaatagaagcgtaccatgcatctcctactactcctcttctttgcttcttatgtntttcaagtaactntatntgttntctatggcatntatnattcaatatattgaatatttagatatatcttatatataggtaagcagtgtggtgtgtgggtgtgtttttcccacattatgcatgtcgaggaccgacatacacanatacatgcgcctgttaaacagttatcatcattatcttatgtataatcatctaagtggaatgtctcatatatgcagcgtagggcgtgttgtcctttatagtataaagagttatatttcttttacgttcatatcnacttcatacttataccataatatgatagacacatagtctaagacaacacaatagagtaggagatagagaggagagaccatagtgaagagggnantanaatntnnnnanncactcantaacatatacatatagtgtttgatttatctncccgctcgctcaagtggagcgagaagcgccgtaccgtagttgnagaatctgatgtcataaggtgttaaagggagcagcattataggagagtgtgcncgtnangatgttatacgctcgtagtgctctgctgtgacatatttctatctgctggaggagtcgggatagtgtaggatgagnatactccgtntacgcgccagngttgaggccacatatgtgttgttgttttctnttgttgatttgatatgacagcgatggtggtgtggtggngtgtttggtatatgatagggataggggggtcgtcctctcgaatgtgtcgttgccacacccanactcccacacccacacctcacacgtngatcnttctcgttgtgtgggtggagagggggagcgccttatcgattatgctatgaactctcggatgggtgtgggtnaacttccacccnntggtnnntttttcggtgtcttttcgtcttggtagcagaggagagagaatgaatnnnttntgtccccntnnngcncacccccccnnngggggggggcgcacccaaacaacaaccccccca

SEQ ID NO: 1850 - DNA, 460 bp, Glycine max
  Probeset Number=SeqID_11629
aaaaaccaaatcgtcctcgtcaccgacagatagagagctccgccgctgccggccgggatccggggccggcgttgctgcccgtgctcaccagcaccgcccctagagacgtgctgctggacgtgccgaagccccctgctggtctccctccaggttcgtcctcgaccaccgcggctggacgcgcggctgacccgccgcagatccccgtggccggagacgccgcggaggcctgccgctggatgcgtcgccgaggccttctgctgtacgcatgacttatttgtccctggtcgacaccactgggcctgaccaagtcgctctacctaggattgcagctagcagtttccaagtctgcacgcaagctgtttgtggtaatgtctcttcatccgtgataatttttttcaactcgattttgcaccatagcatagtcagcggctgttgtagtactatatttgtctagaataga

SEQ ID NO: 1851 - DNA, 785 bp, Glycine max
  misc_feature (1)..(1): n is a, c, g, or t
  Peptide Sequence Number=SeqID_9444
  Probeset Number=SeqID_11630
ntatttaggaaagactcggtgggaaaaagtgggggattgaaatttcataaaggttcccactattagtcggcagccttctggttggtcaaaccatcaattatcccccctcttcggtagtttttcaagagggatgattccttcaacgaaagcataggttggaggtagcaacgccaaccaaacatgttggtagtgaaggagtcttctggcagtgatggaagtaggaaaatgcattccatcgatggaccttgttgcagcagtcttttaattagtcgacttctgactgcctccccttcatctattcagcagtgtcggtcgccacaaaagactggtcatcagtccctcgacgtgtcatgcgtggaggtggatcatcctcatcagcatctgtggcaaagaaataatcttgtagtcatccaactatgcttcattaattgctgaatgatcatcatccagatgcagctgcatcataatatccgtgtggacgtcttgcattataagtttgaagaagccaactaagttgaagatggagaattagaatcatcatggaggatgtaataacagcatcagtcagtagtatcttcttttgctcccacctggggcggtaagtttgctcaacacagccaatatgagcatcagaatattcctggcttgtataatgaggagatgatgagcttcttcttctatgataatgttctgttaacatctaatcacctttctgaataatcacatcgtaattagaggagaaagaaatcactcctaaagcatctcatccgtcttggcagcacaca

SEQ ID NO: 1852 - DNA, 494 bp, Glycine max
  Probeset Number=SeqID_11631
ctaaccctctagtttttcccctgcgccgcttgtgtcgatttggacgaagaacaaatccacggccgacgcggtcaccgtcaccctcatcgctgtcgcaaccagacgccttctcgatgtccaggaccacaccaagagaagcaccgcgacgcccgcaccctcctggcgcaaggagcctcctaggattgccgccatccctcgcgaacgactccgtgttcgtcaacgccggccgccactgcttccttcgatctgcaccgctccgacctccttcggcttccccgagccctccacgagcaccgccacttcgagaccgctgccgatgtccgtgtgttcgactacatcgacgatgacccttccttcttgtcagagcaaccagacgatggagcccaggagccaggcgccaccgtcgacgactactactactactcgggaggtgcctactactgcgtgcagcccgctgacgacgaccaggagtagtttaggaggatccaggcagg

SEQ ID NO: 1853 - DNA, 626 bp, Glycine max
  Peptide Sequence Number=SeqID_9445
  Probeset Number=SeqID_11632
attccactccatcgcatcccctctcttctacctccgtctctcctccttgcagttgcagagcgatggcaaggaactccgagaggaggagggtgaaatggtcactatgatgttggctcgactcactcagaccacgccggccggccggccggagccatccgcggcggtggttctgattgagccgtgccaatatcttagtgctctttcatgcatgcatgtgcccgttccttgtgcgccgccgtgcctagctagctcctccgccatggcgccagccggccagtacaccgtcctaacctgcgctacaggtttgccttgtgtgcatgcgagctatgtgttcatcctctggacgtgcaagctaggctggtgatttgccgccgatagagaggtcactccactgatctacatgcagggttaactcccaagaagggttggagtaaggcacagagaaatgtacaaaacttcmccgcttyttcatgcaccgccccagacaagttcagtttgaacatgcatgtagtgtgtgtgacatgcttgcacgtytacgtgctccaatgttttgtatacagttatacmcaacattgtctttcataaaagatggtactcctgagtgtatgttcatggaaaacttaccc

SEQ ID NO: 1854 - DNA, 1495 bp, Glycine max
  Probeset Number=SeqID_11633
aattacaagaaaattaagcaatccaccatgagatcaccaacaacagttttagttctcttagctcttttctacgtgccagcattatttgcatatgatcaagacctagtttctcatctcccaggctggcctccaggtttaacatacaacctgtatgctgggcggctccctcttaaggacacgagatacctacagtattactttgttacaagtcaaggaaacccttcaactgatcctttcattctttggctaaatggaggaccaggttgctcaagtcttgtcggattatttggagaaattggccctttccttgtcaactcagacagtggctatcttgaagtcaacgagtgggcttggaacaagcatgctaacgtgctttttattgactctcctgctggagttggattttccttcaccccaaatatggaggatgagaaatataatgatgaagtcacagttgaaaaccttttcgaaggattgacttatttctttaatgaaaagttcaaaaattataactttaaggataacaagttctggattgctggtgagagttacgctgggatattcattccaaagcttgctagatatatcgattcttaccctaaagaaaacgctttcggattcaaattggatcttgctggaatcctagtgggtaatggtgtaactctatctcaacaattggatgccgatagaattagctttgctgttaaccataagctgataaatgaatcactctacactgaatatcgacaaaattgtcacccaggcgactccgaacacaacgataaatgcaaaagcatcaaacaattggttcaagacattatggattctaagaaggatgtcaatccttatgatatctataggaagtgtattcctgacccaatcctacctgatggtagtcaaatggagaacgaaatgccatgtgtaacagcacaggctctgattgatttcctaaacaaggaagaagtgaaaagagcattgcatgctagtagcggaataacctggttgaactgtaactcaaagattcatgacaaatattagaaagataatgcagagtctttggaagattacaaatacttgaagaataatggactcaggatattcctatggacaggtgataccgattttgcagttccttacgttcacactatacaaaccatgcttcaagttgatagtgacattgtagaagggtggagaacttggagtctgaatgacgagatcaaaggatataccttcagaactgcaaagatgacttttgccagtataaatggcactggccatatgactcctgtttggagaaaggaagaaacctacagcctcgtttcaaagtttatgaagaatgagttgatctaagctattatgtgttctgttatatatactctttaattcgtagatacttgttttgtttccattattactgatatgcacaagtctcttatatactaattaatagtccattttgtatatatcggtaatggaagataattcgctaatctcc

SEQ ID NO: 1855 - DNA, 1527 bp, Glycine max
  misc_feature (15)..(15): n is a, c, g, or t
  misc_feature (19)..(19): n is a, c, g, or t
  misc_feature (34)..(34): n is a, c, g, or t
  misc_feature (38)..(38): n is a, c, g, or t
  misc_feature (47)..(47): n is a, c, g, or t
  misc_feature (65)..(65): n is a, c, g, or t
  misc_feature (75)..(75): n is a, c, g, or t
  misc_feature (77)..(77): n is a, c, g, or t
  misc_feature (83)..(83): n is a, c, g, or t
  misc_feature (549)..(549): n is a, c, g, or t
  misc_feature (789)..(789): n is a, c, g, or t
  misc_feature (1194)..(1194): n is a, c, g, or t
  misc_feature (1250)..(1250): n is a, c, g, or t
  misc_feature (1291)..(1291): n is a, c, g, or t
  misc_feature (1295)..(1295): n is a, c, g, or t
  misc_feature (1307)..(1307): n is a, c, g, or t
  misc_feature (1527)..(1527): n is a, c, g, or t
  Peptide Sequence Number=SeqID_9446
  Probeset Number=SeqID_11634
cagatgcgtaatctntacnacaatagaagtcgcngaangacatatanataaagcaaaacttctcncccgtaccancnaccttncatcgtgcatcttacgtctcgattcccccctgcctcgatggggtatgatgagggttgtggatagatcaagatctgctcatcttcttcgggctgtagggcgagtcctggtgacagcagcgtgaacggttagcgacatgcagcgtgtgagctgcgtgtgagagtgtgattatgttcgacgcagtgtgctctgtgcgaagtacgtgggaccagaaatgtgtagcgagccgtgagcgagtgaatgcagtatgatacgtgagagagtggtgtcggaatgtgcaagcctagcgcttgatgggattgtagacatgtactctcctcgtgcttctcgctatgatagtagacttactacatgtagcaggtgggtagttctagtgctatgcttgaggacgcgtagcctatgctgcgtgcattgcacacagacgatatagcatatcatgacgaagaacaacatacgcacgatatcgancgcaaagttgttatacatagagtcatagcttacatatactagacggccgtgtgcacactagcgactgagtagagagaatatatatgtcgtcagatatgatccacgactgcggagcgtcctgttgataaccaggagagggaggtgtagagacatatgtaagagtaattaataatattcaaatctaatcgtcaacattgagttataatacatttatatcatacgtcctgctcctgcatctgncttaccattaaactagagtctacatatgtctccatagcatcttcatggtcagccaatgatctcgtgactatattcactatactcataacaagctaattgagtacgattacgttatctaccatcacgtggcgcagtcgttataccacagcgtgcacactcacttgctcattatagatctgtgctgagtactctacatatatacaactaacactcgacctatcggtcgtcacgctgtctctatgcggcagcgcagtcgaattatttgtattgccctcctattatctagactcataatctatgagctacatataatatgtccgatcgttagagtgcgtccacatacatgcacgacgagtatttatcgtggatacgtaggcacttggactggtatactcataacgctcnactcacatataagcctttgcttgtgctcacacgcactgatctgtgatctcacctanaatcgtatctcaacgccatttcgtagcgtatatgcgcggtngcgngcattcttgtgngtggggagaagatgatataagactctagacactcgcgatgctctcatgtgcgctctcctatacgctctcacttatgttgacttctgacgaatatctgttctatacacattcattactcgaagtacgcgactgctcaggcacacagagagcgtcagatgagatattatcgctacttggaacgcatctgtgatttagagacactcgcgctaagtgtctcaan

SEQ ID NO: 1856 - DNA, 1022 bp, Glycine max
  Probeset Number=SeqID_11635
ggtctttaattatgaatcaagctcaagctaagcctgttagaaactctcaaggtagccttggtttcgtgataaacttctttagtggaggtttatccggtatcattgccaaaacaagcactgcccctattgagagaatcaagcttcttcttcaaactcaacacgagaaccataaagtcgtgagaccttacaagggtatcggtgactgctttactcgtactttgaaagaagaaggtgtgcttgctttctggagaggaaataccgcaaacattattagatatttccccactcaagctcttaattttgctttcaaggaaatctacagagattttctccttcccaagaactctgaaaccaagacttctgccaaagttgttttggctaatctcatggctggtggtcttgctggtagtacttcaactctctttgtctatcccctcgatatggcaagaacaagattgggagttgatattggtaagaatcccagtgaaagacaattcagaggcgtctttgactgtatcagcaagattcatagaaccgatggctttaagggcttatataaaggacttggtatgtccttgtttggtattttcatgtaccgcggcctttacttcggtacctatgacagtggaaagggtcacgtaatcaaccccgagacctcaactttcttgcagaagttcttgtttgcacaagcctgtgtgatcttctctgaaagtatctcttaccccactgacaccatcaagagaaagctgatgttacaagctgccagtaaagaagttttatataccggagctattgattgcatcaagaaggtaatgaagaatgacggtattaaaggatttttcagaggaaacttgagcaatgtcttcagaagtgtaggaagctcattgtgtcttgtattatacgatgagatgaaacgccacagcgataaatacgctgcttcacattaaatttttttatctttttatcttgtaaacattattgagtaacaagtcgcttttgtggaggtgcttgattgttcattc

SEQ ID NO: 1857 - DNA, 368 bp, Glycine max
  misc_feature (115)..(115): n is a, c, g, or t
  misc_feature (190)..(190): n is a, c, g, or t
  misc_feature (305)..(305): n is a, c, g, or t
  Peptide Sequence Number=SeqID_9447
  Probeset Number=SeqID_11636
ttttttttttttttttttgaagttttttttaataaggaaatatcattttaaagtgataatcagaaatattttgttataaatgaagaaaaaaatcgatttcaagatcgattattgntatatattcattttaaaaaatcacaagtaatatttaatatctttataaatttcaccaagaagtattctgcatcanaattccttctaatctctaaataaaatataatttgaatctttgagtgtcccaaccctttgtcaattccataacgagaaaggcacttcctgtagcatcgttattgtaacacgtcaanactctcttggatctcatattttgaagtgtaaagaacacaccttcagaagtaagtttccacatt

SEQ ID NO: 1858 - DNA, 845 bp, Glycine max
  Probeset Number=SeqID_11637
tcgagccgcctccgtggcccccccccctaaaaagttggcggaatataattctattgtgtgcagtgcagtgttttcccacgaggcaacaaggaaacaataatctcatattcccaaaacttgagctttattacgttgtttctgtagatggagaagggtagaaccgtggtggtgtctgctttgcagtttgcatgcaccgatgatgtctcaactaatatcgccaccgccgagaggctaattagagctgcacataaacagggtgcgaacatcattctgattcaggagctctttgaaggttattacttctgtcaggcacaaagagtggatttctttcaaagagctaagccacataaggaccatcccacaatcctcagaatgcagaaacttgcaaaagagttaggtgtagtcataccagttagcttctttgaggaggcaaacaatgcacattataattcaatagccataattgattctgatggaactgatcttgggatttatagaaagtcccatattccagatggaccaggttacgaggaaaagttctattttaatccaggtgacactggatttaggtttttcagactaatttgcaaaaagtgagttgtattttgctggatcagtgttttcctgagcagccgagcaatggtgcttcaggtgctgagttctatttatctaccgctattggtctgaactcatgatgaagcttgactctctgacattggaacgagtatgcaggactgctggggcatttggcacacttgggctacataggatagaaagaattattgactgacatggaaagggaatacttttttgaactcctcaacagcttactggaaatgtcatgc

SEQ ID NO: 1859 - DNA, 570 bp, Glycine max
  misc_feature (50)..(50): n is a, c, g, or t
  misc_feature (69)..(69): n is a, c, g, or t
  misc_feature (351)..(351): n is a, c, g, or t
  misc_feature (433)..(433): n is a, c, g, or t
  misc_feature (503)..(503): n is a, c, g, or t
  misc_feature (520)..(520): n is a, c, g, or t
  Peptide Sequence Number=SeqID_9448
  Probeset Number=SeqID_11638
ttttttttttttttttttggttgggggtttatatattttttatatattgntactttcaaagtgttttanatagattttgtatatattttatgatataatacagtcttgatttgtcttgattccccaactgattagcattcttctgagctttcttcaatatcttccaactcttccggctcacatcggtctcgctgatcttgatacttgaccactggcccaacgctgaacatctgaccactggctcatccctgaactgaccgctggcccatcccttgaatatttgaccactggcccatccctgaaccgctgaactgatctgaatgagcctttgtgagccttccaagtcttcanagctaatcttctttcaattaactgtgtcttgagtcttgagaataagtcttgagagataaaataagtcttcaatgtctcctancacgttcattgatgtaattgattacttgtaggtgattcatgtaaatcttgataggattcttgagtcttgncttgtcttgagtaatantttcaaagtattttcatctggttccttgttaattccaatgatattttgat

SEQ ID NO: 1860 - DNA, 1485 bp, Glycine max
  misc_feature (17)..(17): n is a, c, g, or t
  misc_feature (26)..(26): n is a, c, g, or t
  misc_feature (101)..(102): n is a, c, g, or t
  misc_feature (108)..(110): n is a, c, g, or t
  misc_feature (122)..(123): n is a, c, g, or t
  misc_feature (133)..(133): n is a, c, g, or t
  misc_feature (199)..(199): n is a, c, g, or t
  misc_feature (202)..(203): n is a, c, g, or t
  misc_feature (241)..(241): n is a, c, g, or t
  misc_feature (402)..(402): n is a, c, g, or t
  misc_feature (1154)..(1154): n is a, c, g, or t
  misc_feature (1177)..(1177): n is a, c, g, or t
  misc_feature (1279)..(1279): n is a, c, g, or t
  misc_feature (1413)..(1413): n is a, c, g, or t
  misc_feature (1451)..(1451): n is a, c, g, or t
  Probeset Number=SeqID_11639
gtgttttttttttgttngggcaaagngggggggcgcaaaatgttttgtggcatcatgtttgttgtgttgtcttgacgggtggcttactggttgggggcgcnnggcacnnnccaacggatccnnaccccggaancgtggcctggggcacaaagggggcgcacaacctctgcggcggcaacagggtgggtataaggtattnacnntgggaatcacagggagcataccgtgtctctttattacnttactaggtgtcgagtggaaatgttttagttcggacatatatgagttagggtaagaagacgggtgttctataatattgtgtgggttctaagtaatggtacgcagagcaagtggtgggagaacgcaagccgcgcggcccgcgggcgcgggcgcgccaacccnaaaaaatctctgttgacagcatggtgtggggggccaataatatttcgactgtgtaacaacactacatagtgggtgagagcgcggattgtgtgtgtgaggttgttgaatgatgaataaactggtgccaaatatacaatacgaaatttgaatgtgtgttgttgtagattggttgtggatacagttctctgtggtgcggttcacaccctttactcaccaatcatacaagggtttgcaagaaagacgggacgagagagaacacaaatagacacggggacgaaataattcaaagagagaaaaatagagaagaaagggcgccgcgattatgttataatataatatctgggcgggtcgctaatcgttggtggtgtggggtgtgagtagacgagaggagagtcttatttgctgtggacagataatacacgcggagagaaatactataagtaaatactgcgcgtggcgataagcataataccaaaacactggcacatatatatgataacaaaccgggcgctggggctagatcatacattcgggatgaggtgtgaacaaagaaggcggtgtgaggaaatagaatcgcgggtgcgcgaggtaataaaaatacgagaggtgtgggatacaactaatacaatctctcatataacacaacatagtctgttattcctgttctagtgtgttgcgagatacacagaactcacaatataataaggtgcttgtgatttgttagtgtgatatagtcttctaacaaagcaatnggtgcgtgggcgggagaaagcanaacaagcgatcgggcgtggaggaggatagaatatagatatgaggaagggaggtgtggaatatataggtggtacctacctccgtgtgttcgacgaactatcantcgcactcgccaacatggtcgcgcgtgtgactaacatataatatcgtgcgacggtcgcgacgagcatcacaacacatctgagtactgcgagcgacgcgacttgtgtatgtatctgagagacgtggtgagttaanagggtgtgtctaatgcgtgtgtgctggtgggtgtagcnctaaatgagtgtgagatctattgtgtgtgtattg

SEQ ID NO: 1861 - DNA, 541 bp, Glycine max
  misc_feature (43)..(44): n is a, c, g, or t
  misc_feature (105)..(106): n is a, c, g, or t
  misc_feature (130)..(131): n is a, c, g, or t
  misc_feature (195)..(196): n is a, c, g, or t
  Peptide Sequence Number=SeqID_9449
  Probeset Number=SeqID_11640
gcgaggatcagatgcgatgattttgaagatatctatcgtttcnngtcatctcctatatccatacggctatagattggcgtttcttatgggactcgagtttggagnngttcaaccttgtcggagttgtganngcggcttttaagcttccagatggaatcctatatgtctcttatccccataagaattctcataacnncggatttatatatgcgcgcatggttgtcaaacaattttaatgctggcttggaaaccgtgcgcggttggaccataccggtttataccgttgacaagccgccacatcatgctttaacatatatttctggaacatccatgtcatgccctcacgtgagtggcttatccgcgattctcataggcgcgcaccctcagtggagccctgccgccattaggtctgccctcatgacaacagcatacacaagttacaaaaatggtgaaacgattcaagatgtttcaacaggacaacctgcgacaccgtttgattacggagcaggacacgtggaccctgtggccgctcttgatcctg

SEQ ID NO: 1862 - DNA, 430 bp, Glycine max
  misc_feature (203)..(203): n is a, c, g, or t
  Peptide Sequence Number=SeqID_9450
  Probeset Number=SeqID_11641
gactaacttcccattgatcaacttggagaagctcagcggtgaggaaagaaacgataccatggaaaaaattaaagatgcttgtgaaaactgcagattctttgaactgctgaatcataacattcctcataacatattacacactatcacacaattaacccaacaccactacagtaaatacatataacatagattcaataaattantaccaaccaaagatctagattctatccaaactataatcaaacatataaactaatatatcaccttccacttacatcacctgcctaaatcaaacatctgatagatccctaatctcattcataactacatgacaatcatcaacaattctgctctaaacctatataaattaccactacacctactatactacgtgactcagaatcgtagcctagactacaagtacctgaat

SEQ ID NO: 1863 - DNA, 572 bp, Glycine max
  Peptide Sequence Number=SeqID_9451
  Probeset Number=SeqID_11642
tcagctacgtaggcccccccccccccccggggacgcaaagagtatcctcaattttttgcagctcttatttgaaatcagcaacatggttgttgataaagatgatggaaagaagaagagcaaaaagtcaaagaaaagcaaacaccagaaacttgtcaaatcctctgctaattctgtagatcatacctcaaatcatagtcaaaaaagctctgaagccgactggaaacaaaaatacaacagtgtacttggaatcaacgccgaatttagcaatagctctgccactggagaatctgtctacgaccctaatcaagaagaagagggttctgaagaacaacatggagctgaagcaatccacagaaatgctcctggaagtgacctcaaaagacatccaaacaaatcttcagatgagcatcaaattgctggaagcagaggagactctcaaagcgctagtcgaatgtctgaagccaacaaaagtggtgcaaagcaaaaatacgatgaatatagtagtcatcaaagaagctctggccaaaaacatcaatctagaaactctgagaatatccaagaaagagatgaag

SEQ ID NO: 1864 - DNA, 461 bp, Glycine max
  misc_feature (456)..(456): n is a, c, g, or t
  Probeset Number=SeqID_11643
actcaacttcttctctcatctctggaaatcatggccaactttattgtgaccagcgaaatggaataccgtgttgtaagattcaacgtagctgctggtactttgagcaaccttgtcgtaaggatggtcgactgcgaacgcacaataagtcgttggctcaatgggaacgaagtcataacatactatcaccgtcatgatactccccgccatccccttggaccttacgagcaaatcaatcatacgacggaaggatggcgtgtagacacgcaagaggagcttcgtcaacgtattgctaccgatcttttcaatgattacgatcagggttggaactacaattgggaaccccttgctgcattcttgtctgcacatgtacatggcgcaggtggtggaggagcaaatttcaacctcgaagttgaaacagtggtggttgatcaagcagtggcggaccaaaaccagccntactg

SEQ ID NO: 1865 - DNA, 2040 bp, Glycine max
  misc_feature (592)..(592): n is a, c, g, or t
  misc_feature (850)..(850): n is a, c, g, or t
  misc_feature (867)..(867): n is a, c, g, or t
  misc_feature (877)..(877): n is a, c, g, or t
  misc_feature (936)..(936): n is a, c, g, or t
  misc_feature (1027)..(1027): n is a, c, g, or t
  misc_feature (1070)..(1070): n is a, c, g, or t
  misc_feature (1095)..(1095): n is a, c, g, or t
  misc_feature (1156)..(1156): n is a, c, g, or t
  misc_feature (1178)..(1178): n is a, c, g, or t
  misc_feature (1276)..(1276): n is a, c, g, or t
  misc_feature (1282)..(1282): n is a, c, g, or t
  misc_feature (1299)..(1299): n is a, c, g, or t
  misc_feature (1306)..(1306): n is a, c, g, or t
  misc_feature (1350)..(1350): n is a, c, g, or t
  misc_feature (1390)..(1390): n is a, c, g, or t
  misc_feature (1410)..(1410): n is a, c, g, or t
  misc_feature (1441)..(1441): n is a, c, g, or t
  misc_feature (1449)..(1450): n is a, c, g, or t
  misc_feature (1452)..(1452): n is a, c, g, or t
  misc_feature (1522)..(1522): n is a, c, g, or t
  misc_feature (1542)..(1543): n is a, c, g, or t
  misc_feature (1549)..(1549): n is a, c, g, or t
  misc_feature (1577)..(1577): n is a, c, g, or t
  misc_feature (1581)..(1581): n is a, c, g, or t
  misc_feature (1584)..(1584): n is a, c, g, or t
  misc_feature (1599)..(1599): n is a, c, g, or t
  misc_feature (1655)..(1655): n is a, c, g, or t
  misc_feature (1674)..(1674): n is a, c, g, or t
  misc_feature (1677)..(1677): n is a, c, g, or t
  misc_feature (1707)..(1707): n is a, c, g, or t
  misc_feature (1721)..(1721): n is a, c, g, or t
  misc_feature (1777)..(1777): n is a, c, g, or t
  misc_feature (1795)..(1795): n is a, c, g, or t
  misc_feature (1802)..(1802): n is a, c, g, or t
  misc_feature (1814)..(1814): n is a, c, g, or t
  misc_feature (1846)..(1846): n is a, c, g, or t
  misc_feature (1864)..(1865): n is a, c, g, or t
  misc_feature (1901)..(1901): n is a, c, g, or t
  misc_feature (1956)..(1956): n is a, c, g, or t
  misc_feature (1998)..(1998): n is a, c, g, or t
  Peptide Sequence Number=SeqID_9452
  Probeset Number=SeqID_11644
agtgtacacttactacaatgccacgaatccgaatttgaacgccacctctctaccacccgatcaccagctagtcctaacacgacattttttcactctcacacagcggtatactaacacgacctcaacagacgcgagaattatgggggtactgcgtgtagggagcatacgatggcaagagacgcgcgcctctgctctatcttcactgagaatgtgggtagctgtatggagggcatgagtcgaccgcacactctttatatggccaatttctcttccgtattgatagaagtgagttaggcaccctttcagccccacccccaccaaacattataccacctaggatagtgtcaggtcggacgcatttctaacctctcttcgacgccgaccctccaccacaccttctccacatgagccatactatctgccccctacttcacacgacgcggccgattggacacccatcccattgaacactattttattttcctcctatattagacagttgatcgctgtattacacgtggaatattatccacctattcttaccccgctatggagtggaagcagggagtgtaaagctacctctaacgccagngccgtcgactgtgaacccgtcagattgtgtcaccatagtcaccgcacatctcaccgcgtaacagagtccgccggatatacctcacgtattttcgcctcacgttgttttcccctcggtatttgttgtggcacgcgggttttgctctctgctgcggtattacagatattgtctcccctatactcctccacgcgtcgtcttggcccgctgtgttgctccgatatggactccctgacacttataagttatgtcgcacggcancacgccctcgccaccgntgtatagaanttctccctataattgctttgcgccgctatctgtactgactcgacgcgtgtgatgtgaanactcaccgttatgtgagcactcttatcacatcgctatatagtatatcgccttgcttctcatgaagtatcgggcatgataactgatacgccnacgcgtggtgtgctacattattgttgtacacgctaatgtatgntgcgccaacgctcatgatcgcctcncgcgatcaacctgcgcgggcaggatcgtgaacggttatgatactgaatcgatactcgttanacctgcacacgaggtgtcactnacacacgatgatagtctcacactcaacgcgatgagatcacaacaagctcgatagtattgttcagctcgcgcgatacagtacgagatagcgcagaagtnatatcncctatcatgatgtcganatgaacngatacactatcatgcatgcgcacgctcgcgctgtacagttctgncgctatgtatgcgtgctagatgcacaatactcgactacanccgttctatgtatcgatagnactactactgacgtcgtatcgtatcgtgtgnatcgctgnnantaactctgatagttttatatcacaagtgagtaatggacgactatcaacgtagtacgaaggagcacggatntttagcgcgtcaggagagcnncgtacncacggctagagagcgtggatactctatncgantcnacgagatcagatgtntacaccagcgcgacgtcatcgtcacgatcataagagagccatgtagtagagatctngactgcgcagcagcagcancantaccactgcgagtatgatgtagtgtcatcntggctaggcgacantccccgtatcatactatgtggatctgacgtacggcccgctcaactgtagggaatangttccagcgctcgtatgntcgcccnggatgagtacgnctagcagtattacgtatgtacatttcctaganttcgactagcgtgatcannactacgaccagcagactttgagacgtaatttgatgntgtccggagcgtcccatggcgacctctcccgttctggtgataatacgatttgtantataatggccaccactctgcatgtatgctgagtacatctgcncatcgtcctgccacgactgctcatacgagccgcatcatacat

SEQ ID NO: 1866 - DNA, 506 bp, Glycine max
  Probeset Number=SeqID_11645
aaaagcattttctctctagatctcctttcgccttcttcgtctccggtctcggcgtcctatgccggcccgtgagaaggttctccgctcccattatagttatcggaaccgttcttaactgacggtggttacaaaccgaggaggcacatctgttcatctcctagatctggattggttcctgttgcggtggaccacgacgtgaaccctggctcgtcgactcaacggcaggccctcttctcttgaggacggtgcagaggctagctagaggtcgcaagtcagttcatcggggctagggttttgctccagcggttgtgagggttacggcgacaacgggtcctgctgaaggatggcggtttcttcagtactctagcccaatgaagctcggatctgctcttgacatgctgattttctagatgtgcgttgaatctagaccatgcgtgacgacgaggcgtcatcggagacggcaggaggagagcgagaatcaggcgtcttggcgagtctgccgacgt

SEQ ID NO: 1867 - DNA, 2220 bp, Glycine max
  misc_feature (20)..(20): n is a, c, g, or t
  misc_feature (23)..(23): n is a, c, g, or t
  misc_feature (34)..(34): n is a, c, g, or t
  misc_feature (58)..(58): n is a, c, g, or t
  misc_feature (96)..(96): n is a, c, g, or t
  misc_feature (105)..(105): n is a, c, g, or t
  misc_feature (120)..(120): n is a, c, g, or t
  misc_feature (144)..(144): n is a, c, g, or t
  misc_feature (187)..(188): n is a, c, g, or t
  misc_feature (202)..(202): n is a, c, g, or t
  misc_feature (204)..(204): n is a, c, g, or t
  misc_feature (208)..(208): n is a, c, g, or t
  misc_feature (227)..(227): n is a, c, g, or t
  misc_feature (235)..(235): n is a, c, g, or t
  misc_feature (247)..(247): n is a, c, g, or t
  misc_feature (289)..(289): n is a, c, g, or t
  misc_feature (304)..(304): n is a, c, g, or t
  misc_feature (319)..(319): n is a, c, g, or t
  misc_feature (408)..(408): n is a, c, g, or t
  misc_feature (412)..(412): n is a, c, g, or t
  misc_feature (417)..(417): n is a, c, g, or t
  misc_feature (561)..(561): n is a, c, g, or t
  misc_feature (608)..(608): n is a, c, g, or t
  misc_feature (610)..(610): n is a, c, g, or t
  misc_feature (643)..(643): n is a, c, g, or t
  misc_feature (731)..(731): n is a, c, g, or t
  misc_feature (836)..(836): n is a, c, g, or t
  misc_feature (847)..(847): n is a, c, g, or t
  misc_feature (887)..(887): n is a, c, g, or t
  misc_feature (919)..(919): n is a, c, g, or t
  misc_feature (928)..(928): n is a, c, g, or t
  misc_feature (961)..(961): n is a, c, g, or t
  misc_feature (964)..(964): n is a, c, g, or t
  misc_feature (969)..(969): n is a, c, g, or t
  misc_feature (975)..(975): n is a, c, g, or t
  misc_feature (1026)..(1026): n is a, c, g, or t
  misc_feature (1043)..(1043): n is a, c, g, or t
  misc_feature (1122)..(1122): n is a, c, g, or t
  misc_feature (1124)..(1124): n is a, c, g, or t
  misc_feature (1146)..(1146): n is a, c, g, or t
  misc_feature (1155)..(1155): n is a, c, g, or t
  misc_feature (1158)..(1158): n is a, c, g, or t
  misc_feature (1168)..(1168): n is a, c, g, or t
  misc_feature (1186)..(1186): n is a, c, g, or t
  misc_feature (1188)..(1188): n is a, c, g, or t
  misc_feature (1196)..(1196): n is a, c, g, or t
  misc_feature (1210)..(1210): n is a, c, g, or t
  misc_feature (1215)..(1215): n is a, c, g, or t
  misc_feature (1266)..(1266): n is a, c, g, or t
  misc_feature (1311)..(1311): n is a, c, g, or t
  misc_feature (1323)..(1323): n is a, c, g, or t
  misc_feature (1333)..(1333): n is a, c, g, or t
  misc_feature (1336)..(1336): n is a, c, g, or t
  misc_feature (1377)..(1377): n is a, c, g, or t
  misc_feature (1387)..(1387): n is a, c, g, or t
  misc_feature (1415)..(1415): n is a, c, g, or t
  misc_feature (1426)..(1426): n is a, c, g, or t
  misc_feature (1471)..(1471): n is a, c, g, or t
  misc_feature (1478)..(1478): n is a, c, g, or t
  misc_feature (1492)..(1492): n is a, c, g, or t
  misc_feature (1510)..(1510): n is a, c, g, or t
  misc_feature (1515)..(1515): n is a, c, g, or t
  misc_feature (1529)..(1529): n is a, c, g, or t
  misc_feature (1548)..(1548): n is a, c, g, or t
  misc_feature (1556)..(1556): n is a, c, g, or t
  misc_feature (1558)..(1558): n is a, c, g, or t
  misc_feature (1583)..(1583): n is a, c, g, or t
  misc_feature (1588)..(1588): n is a, c, g, or t
  misc_feature (1590)..(1590): n is a, c, g, or t
  misc_feature (1592)..(1592): n is a, c, g, or t
  misc_feature (1595)..(1595): n is a, c, g, or t
  misc_feature (1600)..(1600): n is a, c, g, or t
  misc_feature (1607)..(1607): n is a, c, g, or t
  misc_feature (1611)..(1611): n is a, c, g, or t
  misc_feature (1614)..(1614): n is a, c, g, or t
  misc_feature (1646)..(1646): n is a, c, g, or t
  misc_feature (1650)..(1650): n is a, c, g, or t
  misc_feature (1652)..(1652): n is a, c, g, or t
  misc_feature (1654)..(1654): n is a, c, g, or t
  misc_feature (1689)..(1689): n is a, c, g, or t
  misc_feature (1691)..(1691): n is a, c, g, or t
  misc_feature (1694)..(1695): n is a, c, g, or t
  misc_feature (1714)..(1714): n is a, c, g, or t
  misc_feature (1742)..(1742): n is a, c, g, or t
  misc_feature (1749)..(1749): n is a, c, g, or t
  misc_feature (1777)..(1777): n is a, c, g, or t
  misc_feature (1804)..(1804): n is a, c, g, or t
  misc_feature (1806)..(1806): n is a, c, g, or t
  misc_feature (1837)..(1837): n is a, c, g, or t
  misc_feature (1872)..(1872): n is a, c, g, or t
  misc_feature (1886)..(1887): n is a, c, g, or t
  misc_feature (1890)..(1890): n is a, c, g, or t
  misc_feature (1892)..(1892): n is a, c, g, or t
  misc_feature (1922)..(1922): n is a, c, g, or t
  misc_feature (1927)..(1927): n is a, c, g, or t
  misc_feature (1937)..(1937): n is a, c, g, or t
  misc_feature (1953)..(1953): n is a, c, g, or t
  misc_feature (1965)..(1965): n is a, c, g, or t
  misc_feature (1971)..(1971): n is a, c, g, or t
  misc_feature (1984)..(1984): n is a, c, g, or t
  misc_feature (1993)..(1993): n is a, c, g, or t
  misc_feature (2011)..(2011): n is a, c, g, or t
  misc_feature (2024)..(2024): n is a, c, g, or t
  misc_feature (2030)..(2030): n is a, c, g, or t
  misc_feature (2047)..(2047): n is a, c, g, or t
  misc_feature (2063)..(2063): n is a, c, g, or t
  misc_feature (2067)..(2067): n is a, c, g, or t
  misc_feature (2075)..(2075): n is a, c, g, or t
  misc_feature (2093)..(2093): n is a, c, g, or t
  misc_feature (2106)..(2106): n is a, c, g, or t
  misc_feature (2109)..(2109): n is a, c, g, or t
  misc_feature (2114)..(2114): n is a, c, g, or t
  misc_feature (2132)..(2132): n is a, c, g, or t
  misc_feature (2145)..(2145): n is a, c, g, or t
  misc_feature (2167)..(2167): n is a, c, g, or t
  misc_feature (2178)..(2178): n is a, c, g, or t
  misc_feature (2181)..(2181): n is a, c, g, or t
  misc_feature (2188)..(2188): n is a, c, g, or t
  misc_feature (2191)..(2192): n is a, c, g, or t
  misc_feature (2203)..(2203): n is a, c, g, or t
  misc_feature (2216)..(2216): n is a, c, g, or t
  misc_feature (2218)..(2218): n is a, c, g, or t
  Peptide Sequence Number=SeqID_9453
  Probeset Number=SeqID_11646
atcccatatcagtgctacgntantagcacgtagncatgctgaagtacgtgctgagtgncgtacgtcgggtctgtgtggattgacctgtatcgatgnggctgtgcngacgcacgacgcgcnggcgtcgatatgagacggagccancagtgtagctagtgagtgatcgcgactcgtcatagaaccattnnatcatagtagattnantatntttagagattctgatatcntgtgagtntagatcatctantcatatacatctctctccatgtagtcgatcctcactatattnatatagactagagangtcgtatctattctnatatactattgatctctctactctactcatcatctccgtgcatctgacgtcttcatgctcactgttgctcacgtgcatcatgtctctcngctnctacngctgccgcagcacgcgctgccgatctagtgtatatagtagtgtatcgacgcgtatctgctacgcttacgagatctggcgcaggatcatcgacctgaagtagtcacactcgatactacgatctagcctgtcgcgtcgcaccgcgnctgctcactgatgtatagtcatatgcgactagagccacgacagcacnanatatactatagtcacgacagctgatcgagtcangctgtctgttgagtgcactcaagagcagagcagcggcacgatgagtgtcgctgcacttgacgagactacgagtcgcgtatgactcgtngacgagactggatcactccgctgacgaacgctcgtacgagtcatactgctactgtacatcggactatgtgagcgtaccgtcgacatcatatacatcagacgctgnacatctcatancgcgatgctcggatacatcattacaattatatggtacgantctatctatctcgcaaccgtgtacagagctantcatgactngctgatctatcactcatgcgtctagctactctntanaacgnacactnatcgttctcgtactgtctctgtcagaactcgactgcgcgaagcagacgcgnacgcacgcactgtctancccggtgatgactatatcactcgctgactagtctgctgctgatacgacactagtactgtgtatagtagtagtctatacntnatatcacgtagatcgatgtatnctagcaganatngtacatagcntagcatcagtatcaatcntngccatcancgatgcgctagctncgtantggatgtatcagtctactgagtctactctgagatactgcgctatgaatctnactatcatcaacacgcagtgatatatgacgctgagcatgtatgangttggatggacncgatcaacangcncgagcagtacatgtcgtctgctgcgcagcgcgacagctgangtaggtactngtctcaaacgcacgacacaccgacgcgnctatgctctgnctcgtccatcatctaccgtgctgtgcattctcatcgacgaccccnatacagnattcgccatgacancgcgcaactgcacgcacntccanagactagatctcgncaacgatttaccagctgcnacgacgtncntggtacgctggacatacactacggnacgtncnantgntgacntgaacantcanacntctacgctacgttaagtcatcacgcataatgntgtncnancatcacagatgcacgcgagagtgcagcacatatancnagnntgctacatgatactatgcntacgaaactagatcccgctgctcgatgncactgcntgtacgatctcatgcatgacaaacgacnagactcctcgtctatcgagattcgctncnacgcagagtgagttacgtcggtgacgtgtanctgctccgaccgatactcgtgtataccgtagcagnaataccagagaganntancnatcgacgtactcagcgctcatactcatgtnatcgnttaactgtcnatccactgcgcacgcntctgctctcganactatnacacccgattagnctcgtacanactgatcacctgactcgnacgctactacgantactanacttacttactacactntacgccggacgcgatncacnggaatcgncgatgcgacggagcatcntcagtccgctatntanctagncacgacaccctttcgtanactactacacagnagtgacgctatacgaagtatantagtcctattncanctactangcnntatactactgntagtcgtactatnantg

SEQ ID NO: 1868 - DNA, 586 bp, Glycine max
  Probeset Number=SeqID_11647
cttgtttatgacttaagcacaaccgattacttgaacttcctatgtgcttctggttataaccctgctttactcaagttttttggcgatttgaaattccctttcacttgtcccaagtcttacagaattgaagatttcaactatccttcaattacggtgcatcatcctgggtcaaagactattaacgttactcgtacagtaacaaatgttgggcctccaagcacgtatgttgtgaatactcactggccaaaggggattaaggttcttgtgcaaccaagttcgttgacttttaagaaaactggagaaaaaaagaaatttcaggttattcttcagccaattggtgtgcctagtcacaacattcctttatttggaaatttgtcttggacagatggcaagcacagagtaactagtcctatcgtagtgctggacacttagaaattaccctcagcactgtcatgttgccattgtcattttagtttgtttgtcttttgttgttttttaggctgtaatataagcgtgttttctgctcattttgcattgatgtactttgtcacataaaataaaaggcacaatcaataatatgcagttt

SEQ ID NO: 1869 - DNA, 4313 bp, Glycine max
  Peptide Sequence Number=SeqID_9454
  Probeset Number=SeqID_11648
agaagctactttgcttcagcttcggggttttcacattttcattccagtgcttaatggccttaacattagcccttagtggaaccaacttcaccacagataagcttgcacttcttgctctcaaatcttcaatcactagagaccctcacaatttcctcactcataattggtctgccaccacttctgtatgcaattgggttggtgtcacttgtgatgcttaccatggaagggtaaggacattgaatcttggcgacatgtctcttagtggcaccatgccctctcacttgggaaaccttaccttccttaataaacttgaccttggcggaaacaaattccatggtcagttgccagaggaattagtccaattgcataggttgaagtttctcaacttgagctacaatgaatttagtggaaatgtttcagaatggattggaggattatctacactcagatatttaaaccttggaaataatgactttggtggtttttttccaaaatctatttccaatcttacaatgctagagatcatggattggggcaacaatttcattcaaggaaccattccacctgaagtaggcaaaatgacccaattgagggttttatcaatgtattcaaaccgtctttcagggaccattcctagaactgtttctaacctctcttccctcgaaggaataagtttatcctataactctctttcaggaggcattccaagtgagattggtgaacttccacaattagaaataatgtatcttggagataatccacttggtggctccataccatcaacaatcttcaataactcaatgctgcaagatattgaacttggctccagcaatttatctggaagtcttccatcaaatttgtgccaaggacttccaaatatccgaatactttacttaggtttcaaccagttatcgggtaaattgccatatatgtggaatgagtgcaaagtgttgacagatgtggaattatcacagaacaggttcggcagaggaagcatacctgctgacattggaaacttacctgtgctaaactccatttatcttgatgagaacaacttggaagcctgcaaaaaaacaagttaaacggtagcctaacagaagagatgtttaatcagcttccattcctacaaatattgtctttggataataatcaatttaagggaagcattccaagatctattggcaattgtacattgcttgaagaattatacttgggtgataactgcttcacaggctctatacccaaggagattggtgatcttcctatgcttgcgaatttaactttgggaagtaaccatttaaatggatctattccctcaaatatctttaacatgtcatcattaacttacttgtctttggaacataattctctctcaggatttcttccattacacattggcctagaaaacttacaagaactatacttgcttgaaaacaaactttgtggaaatattccaagtagcttatccaatgcttctaagcttaactatgtggatttgaagtttaataagttcgatggagtcataccttgttcacttgggaatttgagataccttcagtgtttggatgtggcattcaataatttaactactgatgcttccactattgaattaagcttccttagttctttgaattatcttcaaatatcagggaatccaatgcatggaagccttcccatatcaattggaaacatgtcgaatttggaacagttcatggcagatgagtgcaaaattgatggcaaaattccatcggaaattggaaatttaagcaacttgttcgcactaagtttgtaccacaatgatttgagcggaacaattccaactacaataagtaatttgcagtctcttcaatatctgagacttggaaacaaccaactacaaggaaccatcattgatgaactttgtgcaatcaaccggctgagtgagttggtcataactgaaaataagcaaatttcaggaatgatcccaacatgctttggtaatcttacttctctaagaaagctctacttgaactcaaatagactgaataaagtttcctcttctctttggagtctcagagacattttggaactaaacttatctgacaatgctttaactggatttcttcctcttgatgttgggaatttaaaggctgttatatttttggatctatcaaagaatcagatttcaggaagcattccacgggccatgacaggattgcaaaatttgcaaattctcaacttagcacataataaattggaggggagcattcctgattcatttggtagtttgataagtttgacatacttggacttatcccaaaactatttggttgacatgattccaaaatccttggagtcaattcgtgatctcaaatttatcaatctttcttataacatgttagaaggtgagattcccaacggtggagctttcaaaaatttcacagctcaatctttcatattcaataaagcactttgtggaaatgcacggttacaagtccccccatgcagtgaattaatgaagagaaaaaggtcaaatgcacatatgtttttcatcaaatgcatattgcctgtaatgttgtcaaccattttggttgttttatgtgtgttccttctgaaaaagagtcgaagaaaaaagcatggtggtggtgatcctgctgaagtcagttcatcaactgtattagcaacaagaacaatttcctacaatgaactttcacgggcaaccaatggatttgatgagagtaatttgcttggtaagggtagttttggctctgtgttcaaaggtatacttccaaataggatggttgttgcagtcaaattatttaatttggaccttgaattgggatcaaggagctttagtgtagaatgtgaagtaatgcggaatctgcgacaccgaaatctcatcaagatcatttgtagttgctcaaattctgattacaagcttttagtaatggaattcatgtccaatggcaaccttgaaagatggttgtattctcataactattatttagacttcttgcaaaggctaaatataatgatagatgtggcttctgcattggaatatatgcatcatggtgcttcgccaactgtggttcattgtgatgtaaagcctagtaatgtcttattggatgaagatatggttgcacatgttagtgacttaggcattgccaaacttcttgatgaaggacaatcccaagagtataccaagaccatggctacatttggctacattgcaccagagtttggatccaaggggactatttctacaaaaggagatgtgtacagttttgggattttgttgatggaaacattctcaagaaagaagccaacagatgaaatgtttgttgaaggattgagcataaaaggttggattagtgaatcattaccccatgccaatactcaagttgtggattccaatttgttagaggatgaagaacacagtgctgatgacataatatcatctatatcatctatttatagaatagccctgaattgttgtgcagatttgcctgaagaaagaatgaatatgacggatgttgctgcatcactaaacaaaatcaaggtcatgtttcagaaaaataacaagtacatgcgagcacaagtccatgcaacctaagtttatatagacatcaaatcaatttataatttggcattaaaataatgtactttttgaattgctaagaaaatcctacttgacattatgaatgcactataacgatgctttgtgaagacctggttaatacatcctgttggattgtttgcagggatccttcttatgttgagccttgtataggagtatgtgttttgggtttgtttttatagattacaaagcatatatgttgggtcctctacaacatcttttttatgacaaaaaaaaaaaaaaaaaaaaaaaaaccaaaaaaaaaaaaaaaaaaaaaaaaaaaaaaaaaaaaaaaaaaaaaaaaaaaaaaaaaaaaaaaaaaaacaaaaaaaaaaaaaaaaaaaaaaaaaaaaaaaaaaaaaacaaaccaaaaacaaaaaagggccccccccccccaaaaaccccccccccccaaaaaaaaaatccccccccaccccccagagccccccactattctctaaaaggggcaaataaaaaactgccaaaaaaccggaaaaaaaaatctcacttgcgaaaaggttataggccccaaatcacccaacaaaaacagccccgcaaaaaaaataaaaaaacccgccgcgccccatagggagccactccacaaataaattcggcccggcctccctgccgcctcttccaaagagagaaaacaccacctcccccctcctttataaacaacaccaccacccccgggcaa

SEQ ID NO: 1870 - DNA, 743 bp, Glycine max
  misc_feature (689)..(689): n is a, c, g, or t
  misc_feature (692)..(692): n is a, c, g, or t
  misc_feature (725)..(725): n is a, c, g, or t
  misc_feature (743)..(743): n is a, c, g, or t
  Peptide Sequence Number=SeqID_9455
  Probeset Number=SeqID_11649
tcagctacgtaggccccccccccccaaccaaattatcctgcaggtcacatgttcaagaaactattaaacaacgtcaacaacctaaaagacggcaaagctgctaccaccaataaatctgacagcgacaaaacccctcctgccaaccctaagaaaaaccaagcccaacaatctgatccttttgcggaaatccctgagagaccatttgaagtggattttgagcagatctgggaatatgaattcgaagaacttcaagagcttgttcatcaatatgaaaaatactcctcttctatccgaaataaatacaacgatatggtaggagagttcagaatgacaaaagaaaagctcatgcttgtcgaagaagaaagaaaacgtttattaatcgaaaatgagcaatataagactcaaaatgaaaatctcaaaacatatatcaaccaaaccacctctcaaactcaaaacactcaagaatctcccaaatcaaagtcagatagtcctaaacccaaacaacaaaacctccaaaaaatcccttctaataatgactttgatcaaattgctgatgatgaattagtttcttctttaaaatcaagagtcgccaaactccttgatgaattaaccagcgccgaagaacctatctgcgttaacgtcattggtctgatggctaatttccaacaaagcaaccaaagtaacactgnttncaaagaagacagtcaacaagttatgaatactgnagactatgctaatgaagn

SEQ ID NO: 1871 - DNA, 1197 bp, Glycine max
  misc_feature (1166)..(1167): n is a, c, g, or t
  misc_feature (1171)..(1197): n is a, c, g, or t
  Probeset Number=SeqID_11650
gtaaaaaaggagaggtttaacacaaatttgggggaattttaaaaaaattttagggttaaatttaccttcacacttcagggtggccaattttggaaaggaattcggtcggggccttttctttttacccacaccgggaaaaagggggttttttccaaaggcgtttaattgggtaacccccgggtttcccccattccgggcgttttaaaaggggcggcccgggaagcgggcttaatagacttcaatttaagggggaattgggtaccgggcccccccccttggggttgggcggtatcgataagcttttttttttttttttaggatattcttttttttttttttttaataataattatattatattaaaattttccccggagggacatcagaataggcgactttgagaaacggctacgctaggttacaatacgtaaaacagctaaaatcatcaacaacaactacagatctataacagatctaagcagagaggtgttgggcggtgggaaagaagaccaggagctaaacgcatcctcctccggttggatcctggtggtttcaaatctgatgaccagagagtctcagcgccggggagtccaaggccagccccggatccaccaccagtcaccgtcagcaaaaccacccacagaggtgtcccgcggccaccactcgtcaacttcaatgaagagccaactccaaaccctaaccgccgtatgtcgtaccagatccgccgtatcgcaagtccgagacaaagcgaactcctccactttctaggcggagataagaagattctgaaccggagagaagctagcctcgagaaccgccatcccaagaaacaagaacctccgacaccatacccttcctatcaaccggagacgagctaccagccccaatgactgacgatgtgatttccgacggctcctcgtcgtcctcaaacaaggagcacacgccgtactttcgaagagccaccagagcgacagagctctctaaggggtcgacgcgccaagaccctcccgattcgccgtggagaagagagaagaaccacaaagagcaccagatctggatgtattccgtctagttgagcagtatccgagagggggaggacgcctcgagcatcagcggagccgccgtacgtcgatttgcctccaccctactgtgaagcgggcgatatnnttcnnnnnnnnnnnnnnnnnnnnnnnnnnn

SEQ ID NO: 1872 - DNA, 1382 bp, Glycine max
  misc_feature (16)..(17): n is a, c, g, or t
  misc_feature (20)..(20): n is a, c, g, or t
  misc_feature (38)..(38): n is a, c, g, or t
  misc_feature (40)..(40): n is a, c, g, or t
  misc_feature (43)..(43): n is a, c, g, or t
  misc_feature (80)..(80): n is a, c, g, or t
  misc_feature (90)..(90): n is a, c, g, or t
  misc_feature (117)..(117): n is a, c, g, or t
  misc_feature (138)..(138): n is a, c, g, or t
  misc_feature (414)..(414): n is a, c, g, or t
  misc_feature (476)..(476): n is a, c, g, or t
  misc_feature (568)..(569): n is a, c, g, or t
  misc_feature (679)..(679): n is a, c, g, or t
  misc_feature (780)..(780): n is a, c, g, or t
  misc_feature (830)..(830): n is a, c, g, or t
  misc_feature (937)..(937): n is a, c, g, or t
  misc_feature (982)..(982): n is a, c, g, or t
  misc_feature (992)..(992): n is a, c, g, or t
  misc_feature (1248)..(1248): n is a, c, g, or t
  misc_feature (1335)..(1335): n is a, c, g, or t
  misc_feature (1363)..(1363): n is a, c, g, or t
  misc_feature (1382)..(1382): n is a, c, g, or t
  Peptide Sequence Number=SeqID_9456
  Probeset Number=SeqID_11651
gtgtggtgtggccccnntcnctcttcctcctcttctgngncgntgttggtgggtttggttcgggttcggcgcgcccgggngaggcgcgcntagggcatagtaggttgacggatggcntcccctccctctccagcaaanagaatgagatagtaaatagaaaaatatactattctattatcttttttcattttgtatgtgagcgggataatgaccaaagaagggtatcgttacacttgtgcatcgatgacagagacaccccaacaacatgaaacagacaccacgccgcatacacacaagtgaaagaacccagcgtgttctcactccaatgtattgaatgtagcgtgtagagaggtgctatacactgtgtgagtgctgagtgctaatatccaatacaaactctgtacacgagagatntgtactaataaagagaagaactaatatttatttaacgcacattgaagatatagaaagagacnggaagctgcggtgaagaggcaacagcgaacaaaccagcatcctcaacaccaggccatcccggcgcaacgacggccgcgcacgaaaagaaganngtgtgcgctggtattcgccaacgcatccttttaattcgtaatcaagggctcttctcgcctaactgtaagtaactatcacagttgtgcgtccctcacacagaatattgaantacacaagatatacaacactaatagaatatagtgtgtgggtgttgttgaatgataggaaggagagttatgtgtgaaaaacaacaaataccacataatacancaacagagagtgcaccctcacggtcggtatatcctcagcggtgatgatgncgtgatattcgtccccctcccactctcagggagtatcaatatgtgatggaagcgcgcgagcacagccccaccacgtcgcattacacctctatagcgtatagcgagcncaccactttgcacgaacgaccgcagaacgaaagtagagatcgtancaacaacganagcgtaaatagatatagagacacacgctccctgcgactctctataatgcatcatacacataaagaagccttgtattcactctattccttctctatcgtactcgcgcgcgccccaccgtgtgtacgagagatataaacagcccccatctcacgatgatgcggctgtgtgagtattcattcacacgcgcgctagaccacatgcatacatcatattacaccgagacgggggacatctccgcataccgccatctccaccncatatttcacaccatacagggcatgtactgactgcctctccttatcgcacaccatcactcaattataattgaacgttatatgtctantcacctatgagtaaatcttatatcaaantcatataagactgtacgtn

SEQ ID NO: 1873 - DNA, 2134 bp, Glycine max
  misc_feature (1)..(12): n is a, c, g, or t
  Peptide Sequence Number=SeqID_9457
  Probeset Number=SeqID_11652
nnnnnnnnnnnntatatatactatgatgagagtgcggtttcctttgttggtgttgctgggaactgttttcctggcatcagtttgtgtctcattaaaggtgagagaggatgagaataaccctttctactttagaagctctaacagcttccaaactctctttgagaaccaaaacggtcgcattcgtctcctccagagattcaacaaacgctccccacaacttgagaaccttcgagactaccggattgtccagtttcagtcaaaacccaacacaatccttctcccccaccatgctgacgccgatttcctcctctttgtccttagcgggagagccatacttaccttggtgaacaacgacgacagagactcctacaaccttcaccctggcgatgcccagagaatcccagctggaaccacttactatttggttaaccctcacgaccaccagaatctcaaaataatcaaacttgccatacccgtcaacaaacctggcagatatgatgatttcttcttatctagcactcaagcccaacagtcctacttgcaaggcttcagccataatattctagagacctccttccatagcgaattcgaggagataaacagggttttgtttggagaggaagaggagcagaggcagcaagagggagtgatcgtggaactctcaaaggaacaaattcggcaactgagcagacgtgccaaatctagttcaaggaaaaccatttcctccgaagatgaaccattcaacttgagaagccgcaaccccatctattccaacaactttggaaagttctttgagatcacccctgagaaaaacccacagcttcgggacttggatatcttcctcagttctgtggatatcaacgaaggagctcttcttctaccacacttcaattcaaaggccatagtgatactagtgattaatgaaggagatgcaaacattgaacttgttggcattaaagaacaacaacagaagcagaaacaggaagaggaacctttggaagtgcaaaggtacagagctgaattgtctgaagacgatgtatttgtaattccagcagcttatccatttgtcgtcaacgctacctcaaacctcaatttccttgcttttggtatcaatgctgagaacaaccagaggaacttccttgcaggcgagaaagacaatgtggtaaggcagatagaaagacaagtgcaggagcttgcgttccctgggtctgcacaagatgttgagaggctattaaagaagcagagggaatcctactttgttgatgctcagcctcagcagaaggaggaggggagtaagggaagaaagggtccttttccttcaatcttaggtgctctctactgaataactacgtaaatgtatgctgtaagagctcatcgtgagcgtggaatgtatctgcccatgtaactataaaaacttgagctctacctatcttctatctactacgaataaataaatccagcatacgatgcttgtgttttgtaaaaaaaaaaaaaaaaaaaaaaaaaaaaaagggcggaacgacaactaatgagctaaaaaaacccggaaattaatatccagaccggaacctgaaagacgggccggccccccctatagtgagcctcgattaccaccttaattatattcatgaccgataccctgttaggctgcaccaaaatttgctctatcggtaacaattttcacacacttatggcgaacccagagagcattaaagtgtataacctgctgggaaagccgtaatgaggtgtaactaatctcacatcaaatatgacgattgccgcaaacatgaacagggttaaacacccggggaaaccctattggagcgcagctaccctcacattaatttggccttacggcccaactgaccaggctttccagtcggataaaacctccaggggcccactttgtctttattaacatctgcaaacccggccacgaggaagaggcgtgcctttgcatattctgtgcccccaagaggaggagttttcattttattcaccatctaagacacggtttaaacaccctgaattgtccccttataacccagttttggacccgtgggtataatctggccaggcaatgctgagccccacacctcttggttttttgcgccaccaagagagaggcataaaa

SEQ ID NO: 1874 - DNA, 1852 bp, Glycine max
  misc_feature (14)..(15): n is a, c, g, or t
  misc_feature (18)..(19): n is a, c, g, or t
  misc_feature (21)..(24): n is a, c, g, or t
  misc_feature (28)..(30): n is a, c, g, or t
  misc_feature (32)..(34): n is a, c, g, or t
  misc_feature (37)..(40): n is a, c, g, or t
  misc_feature (54)..(54): n is a, c, g, or t
  misc_feature (61)..(61): n is a, c, g, or t
  misc_feature (87)..(87): n is a, c, g, or t
  misc_feature (107)..(107): n is a, c, g, or t
  misc_feature (153)..(153): n is a, c, g, or t
  misc_feature (170)..(170): n is a, c, g, or t
  misc_feature (436)..(436): n is a, c, g, or t
  misc_feature (804)..(804): n is a, c, g, or t
  misc_feature (897)..(897): n is a, c, g, or t
  misc_feature (918)..(918): n is a, c, g, or t
  misc_feature (1086)..(1086): n is a, c, g, or t
  misc_feature (1091)..(1091): n is a, c, g, or t
  misc_feature (1126)..(1126): n is a, c, g, or t
  misc_feature (1222)..(1222): n is a, c, g, or t
  misc_feature (1411)..(1411): n is a, c, g, or t
  misc_feature (1416)..(1416): n is a, c, g, or t
  misc_feature (1509)..(1509): n is a, c, g, or t
  misc_feature (1519)..(1519): n is a, c, g, or t
  misc_feature (1530)..(1530): n is a, c, g, or t
  misc_feature (1539)..(1539): n is a, c, g, or t
  misc_feature (1541)..(1541): n is a, c, g, or t
  misc_feature (1565)..(1565): n is a, c, g, or t
  misc_feature (1581)..(1581): n is a, c, g, or t
  misc_feature (1614)..(1614): n is a, c, g, or t
  misc_feature (1660)..(1660): n is a, c, g, or t
  misc_feature (1673)..(1673): n is a, c, g, or t
  misc_feature (1697)..(1697): n is a, c, g, or t
  misc_feature (1711)..(1711): n is a, c, g, or t
  misc_feature (1782)..(1782): n is a, c, g, or t
  misc_feature (1815)..(1815): n is a, c, g, or t
  Peptide Sequence Number=SeqID_9458
  Probeset Number=SeqID_11653
ccagcccggggggnnggnngnnnncggnnntnnnggnnnnccggtcgggcgtgncgcgtgntcgcgccgcgcgacgtcggcgttatnctacggattcgttatctacngagaagacccgcagacaaaggtctcttacaaaagatgtgttggtgntgtgagtgtggggttgnggttcatatatctaggtgatcggtgtaggttatgccatagtgtatagggtggtggttgagatgtctgggtggagtccgcatctaacataaactctctatatacctttgtatctacgtcgcactgtgcacttctatttattactcatacctgatttatctctaccaatttcactatctcattttctttattaacactgtatatatctatctattataatttcttttatctcatttatatatcctatctatatctactgacgccgcanatctattttattccgtaccgccactcccttccacgcaagaatacactcacggacccgacccagcgcccgccacacacgccacatcaccgccacacccgctcacgtgctgtctcactctacatacatcacagcatgtcccgagcagtgcgacgctctccacacgcctcctgcggctacgccgatcccggctgccactcttcgctcgccgcactatgcgtctgcgcgtcgaattaagattaacaactattagacgcaatcacacaacacacactacacacgctactctaatatataatacatctggctgagatacaacgagtcgtagtgatgtcatcgcggcgactcatatacgcgcagcatactacatnctccatccttcatagatgatactatatctatcatctatctcaccactcgctgagatgtgaggacggcgtattgccacgcaagatactcctgcntccgagctgtctggcgaagcngatgcgagtgatgtgatgtagtgagaatgagacaatacgaatgcagcaaacgcacatgatcatcaacagaatactatgatatcaacactcgacgtactacgtggcggcccgtctggatctagtcagatcgttcttacacggtacgatggcgtagttaaacgtgcacgntgagnctgatacagctcggtatacaactactcgactacgncacatcatcgccactctcctaccatcgatcatacacacctgtcgcacacgcacaccgaactgtagcgcacaattactcacacctgaatcgctgacntcacattcgtactcgcagcacaatatctgcacatatcttccctacgctctactgtcatcctctgataccgcacgaacgcgtcgactacatctcgacagacgccgtcatacacacacgacatgtatctagcgtttcacatcctactctacacacgcacaacgagattctacactgctcatcacaagaccncggcnggtacgtgaacaatactgtagccatcttatgagctctgctctgaaagtatcgagatggacagcactctcttctgtatctctccatacagtgcngtagcgtctnactgtacttanatgagaaancnactaaatataggtgaaacagtganctgaatagatgatatnatcatttgtatacgacatacgatcacgacacantccgcactcgctcacacatagtgctactgcgtagtctagcaagatncgaaaccatcccnacgtagcagactatgtagtctcantcgcatcaacggtnatcggttctgatttcattgacagctcggcgaagaggtctttatcgcgcgattacatcctctatcttaacantgatgacactattatagctcaaaatcatcacancataccatcatatctactcacactgttgacgttgaga

SEQ ID NO: 1875 - DNA, 401 bp, Glycine max
  misc_feature (19)..(20): n is a, c, g, or t
  misc_feature (27)..(27): n is a, c, g, or t
  misc_feature (35)..(35): n is a, c, g, or t
  misc_feature (43)..(43): n is a, c, g, or t
  misc_feature (50)..(50): n is a, c, g, or t
  misc_feature (97)..(97): n is a, c, g, or t
  Probeset Number=SeqID_11654
gggcgggctcttccggagnngggctgnatttttcntagcacancaatcangcatgtatcgtggcacttagtcgttgttagtgcgggtggatgctggnccctcgtttggtagacaaatttggtaccccgtcattccttcattgagttccacgtggttcccgcaatgcgactgctatttggtggcgttttttcaaaaacccgtgatgtcatatcgccatggcgccgccataaccgctttttaacaacactgattacctttgaatttacttttctgcttctttaaataaaatatagtaatactttaaaagattaataattgagcacaaagcataatgcaaaaactaaataaaccaacctgcttgaatacattggcaacaggatccaagcctttaggttttttcc

SEQ ID NO: 1876 - DNA, 1592 bp, Glycine max
  misc_feature (15)..(24): n is a, c, g, or t
  misc_feature (27)..(27): n is a, c, g, or t
  misc_feature (31)..(32): n is a, c, g, or t
  misc_feature (43)..(43): n is a, c, g, or t
  misc_feature (78)..(78): n is a, c, g, or t
  misc_feature (80)..(80): n is a, c, g, or t
  misc_feature (261)..(261): n is a, c, g, or t
  misc_feature (272)..(272): n is a, c, g, or t
  misc_feature (299)..(299): n is a, c, g, or t
  misc_feature (537)..(537): n is a, c, g, or t
  misc_feature (792)..(792): n is a, c, g, or t
  misc_feature (805)..(805): n is a, c, g, or t
  misc_feature (893)..(893): n is a, c, g, or t
  misc_feature (1006)..(1006): n is a, c, g, or t
  misc_feature (1065)..(1065): n is a, c, g, or t
  misc_feature (1073)..(1073): n is a, c, g, or t
  misc_feature (1078)..(1078): n is a, c, g, or t
  misc_feature (1112)..(1112): n is a, c, g, or t
  misc_feature (1114)..(1114): n is a, c, g, or t
  misc_feature (1230)..(1230): n is a, c, g, or t
  misc_feature (1264)..(1264): n is a, c, g, or t
  misc_feature (1335)..(1335): n is a, c, g, or t
  misc_feature (1384)..(1384): n is a, c, g, or t
  misc_feature (1408)..(1408): n is a, c, g, or t
  misc_feature (1492)..(1492): n is a, c, g, or t
  misc_feature (1494)..(1494): n is a, c, g, or t
  misc_feature (1568)..(1568): n is a, c, g, or t
  misc_feature (1589)..(1589): n is a, c, g, or t
  misc_feature (1592)..(1592): n is a, c, g, or t
  Peptide Sequence Number=SeqID_9459
  Probeset Number=SeqID_11655
ggtgtgtgtggcccnnnnnnnnnntcntctnnttattattcanaaacaaaccaccccaccacacccaactaatcacgntntttttcttcttttattttatttatatgttgtccccctctcctttctgaggctcctcaccgttgggtacggagaagagagtattttaatattaggaatgtattgccaggcagcaagagagaagactgtaaatatatctccgctcacacagtagctctaacgaccacgccctagctcgtggcncggcgccaggngcggcgccgcttgcagaccgccacgantaccatcgcgtttcacgtcgtgtcacacctaaacgagcgattcgtcgcttgtgattatgacatagttagatataagtgtgtgatgtagagaactgataatagtaccgacacaaacaactctaagcacaaaactctatcatataaggaaattatcatagtcatagagaagatagaatagaaatgtgagaataagagaggtgtaagtgatgtagatacagcgatcagatacagcgcgtgnatgttgatggaatgatgtcgtgcacggacgtggctctcttgcgtgaacgataacgcgaaacgcgacacgcgcccatctgccgtcccatgtctgtgtgttcaacaacggacgaagatgtgaatcgccatctccaccgatgatatctcgcatagttatttgtacttgctctcatactgccagcatcgactatcacagggcatagctactctgagtgagtagtacagagaagctgcggcagccgacgcggtgacgtangcagatcacttanataataatcatctcgtacgctggcgactacgtagcagtgtcgctgcctcagtcatctgctctactcgtgagaattgttagatgacggntgtcattgtggcacaagtcgcatataggcacgctcgcgtgctgtctacactagttactatgtttccgctacctccgcgacagcactgtgcgcatgtgtgtgatcatgtcggtngtgacaggtcaccgacgatgcgcggcgatggacgagtggatgcgacccgtggtaggagntagattanatggngcggcacgcatctgagcgggcgtgcacgttattngngacactcacatgattcgcgacatgctctctcctacacctagtgtagcacatgacactgccgctatccacaggctcttatccgccgtgcatcgctgacgcggacacgccgcacgcgngcacgcggactgccgctgctctgcacccatatantcagtacgccatagtcatatatgccacactacgcacactcacgtgtccgcgctcgcacgacactctcctcnctcatgctcccacttgtactatatctattgagagtgacatgctataccncgatgtactcactcacacatcgancatctacatacgtagatcatcacctaactactacacatcacgtgatcgccagtacgtgactcatctctctacctctctcgtgcntnatcacatagggactctacgctactagtagccagtcctcgccatgcgcgtgctatagctcactcgcatctatctnctgctacagtcttgatcgcgntan

SEQ ID NO: 1877 - DNA, 379 bp, Glycine max
  Probeset Number=SeqID_11656
gatcatttgcgaaaagaaccgtatggagatctgcgaatacctatgccaatagggagtttgctttgcgaagaaggactttaatctggctaagcacccagagattgatgtgccgaatctgcaggcgataaatctgatgcagagcttataattcagagagtctgtgagggagacatttgcgtggatgctctattgctggttgctcagcgacgatggagtcgtgtttctcatgacatacctcaaccttacttccgaaattgtccttgctactctcaagatgcaggccatgccctggggaataccattcggtggtctacccggtgatcgcaccacgggcccacctggctatgacggagagaggatattcagtggggaccgcgat

SEQ ID NO: 1878 - DNA, 608 bp, Glycine max
  misc_feature (608)..(608): n is a, c, g, or t
  Peptide Sequence Number=SeqID_9460
  Probeset Number=SeqID_11657
tcagctacgtaggccccccccccgatacactccaaagaaaaaaatcgaaaagtgagggaagaatcattactaaaactgaattaaaccatataaatcccattcctgaagcaagagctgacttaaatcaagcttcttgtactaatgagatcaatcttcccattgagttgattaaaaatgaaactgtgagttcagatgtagaacatataccttttaatgcttatattttgttgagagttccttctattacaacctcaaattcattggaaagtctctatatacttactagcactggactgaaagaatggctaaaccctacctattttgattttttcgatccttgcaatcaacaatttttaagaatgacagttgccggaggaacatattcagtgactttacctccaaatcagcaactcatttatcctaataccttttgtgtagcaataagtgatgacagaaaaattccctatgatttagttctttatgaattaagtgcttctacatctaaaacctggatagcttcatctcgcttctcaggagtattgagtcctaactttgtagcaaatatccaactggatattactacttcatcaaccaaagacaaactagcn

SEQ ID NO: 1879 - DNA, 259 bp, Glycine max
  Probeset Number=SeqID_11658
atttatttattagtttaaactaattttcccctgtgcttttcgaattctcttgttaccatgtatgcaaagagaggcaatatagatagtgcacatgaagttttcaagaggtagaaggagagggacttggtttcttggacctcaatgatcactgaatatgcacaacatggccgggccaagaaagcattagtggtattcgaggggatgcagaaacaaaatttggagatgaatgctataacatttaccggtgtcatttctgcag

SEQ ID NO: 1880 - DNA, 1355 bp, Glycine max
  misc_feature (4)..(4): n is a, c, g, or t
  misc_feature (6)..(6): n is a, c, g, or t
  misc_feature (73)..(73): n is a, c, g, or t
  misc_feature (103)..(103): n is a, c, g, or t
  misc_feature (424)..(424): n is a, c, g, or t
  misc_feature (571)..(571): n is a, c, g, or t
  misc_feature (683)..(683): n is a, c, g, or t
  misc_feature (907)..(907): n is a, c, g, or t
  misc_feature (921)..(921): n is a, c, g, or t
  misc_feature (1119)..(1119): n is a, c, g, or t
  misc_feature (1150)..(1151): n is a, c, g, or t
  misc_feature (1221)..(1221): n is a, c, g, or t
  misc_feature (1223)..(1224): n is a, c, g, or t
  misc_feature (1227)..(1227): n is a, c, g, or t
  misc_feature (1253)..(1253): n is a, c, g, or t
  misc_feature (1258)..(1260): n is a, c, g, or t
  misc_feature (1277)..(1277): n is a, c, g, or t
  misc_feature (1285)..(1285): n is a, c, g, or t
  misc_feature (1338)..(1339): n is a, c, g, or t
  misc_feature (1341)..(1341): n is a, c, g, or t
  Peptide Sequence Number=SeqID_9461
  Probeset Number=SeqID_11659
catncncacaccatcatatatggacagagtggctactaactcgatcatcatatagtatgttaagatcgaagtngatcatacatgataatgagcgccgctagtngtgtgtgtgtgttgtgtcgtcactgcgtgagtatttgtgtggacgccgtcgagcagtgatcgtatttgcatgatggattatatacactcgctagagttatatagcagagagtgtcccacgcaccagtgttcacatactatgcgaggagtgtgtgtgtgagactaaacgagccaaaccatcgactcgcgccgcgcagcgacagtcatatcagagtactagcgctgtggccgcgtccgactattgataatataatctgtgtggtgtgtggtgttcttcacgttactctctccaactacacaaccattgtatatatacacatcnaatcaaccacacacatcgccgaattacaccagatctggtgtgacgcgaggctctactaaagcgcgattagtaataagaagtgcgggcggaggtggatccgtgacgcgtccctcctctgtaggtagctccacgtcactaattccatcnattactagacaggagggaagatagaatcacacacgcgactacataatagcaaggtaaggtgcacacacagccacgaggggcacaaccaagtataactatcgtgatatactantataactcctctttattatttataagtgtgtggttatcactgttgacaacactgccccgtccgtgtaagacggtgtaggaaaagataatctatataagtagatgatgatggcagacaatatatgaagaataaaaacacacaacaaccataacagcgacgcgtccatcagtcgcggcaccgactacatacgcatcaaggtccatcaccacgcacgacaccaatcnacccccagcatctntcctcggccacaccccacgccacgagctcaacaaactccatcaactccttttatttgaatccacactgtgtcaatttctcgtctgtctttcatcattgtgtgacgatccactcctccctcgtctgtttcttctcaccatacaccacgcaccgatccccgcagtagaaactcatacgacgcccgtgctcgtatgtgggngcgcaccgcgcctcacacctcacacaggtcnnctcgctcaccctaccgcaattactatagaagaagccggccgggtgacgcgagcacaccgcccgaacccananntcntattgtttagcctcatacgatgtaanttggnnnttggtcggcgccgcgtngcttgcgncgggctgcgccgcgcgctgctctcgcgggaataatccaccaccacccctcccnncncccccccccccccc

SEQ ID NO: 1881 - DNA, 508 bp, Glycine max
  misc_feature (17)..(17): n is a, c, g, or t
  misc_feature (40)..(40): n is a, c, g, or t
  misc_feature (44)..(44): n is a, c, g, or t
  misc_feature (62)..(63): n is a, c, g, or t
  misc_feature (75)..(75): n is a, c, g, or t
  misc_feature (88)..(90): n is a, c, g, or t
  misc_feature (95)..(95): n is a, c, g, or t
  misc_feature (106)..(106): n is a, c, g, or t
  misc_feature (128)..(128): n is a, c, g, or t
  misc_feature (131)..(131): n is a, c, g, or t
  misc_feature (133)..(133): n is a, c, g, or t
  misc_feature (148)..(148): n is a, c, g, or t
  misc_feature (151)..(151): n is a, c, g, or t
  misc_feature (156)..(156): n is a, c, g, or t
  misc_feature (228)..(228): n is a, c, g, or t
  misc_feature (259)..(259): n is a, c, g, or t
  Probeset Number=SeqID_11660
cgacccgcagaaagccncggggaacgaccccgagagcacngccncaggggaagcgggaccannccaccgcggaancgaggggaaccgnnnacccncggggggcganggcgaagaggaagcaggggccncancnccaaacagcacgggnccnagcgncaggggaaagcgcagcgagagggaaaccaagggagaagaaaacgacacagacagagcttgtttcagaggcancagcagcgacgaagaagacgctgaagccgcnagaaagaaacttagacgcgccaaagagcaggcaactggcctggaagagagcggcaaagaacacaacacactgaaccggaagcaaaagggggcactggcgaaacagcgggggctccgagcgagacaaggggaggtgtgggcgcagaacagaagggcaaggacgaagctggaagcaaaggagggcgactgcgagctattgaaaaggagatgcgagaacctgaccgaggaaaacaggaggtcgcagaaggaa

SEQ ID NO: 1882 - DNA, 1786 bp, Glycine max
  misc_feature (40)..(40): n is a, c, g, or t
  misc_feature (59)..(59): n is a, c, g, or t
  misc_feature (75)..(75): n is a, c, g, or t
  misc_feature (146)..(146): n is a, c, g, or t
  misc_feature (179)..(179): n is a, c, g, or t
  misc_feature (239)..(239): n is a, c, g, or t
  misc_feature (305)..(305): n is a, c, g, or t
  misc_feature (315)..(315): n is a, c, g, or t
  misc_feature (326)..(326): n is a, c, g, or t
  misc_feature (401)..(401): n is a, c, g, or t
  misc_feature (517)..(517): n is a, c, g, or t
  misc_feature (580)..(580): n is a, c, g, or t
  misc_feature (604)..(604): n is a, c, g, or t
  misc_feature (719)..(719): n is a, c, g, or t
  misc_feature (900)..(900): n is a, c, g, or t
  misc_feature (991)..(991): n is a, c, g, or t
  misc_feature (1246)..(1246): n is a, c, g, or t
  misc_feature (1272)..(1272): n is a, c, g, or t
  misc_feature (1289)..(1289): n is a, c, g, or t
  misc_feature (1305)..(1305): n is a, c, g, or t
  misc_feature (1337)..(1337): n is a, c, g, or t
  misc_feature (1431)..(1431): n is a, c, g, or t
  misc_feature (1538)..(1538): n is a, c, g, or t
  misc_feature (1622)..(1622): n is a, c, g, or t
  misc_feature (1700)..(1701): n is a, c, g, or t
  misc_feature (1734)..(1734): n is a, c, g, or t
  misc_feature (1771)..(1771): n is a, c, g, or t
  Peptide Sequence Number=SeqID_9462
  Probeset Number=SeqID_11661
tgtctctcttatctcgtcttgcacgcgcgtgtcatcagtngtacgcgcgacgtcagtcngctgctcgtcgacgancgtgcagactatctagactatcgactgtagcacgatcgattgcttaccgctgacacgtctagctgcatctntacagacgctgtcacatacatcgatcgtcgatntctcagcgagcgacacggtcagtaccgcctacgttgtccgtgtaatgacgtacagtcacngcatactcaatgatgcatatagtagcgagccgagcgcagcgctgtcggtacatgcacgtgcgtagnctcacagcgnggcggtgcccnggcactcgtgctatcagtatgcgtggtgacatgcgacggagcaggtgatggcacgatagtggacgtcgcttctgnacgctcggatcacgtgcgtgatacgacgtgttcgacctcgtcggcgatgcgcagtcgtcatcgtcagatcagacagatacatatagacatcttgtcccagcgcacaagattggacncacagcgatgcgacagctccgacgtcgcctaacacgcgcgcagacagatcagatcacatacancacaagagacagactgcagctganctgctgcatacgaagcgtcgttgatgatgtgacgttgtcagtagtgactcgcgcagcagcgcatctcgcacataacactaccgtcaatctcataaagtccgtcggtagagatgtncgacgtagcacaggcgactcgcgagtggtcgatgtcgagaagatggctccagccgggaatcatgtgtccgtgaagtcagtgaggtcatgcgatgggaggtggtgtagagatcatacacatgccgtcgtggctatagtagtgatacttgatgccacaccatgtgatcgcgtatcggcgcatngtgtcgtctatactagacgagtataccgcaactacgacgactcacacgcgcatgcgacacacgtgagcgcgcgcgagacaacgaaggcacnggggcagagtgcggatgatcagtaggcggagataagaggtgaggagtagggtgcgcgtccagtgtggcgagcaacaaggctctagcgctagagggcgcacgcttcgaccacacaagcagtcgggcggatcgagcctgatatctcagctgatgtcgcacgacgagactcgtcaggcgagctgtatggtgctgtgctcttcgtctctagcacgctgtacgccgtgtatttgatcgttgtatactagcgcatcagagnagagtgagtcagcctctattatacanatatagcacgatgagtntataattatacgacgngctcgtgacgtacagcggtaactcatggcggnagcgaccgccgcggaacggtcgctctcgtgatcgtcgtagagttctcgtggtatagtgtctcatatctcgtacagatctgtgtacatttcttcnacattgaataagagacccgtgctgtatatgactagtagacgactaaatagagcatgcatatatatagccgagacaagcgatcatagttgcggatgccgcgaggtggnaggctgctgcgttgaggatgctgttgtatgacagacgacataaggagaagcactctatagacaccgtactaatcatacagatgncgtggcgtgtccacggcgcacctatcgcgcactacactctcatcgttgtgctctcctctctctctctctctcttcttnnacgagattaaggagagccacccatgacacaccnacacactctacaacacgacgagcgccgagggacgacnagcgcgggggggcgg

SEQ ID NO: 1883 - DNA, 515 bp, Glycine max
  Probeset Number=SeqID_11662
aaaaagtttctactgactgctctctcgtttctataaaccctttgcgatcgacgaagcaagatcaaagaagaagatgttcaggaatcagtacgacacagatgtgacgacatggagcccaacaggtcgtctcttccaagtagaatacgccatggaagcagtgaagcaaggctccgccgcaattggactgagatctagctcccatgtcgtcctcgcatgcgtcaacaaagcccaatctgagctctcttctcaccagaagaagatcttcaaagtggatgaccacataggcgtcgcaatcgctggactcacagccgatggacgtgttctctcccgttatatgagatcggaatcaatcaatcactccttcacctatgagtctccacttcccgttggtcgtctcgtcgttcatctcgctgataaggcccaggtctgtacccaacgatcatggaaacggccctatggcgtgggtttgttggtaggtggattggatgagtctggagcccacctttactacaact

SEQ ID NO: 1884 - DNA, 2007 bp, Glycine max
  misc_feature (1)..(1): n is a, c, g, or t
  misc_feature (7)..(7): n is a, c, g, or t
  misc_feature (9)..(9): n is a, c, g, or t
  misc_feature (21)..(21): n is a, c, g, or t
  misc_feature (62)..(62): n is a, c, g, or t
  misc_feature (94)..(94): n is a, c, g, or t
  misc_feature (119)..(119): n is a, c, g, or t
  misc_feature (123)..(123): n is a, c, g, or t
  misc_feature (227)..(227): n is a, c, g, or t
  misc_feature (240)..(241): n is a, c, g, or t
  misc_feature (243)..(243): n is a, c, g, or t
  misc_feature (246)..(246): n is a, c, g, or t
  misc_feature (308)..(308): n is a, c, g, or t
  misc_feature (335)..(335): n is a, c, g, or t
  misc_feature (381)..(381): n is a, c, g, or t
  misc_feature (402)..(402): n is a, c, g, or t
  misc_feature (459)..(459): n is a, c, g, or t
  misc_feature (461)..(461): n is a, c, g, or t
  misc_feature (480)..(480): n is a, c, g, or t
  misc_feature (510)..(510): n is a, c, g, or t
  misc_feature (568)..(568): n is a, c, g, or t
  misc_feature (608)..(608): n is a, c, g, or t
  misc_feature (610)..(610): n is a, c, g, or t
  misc_feature (617)..(617): n is a, c, g, or t
  misc_feature (624)..(624): n is a, c, g, or t
  misc_feature (630)..(630): n is a, c, g, or t
  misc_feature (826)..(826): n is a, c, g, or t
  misc_feature (862)..(862): n is a, c, g, or t
  misc_feature (877)..(877): n is a, c, g, or t
  misc_feature (886)..(886): n is a, c, g, or t
  misc_feature (1076)..(1076): n is a, c, g, or t
  misc_feature (1266)..(1266): n is a, c, g, or t
  misc_feature (1278)..(1278): n is a, c, g, or t
  misc_feature (1290)..(1290): n is a, c, g, or t
  misc_feature (1340)..(1340): n is a, c, g, or t
  misc_feature (1417)..(1417): n is a, c, g, or t
  misc_feature (1432)..(1432): n is a, c, g, or t
  misc_feature (1518)..(1518): n is a, c, g, or t
  misc_feature (1679)..(1679): n is a, c, g, or t
  misc_feature (1930)..(1930): n is a, c, g, or t
  Peptide Sequence Number=SeqID_9463
  Probeset Number=SeqID_11663
ngatagngntcgtcgtcgatncgacgactatgtaggtgtgtgtttaatgatccgctctgagngacgatcagagtagtatagtcggtagctacangtaacattgcgatatactacgagcngcgncgtcgggcgcgcgtcgcgcggcagatatgcaactgatatcatatagtttagacacacggcgccgcgacgcagtatgcgtatatatatgcacgcatcgctcatcntttaatatatcgnngncgnctatatacacgcgcacgccagcgatacgagtaatacgtctgtagtgctagttaatcatacgnattagctagtcgtcgcgcacgcagacncgactcacgcctatatttttgtgattagcgagcctgagctaaccgngtgagcacaggcagacgctangcgctttcgtctgttgtaattcacatacgcactgtcgtgatagcttggtgatttcgntntgttcgtcgcgcgcgacgncgcagcggctagtcgcgcatgcactagtanttcgacatacgccgctgtacgtcaacgccgcgcacgatcgtcgagtcgctaatatatnttatgccagcgcgcgcgcgggattatatatatatattacnanagacatntacgcgncatgcnctccacgtcacagcacgtgacgtgcggtgtatcgtagagtgtacgctctgcacacactccaccacatctcgctcactgtggacgcgtagccgtatatgttactgtcgcagatatgaatagcacgcactctcgcacctatgttattctatgatactagaatcgagtataatacaagttcattaggtattgtgtacanatgaagtgtcgtgttggcgtaacagaagacacgcgntgtgctagcgcaacngcgagagcntccgcgcgtcgggtgttgttgtggtctatataacaatactgtcacgtgtcgagcattgtatacagcaaacttctcagtgcatatagatagtagaggaaacgagcgtcagaacacgcacacgcgcgtatgtgtggtgtgcttatatatagtatagacacacagctgatgctatgcagagaacgaccgcgcngtcgtctgtctccagtatataccgcgccgctctttttatatatacatcctcgcgccgcaccactcgtcatgtatgttatattcgcgcgtgtccgctgacgagtgtgttatcgtagatcggcgtcgcgcaaatatatatagaccgcagcgtgagaacacagaagataggataacgtacgcgcgtcgtcgtncagatcacaacntggatactggcntactcgcatgatgaatgagtgtatgtatatcttgatcatcgcgtcagccnagcacgttgcgtctcgcgccgtaggagacgagcttataaataaagcgtggaaggtggtatatgatgataagtatatnttatatagttcatgngatcgtcgcgctgtgtcgcatcacccaccgcgcgccgccgatgtgataatcacgtcgcggcgcgactagtgataacacgcagatancatcatcaaccgcgccggaaattatatacaatataataatatggcggcgttgataggccgaatatattatatagagaatgtataggcggatgtgtgaggacgcgcgcacgcgcgagtcttctcgtcgattatcagatctatcacgagcaggggcgatatanaatattggtgcgacgtatgacttcgatggcgtgcgaatcggtgcgtggtggtgtgtaagtagaaggttatgtgatcgtgtggatgtagccagctcgctcgcatacacacatgtatattattcacacactaatcactttgctgcgctcttcaccagcatacaatatataatcatcgttctgcgtatcatacgacagccaccgacacgctgtctcgcaccaacgcacagcgacaagagagagcgaacataggnaaaaacgcggcgcggacacaaattcgacgcggtcgctatatactgtatctggatcacatgagccctacccacacata

SEQ ID NO: 1885 - DNA, 280 bp, Glycine max
  Peptide Sequence Number=SeqID_9464
  Probeset Number=SeqID_11664
ttcctcccttggatctaccaaaggcggaaggggcgagcccaaagcctccatatccgtttcaagatcgcagaaagctggtctccaattccccgttggaagaatcgctcgattccttaaggctgggaaataccctgtacgtgttggtgctggtgctcctgtgtacctctctgcagtgctcgactatttttctgctcacgttttgtacttcgctcggaatgctcctatggatatcaaaaggaaacgtattgtttctttacacatttactttgctgtgaggaac

SEQ ID NO: 1886 - DNA, 617 bp, Glycine max
  misc_feature (417)..(417): n is a, c, g, or t
  misc_feature (462)..(462): n is a, c, g, or t
  Peptide Sequence Number=SeqID_9465
  Probeset Number=SeqID_11665
aaaaaggggggcttttttttcgagaagttcctttgttttggtttttggcccctccgccaaaattttttttttttttgggggggcgggcaacattttaaatttttttggccccccaaaggggggaattccaacaccccttttaaagggaaaaaattttgaaaaaaagggaaccaaattttttttgtttggtgtcccccgggagagggttacagaattcctttttaaaaattttggggggaaaagaatcccccctggggggtaaatttccccctaatggaaagtaaatttcggaaaccggggcggacaaacagtccaaattatgcaacatatttgtttttccaaggccaactcaaatcctgaccagaaaactgcccaatgagagaaaaaaaatgaaaatggccacttgacctttgtccnaatctctcaaagactgttcttgctatatttgtgtgtgtgattttncctgtttcttcttgtgagatctctcttggttctattttcttctaaaataacatagaaaacctcgtcgctgggtttatgggttattgttttgtgtgtgtttatttctatatttttaattagcgttcctttcgcattggcagagacagaaatacgat

SEQ ID NO: 1887 - DNA, 420 bp, Glycine max
  misc_feature (412)..(412): n is a, c, g, or t
  Probeset Number=SeqID_11666
gctctctagaaacacaaaagaaattgaaactgctttcggtggccggtgagcaattggccaccggtcgccacccccttcttttgtttttttgttatcttgtattatattataactacttttctcgatctatagatcgatagtatcatcgcaaggagattttccttttccgttagcggattatcttattcgcgttggcgatttttgttgtgtagatcttcatccccgtccccgtgcaagctttaatctctaaatcccggaacttctatttgatcttttgtagctaccgagtgctagatttcctccaagcagagagtaattatttcttcctttagttatagagtaggaagtttctctgacttggttgagaatcgaagatgttggatgtttccatagatatgagccagattaagtnaagtcggg

SEQ ID NO: 1888 - DNA, 214 bp, Glycine max
  misc_feature (167)..(171): n is a, c, g, or t
  Peptide Sequence Number=SeqID_9466
  Probeset Number=SeqID_11667
aaaatctcaagaagcatcataaatggcaacaaacttttgcagatactacttatcttttcctcagtcccctgttacacagggatatgattcaattccagctggcatccctgatccattagccaagaagcctgttgaatgggatgatagagatggtgcactaaggaagnnnnngaagattcccaatccagcatacaaaggaccatggaaacgcaag

SEQ ID NO: 1889 - DNA, 1706 bp, Glycine max
  misc_feature (15)..(15): n is a, c, g, or t
  misc_feature (18)..(18): n is a, c, g, or t
  misc_feature (22)..(22): n is a, c, g, or t
  misc_feature (26)..(26): n is a, c, g, or t
  misc_feature (30)..(34): n is a, c, g, or t
  misc_feature (44)..(45): n is a, c, g, or t
  misc_feature (54)..(54): n is a, c, g, or t
  misc_feature (321)..(321): n is a, c, g, or t
  misc_feature (777)..(777): n is a, c, g, or t
  misc_feature (1104)..(1104): n is a, c, g, or t
  misc_feature (1146)..(1146): n is a, c, g, or t
  misc_feature (1198)..(1198): n is a, c, g, or t
  misc_feature (1283)..(1283): n is a, c, g, or t
  misc_feature (1294)..(1294): n is a, c, g, or t
  misc_feature (1320)..(1320): n is a, c, g, or t
  misc_feature (1519)..(1519): n is a, c, g, or t
  misc_feature (1577)..(1577): n is a, c, g, or t
  misc_feature (1622)..(1622): n is a, c, g, or t
  misc_feature (1664)..(1664): n is a, c, g, or t
  misc_feature (1706)..(1706): n is a, c, g, or t
  Peptide Sequence Number=SeqID_9467
  Probeset Number=SeqID_11668
ttttttttttttttnttnttantttntttnnnnnttctttatanntatattaanatattagcgcctctcctactcttgtatttgtattccccgcgtgaggagccactcgcacagagtcgacttacaatgagatatgctatgcggtcattcgtcttacatactatagatacggtccgtgtcgtctcaccgcgaagaacgcgtatataaggtattagtgtgactattctattagaacagcgactatcttagatagcaataggacactacatgcagagtcctctcgagactacgagtacttatacatattacaatatcatattngttacgttcagcattttcacaagattgtacggcattatatttcgttatcacctaatactcatttttactatagcacccgatacacactataacacatacatgttagaggtggagagcgaagagaaggctaaggttagatacattgttgaagtgtgttcttgctcttctttgtgaggagttgtgaattgtaatatatctatgatgtgagtgagtatggcataacgcacagtatatctcgatgtcgagcggattgcgtcagtatgagtgtgtacatcatgatcttgaacaccctgacgtccgttattcgctcttcgtctctctccgcgttacgatctcgctgcagcgtctcgcgcatgttcacaactatagagatcatgcactgctcgcgcgagtcatcgccatttctcgcatactgccgcacgccttctcatcttggtaagcgcggcgccatagacnctacgcaatatgaaaaacccgcccacgcttcgcgttcatatataatttttatatgatatgcatataagtcccccattcttctcctcttaacgcgatgctgtcgcgcactctaactcctttcctatctccccacttctctctatcttcgtctcatcgtattgctccttgcgctctctatcgcgcaaccacatcgatcatctctcttttcatcagcttcgtgcgcggcaatgtcgtgtcatataccttttgttatgtcagccatcctctcttcatcctctgtctctcttctcacattctcctcacaccgcctcctgctcattccatcanccctcatacgacctgtccgatgcctggagcttgctctccttntcaactactactatgatttctgcatcttgtgatatcagctgaatctcgaccnacgtcagcaatataccatactctactctcaatcacacagctcactcatcctcaataacctcctctctatagacatggctaccagnacactaccacnccaccacccgcactaccaccaatccncgatctctaccatgactcatactctctgctgattactcttctctatatctctcctctatatatctgccatctctcgcatctactctagatactaagcatcgttcgtgactagtgaccacgagctgctacagctgtgcacatcctaccgttcatcgtatatgcgcagcgtgtcctccactcgcactcatcgcttatactntctctacttctcgctgtcaccttttgtacgtccctgatgctctatgtaagtcatctanctcgctccgtaggtgaaagtagacctatctgttcccgccgtccantctctctctcgtatatatgtcatcatactgctatctctaccnatcactgatataaagcgactcactgccatacaggtgttcctn

SEQ ID NO: 1890 - DNA, 1651 bp, Glycine max
  misc_feature (23)..(23): n is a, c, g, or t
  misc_feature (67)..(67): n is a, c, g, or t
  misc_feature (153)..(153): n is a, c, g, or t
  misc_feature (157)..(157): n is a, c, g, or t
  misc_feature (175)..(175): n is a, c, g, or t
  misc_feature (186)..(186): n is a, c, g, or t
  misc_feature (196)..(196): n is a, c, g, or t
  misc_feature (302)..(302): n is a, c, g, or t
  misc_feature (361)..(361): n is a, c, g, or t
  misc_feature (381)..(381): n is a, c, g, or t
  misc_feature (607)..(607): n is a, c, g, or t
  misc_feature (1004)..(1004): n is a, c, g, or t
  misc_feature (1150)..(1150): n is a, c, g, or t
  misc_feature (1154)..(1154): n is a, c, g, or t
  Probeset Number=SeqID_11669
cccgtcagagacacgcggcgcgncagagcgggcactgcgagcgcacgaaccagaatgcgcggcgacncgagtgcgcgagatgacagcgcacgagagtcgcgcgctggcactagcgatgatcgcgcgcaccggcacgtcgcggtgacacgtgcncacnagatcggcacacgggcgngccaagcgganggcgagacancgaagcacgcagaccggcggcatcgagaggcgacgggagagcagcagacgcacgcgatacgacgtcgcgcgagcaccgacagcacacacaggcagcgcacggacgnccccacacgcgcagcacgcgcacgctcgcgcagacaagcggcaaccacgtacatacgancctgcagagacgaggcagancgaggccacgcgaacacgcgagcacgaacgacaaccgcgccgccgaagtcacgcagcaagacgacgcggcgccccagcgacacacggaaggaagcggaggcaaggcgccgtacgcagcacccacatgtgcgcgcgccgagcagcgacgcggaccacgaacggcgcgaaccacagtacgcgtggcgcggcgggcgggcgacagacgaggccgaggaacgaagacganggcgcggccagcgcagcaacgcataagcaggcggcggagcgacggcacgcgaagaggaccctgccgcacgaaccggactagccggcccgcgacgcacgaagcacactagccgcagcgagcgacgagagaccaaagacacaggcgggacgccccgcgcgggcgcgacaggcagcggcagaggacggcaaccgagcagcacggagcgggaccacaccatcacgacggagcggacgcacggcgccccagagggcggcagcgcccaccgcaccgcgacgagcagcgtaggccgggccgagacgacggaggcggagcgacggagaacagcgaggacgcgcaccgccggcagcaccgcggacgagacgacagggacaagcagacaaccggcgagcgccagcgncacgcgcgcaccgcagcggcccacaacagcacgagcggcatcgcgcacgagcaacggtcacgcagccgacgagaccgcgacacgcagagcgcatgaagctcggccggaagacggcgcgcggggcaggaccccgcgccacatagcanagancgccggcgcacgcaagggagagcacaagtgcggacagggtagcggcgcgcgaccaaagaagacccacagcacagccacgcggcgccaggaccacgcaaacagaggcgcgaagcgcgcccgccaggcgcgcatacgctcggccgaccacacagcccagtcaagcacgacacaccaccgagacgcacgcgaccgagcgcgacccgccggacgacacacactcggacctacccgactccggaccgataggcagaagggcgcgcgcccacgacgcgcgagcacggaatgacaagagagcgccggagcacacacgcccgacgcgcgctagcacgcgaagggcagaaagatcatcagacgagcggcgctcagtcgcgggctgcgcgggtgcggccggcggaagggagccaggcgcgcgcacacaccccgccgcaccgcgcagccgaaccacagcgcaccggccaccaccaaacacaacaacacaccaccgaccgattaccaca

SEQ ID NO: 1891 - DNA, 507 bp, Glycine max
  Peptide Sequence Number=SeqID_9468
  Probeset Number=SeqID_11670
aatttaattatttttctgttcgtcttgttctcctcctctcggcgattctattcggtgatgatggcgttggctggaatcacgacttcgaatccaacgtttcttcagctcagggtctctaacacaagcttacgtcatgtggctccacgtaactcgatttcatttcctcgttcgtcatacgtgaatctcaatcggagaaaccgtctctgtgttcgatcctcctcctcctccgctccagtggcatctgcagtggagggattgaagccggcgatatccttgacggagagtgcgcttaagcatctgaataagatgagatcagagcgtggggaagatttgtgtttgagaattggtgtgaagcagggaggatgctcggggatgtcttacacgatggactttgagaacagagctaacgcaaggcctgatgattccaccattgaatatgaaggcttcgctatagtttgtgatccgaagagcatgctcttccttttcggaatgcagctagattacagc

SEQ ID NO: 1892 - DNA, 1451 bp, Glycine max
  misc_feature (955)..(955): n is a, c, g, or t
  misc_feature (959)..(959): n is a, c, g, or t
  misc_feature (1020)..(1020): n is a, c, g, or t
  misc_feature (1033)..(1033): n is a, c, g, or t
  misc_feature (1137)..(1137): n is a, c, g, or t
  misc_feature (1159)..(1159): n is a, c, g, or t
  misc_feature (1318)..(1318): n is a, c, g, or t
  misc_feature (1334)..(1334): n is a, c, g, or t
  misc_feature (1338)..(1338): n is a, c, g, or t
  misc_feature (1344)..(1344): n is a, c, g, or t
  misc_feature (1401)..(1401): n is a, c, g, or t
  misc_feature (1451)..(1451): n is a, c, g, or t
  Peptide Sequence Number=SeqID_9469
  Probeset Number=SeqID_11671
agtagtaggtgcagctagtaactctggacgctctcacacaccctccacgactacatacacgccactctatggtgcgagcgggtggtcctctccctctccaggtgcggtcgtggcatccactacagacgtcctttttcttctttgtgttgtttgaaggcagaaacacgacggagatagacatggtcattagagccacacaacgattgtactgtgtgatataagcctcacagtgcctttcgtgccccctgttctcagtatctacgctggtactcaaagcatactcgcggagtaaagcagatgtggctccatgccgcgctaattgctgtatccttgatagtcacagggctataagcccccgctgtgactactcttgtgtacctaggtactcgctgacaaagcagcggtgtaagctggccccactattcgctcttgtattacccaagtttggagcgaataggtcatattatacgttgttgcgtggtacgagaccttcactagctacctaactaccgcagcactgcacgagcagcgttgtgactagtgcgtcagatcgacaggtcggtgctgtaatgagttgtaggtgactctatgtgccgatatgcctcgccgatacaacgaaacttgcccgcgcgcggatctagtttgcgtagaagatacggccaacactcacccgccaggctagtcatttatggtgacacctcactctcactacggtgatgcatacgttgcgtcgacccctactgccgcttgcgtcactagttgttgtcacctgccgcttctctctcaagacgagtcgatctcgcgtcgtcggagcatatgtatatgaatatcactattacagcatcagtatattattcagaatatatctgtcgtctgtcacctacacaaagacagcgattcgacgccacgtcgtctcatgcctgtagatcattggtggctcacggatacgcgactntgtnacgtcgagtcagtgacaatagttcactgtggttagacgaggacggacgaatgagagtgttnactcgcgataagnccacaaggaccacactaacagagatgtatgatgtctcctggactttctcgcgccctatgtcccactcctactggagactatgtctacaaccagcggaggcactngcacccgatctagactaactgnactgcatgaacatgggtaagagtacgaaataacgtctgctcgtgtgcaccagaccagacgtggtagatgatatgagacattgccataatatcagcattagctggcgacattgctactacaacgcctacttacagagtctcgtcatgtgtaccagttcgnccgtgacttgtattgncacnctatcntgcagcgactcatgatcactctactcgtcgtgtgtctctcggatggcgatcatcacnagcgctggagttgtgtgttgtcacctacgcctgcgcgctagattgcacan

SEQ ID NO: 1893 - DNA, 575 bp, Glycine max
  misc_feature (81)..(81): n is a, c, g, or t
  Probeset Number=SeqID_11672
ctcgtattacacccttgattgtgccgccagatctgagccagctcactgttcacgttaggtacacgtgtaaagcgatggctnctggggcagagtcttccatcgagcgcgagagagagagacgctgtttgtacaggagtcgtgacgtttgtgcgctatagagccgaacggtaatatcgagagcgtgatcgactgactcgggaggaatgatcaagctactgatcagctgagctgtccgtctcatcgtgacgctttatcggcgtttcagttccctgcgcgagcccctgtccgaaggtccgcgacacgacgctgcttgaagacgggacccgctcagaagcggcgggcctggagcaggaacggagggcggcggcctgggtgtcgggttccgcatgggcgggaagcgcgacaggcacagccccttggtgctggggttgtggaggtcgagggcctcccgatagcttagagaacgctaggcctgttaggtttctttctttcgctttcgataggattttagttaagttctcgtgcgaatcctcagccgggatcctatttagagcgcgcccccgggactccacttt

SEQ ID NO: 1894 - DNA, 2118 bp, Glycine max
  misc_feature (12)..(12): n is a, c, g, or t
  misc_feature (19)..(19): n is a, c, g, or t
  misc_feature (24)..(29): n is a, c, g, or t
  misc_feature (31)..(32): n is a, c, g, or t
  misc_feature (34)..(34): n is a, c, g, or t
  misc_feature (36)..(36): n is a, c, g, or t
  misc_feature (41)..(43): n is a, c, g, or t
  misc_feature (47)..(47): n is a, c, g, or t
  misc_feature (61)..(62): n is a, c, g, or t
  misc_feature (65)..(65): n is a, c, g, or t
  misc_feature (68)..(68): n is a, c, g, or t
  misc_feature (71)..(71): n is a, c, g, or t
  misc_feature (80)..(80): n is a, c, g, or t
  misc_feature (82)..(82): n is a, c, g, or t
  misc_feature (84)..(85): n is a, c, g, or t
  misc_feature (87)..(87): n is a, c, g, or t
  misc_feature (97)..(104): n is a, c, g, or t
  misc_feature (106)..(107): n is a, c, g, or t
  misc_feature (109)..(110): n is a, c, g, or t
  misc_feature (118)..(118): n is a, c, g, or t
  misc_feature (121)..(121): n is a, c, g, or t
  misc_feature (123)..(123): n is a, c, g, or t
  misc_feature (138)..(139): n is a, c, g, or t
  misc_feature (144)..(144): n is a, c, g, or t
  misc_feature (147)..(147): n is a, c, g, or t
  misc_feature (149)..(151): n is a, c, g, or t
  misc_feature (155)..(156): n is a, c, g, or t
  misc_feature (158)..(159): n is a, c, g, or t
  misc_feature (167)..(168): n is a, c, g, or t
  misc_feature (173)..(173): n is a, c, g, or t
  misc_feature (181)..(181): n is a, c, g, or t
  misc_feature (201)..(201): n is a, c, g, or t
  misc_feature (207)..(207): n is a, c, g, or t
  misc_feature (239)..(240): n is a, c, g, or t
  misc_feature (255)..(255): n is a, c, g, or t
  misc_feature (269)..(269): n is a, c, g, or t
  misc_feature (272)..(272): n is a, c, g, or t
  misc_feature (274)..(275): n is a, c, g, or t
  misc_feature (279)..(281): n is a, c, g, or t
  misc_feature (310)..(311): n is a, c, g, or t
  misc_feature (320)..(320): n is a, c, g, or t
  misc_feature (324)..(324): n is a, c, g, or t
  misc_feature (348)..(348): n is a, c, g, or t
  misc_feature (355)..(355): n is a, c, g, or t
  misc_feature (360)..(360): n is a, c, g, or t
  misc_feature (372)..(372): n is a, c, g, or t
  misc_feature (375)..(375): n is a, c, g, or t
  misc_feature (379)..(379): n is a, c, g, or t
  misc_feature (384)..(384): n is a, c, g, or t
  misc_feature (387)..(387): n is a, c, g, or t
  misc_feature (392)..(392): n is a, c, g, or t
  misc_feature (402)..(402): n is a, c, g, or t
  misc_feature (410)..(410): n is a, c, g, or t
  misc_feature (414)..(414): n is a, c, g, or t
  misc_feature (424)..(424): n is a, c, g, or t
  misc_feature (442)..(442): n is a, c, g, or t
  misc_feature (463)..(463): n is a, c, g, or t
  misc_feature (506)..(506): n is a, c, g, or t
  misc_feature (552)..(552): n is a, c, g, or t
  misc_feature (572)..(572): n is a, c, g, or t
  misc_feature (609)..(609): n is a, c, g, or t
  misc_feature (621)..(621): n is a, c, g, or t
  misc_feature (660)..(660): n is a, c, g, or t
  misc_feature (664)..(664): n is a, c, g, or t
  misc_feature (680)..(680): n is a, c, g, or t
  misc_feature (685)..(685): n is a, c, g, or t
  misc_feature (690)..(690): n is a, c, g, or t
  misc_feature (693)..(693): n is a, c, g, or t
  misc_feature (721)..(722): n is a, c, g, or t
  misc_feature (773)..(773): n is a, c, g, or t
  misc_feature (784)..(784): n is a, c, g, or t
  misc_feature (841)..(841): n is a, c, g, or t
  misc_feature (848)..(848): n is a, c, g, or t
  misc_feature (870)..(870): n is a, c, g, or t
  misc_feature (886)..(886): n is a, c, g, or t
  misc_feature (915)..(915): n is a, c, g, or t
  misc_feature (917)..(917): n is a, c, g, or t
  misc_feature (947)..(947): n is a, c, g, or t
  misc_feature (1064)..(1064): n is a, c, g, or t
  misc_feature (1066)..(1066): n is a, c, g, or t
  misc_feature (1084)..(1085): n is a, c, g, or t
  misc_feature (1087)..(1090): n is a, c, g, or t
  misc_feature (1106)..(1106): n is a, c, g, or t
  misc_feature (1110)..(1110): n is a, c, g, or t
  misc_feature (1117)..(1117): n is a, c, g, or t
  misc_feature (1121)..(1121): n is a, c, g, or t
  misc_feature (1123)..(1123): n is a, c, g, or t
  misc_feature (1132)..(1132): n is a, c, g, or t
  misc_feature (1149)..(1149): n is a, c, g, or t
  misc_feature (1153)..(1153): n is a, c, g, or t
  misc_feature (1158)..(1158): n is a, c, g, or t
  misc_feature (1180)..(1180): n is a, c, g, or t
  misc_feature (1191)..(1191): n is a, c, g, or t
  misc_feature (1220)..(1221): n is a, c, g, or t
  misc_feature (1223)..(1223): n is a, c, g, or t
  misc_feature (1228)..(1228): n is a, c, g, or t
  misc_feature (1233)..(1233): n is a, c, g, or t
  misc_feature (1271)..(1272): n is a, c, g, or t
  misc_feature (1279)..(1280): n is a, c, g, or t
  misc_feature (1283)..(1283): n is a, c, g, or t
  misc_feature (1299)..(1299): n is a, c, g, or t
  misc_feature (1305)..(1305): n is a, c, g, or t
  misc_feature (1344)..(1346): n is a, c, g, or t
  misc_feature (1362)..(1362): n is a, c, g, or t
  misc_feature (1365)..(1365): n is a, c, g, or t
  misc_feature (1374)..(1374): n is a, c, g, or t
  misc_feature (1376)..(1376): n is a, c, g, or t
  misc_feature (1383)..(1383): n is a, c, g, or t
  misc_feature (1395)..(1395): n is a, c, g, or t
  misc_feature (1420)..(1420): n is a, c, g, or t
  misc_feature (1422)..(1422): n is a, c, g, or t
  misc_feature (1425)..(1425): n is a, c, g, or t
  misc_feature (1430)..(1430): n is a, c, g, or t
  misc_feature (1437)..(1437): n is a, c, g, or t
  misc_feature (1445)..(1445): n is a, c, g, or t
  misc_feature (1473)..(1473): n is a, c, g, or t
  misc_feature (1492)..(1492): n is a, c, g, or t
  misc_feature (1502)..(1502): n is a, c, g, or t
  misc_feature (1511)..(1511): n is a, c, g, or t
  misc_feature (1535)..(1535): n is a, c, g, or t
  misc_feature (1560)..(1560): n is a, c, g, or t
  misc_feature (1576)..(1576): n is a, c, g, or t
  misc_feature (1584)..(1584): n is a, c, g, or t
  misc_feature (1614)..(1614): n is a, c, g, or t
  misc_feature (1629)..(1630): n is a, c, g, or t
  misc_feature (1636)..(1636): n is a, c, g, or t
  misc_feature (1639)..(1639): n is a, c, g, or t
  misc_feature (1652)..(1652): n is a, c, g, or t
  misc_feature (1657)..(1657): n is a, c, g, or t
  misc_feature (1706)..(1706): n is a, c, g, or t
  misc_feature (1727)..(1727): n is a, c, g, or t
  misc_feature (1732)..(1732): n is a, c, g, or t
  misc_feature (1735)..(1735): n is a, c, g, or t
  misc_feature (1738)..(1738): n is a, c, g, or t
  misc_feature (1740)..(1740): n is a, c, g, or t
  misc_feature (1750)..(1750): n is a, c, g, or t
  misc_feature (1761)..(1761): n is a, c, g, or t
  misc_feature (1769)..(1769): n is a, c, g, or t
  misc_feature (1785)..(1785): n is a, c, g, or t
  misc_feature (1826)..(1826): n is a, c, g, or t
  misc_feature (1836)..(1836): n is a, c, g, or t
  misc_feature (1840)..(1841): n is a, c, g, or t
  misc_feature (1843)..(1843): n is a, c, g, or t
  misc_feature (1850)..(1850): n is a, c, g, or t
  misc_feature (1879)..(1879): n is a, c, g, or t
  misc_feature (1882)..(1882): n is a, c, g, or t
  misc_feature (1889)..(1889): n is a, c, g, or t
  misc_feature (1906)..(1907): n is a, c, g, or t
  misc_feature (1913)..(1913): n is a, c, g, or t
  misc_feature (1917)..(1918): n is a, c, g, or t
  misc_feature (1928)..(1928): n is a, c, g, or t
  misc_feature (1946)..(1946): n is a, c, g, or t
  misc_feature (1976)..(1976): n is a, c, g, or t
  misc_feature (1987)..(1987): n is a, c, g, or t
  misc_feature (2002)..(2002): n is a, c, g, or t
  misc_feature (2004)..(2004): n is a, c, g, or t
  misc_feature (2010)..(2010): n is a, c, g, or t
  misc_feature (2019)..(2019): n is a, c, g, or t
  misc_feature (2021)..(2021): n is a, c, g, or t
  misc_feature (2031)..(2031): n is a, c, g, or t
  misc_feature (2054)..(2054): n is a, c, g, or t
  misc_feature (2113)..(2113): n is a, c, g, or t
  misc_feature (2118)..(2118): n is a, c, g, or t
  Peptide Sequence Number=SeqID_9470
  Probeset Number=SeqID_11673
tgtgtgtgtttnttgggtngcctnnnnnncnncncntctcnnnagtnatagataattatannaanaanatnatatttaananannantaatttatannnnnnnntnntnngtggtggncgncngctgtgaaataaccnncaacncancnnnacannannacaacccnnacaancttatcgnaacggtgacccgcacgtgangcggangactaagtccacgtactcaccacccccccccnnccccacctaaccccncacactcaaatatntananngagnnnaatcagtttgttggatgagagaacacgcnnagaggcggngaanaaaatcttattagcacagactcanacatatncattncactcaacacanatncaanacagnctnacgcnctgaggctcnccatactntacnaagcgtaccnataatacatacttatgtnatatatattcgtctagtctancatatcaatattagtatataataatagatatatacacacatanctacgcacactacactaataagtccatagaagactacacggataantatatctattatgatgttantcaacgctgtctctactcataattacactatataganagtagtagtagnagaggggtgacgtagagtagacgtatgatgtgtactgtngatnatgtgtaggaggagancgcantcganatntgtatgtggtcgtgcgtagtgtagaagnnggatagtgagtagtcgttaggatggcgtatgaaggtagtgatagatgagancgtatagatantaactatactatactatgcatatgtcctcgtctgctcctatacactgtggctcgtgngtttgtngtgtgttgtgtgtgtgagttcntattagcagagataantacttgcatgaagatataacactcaatancnatatagcatgacagatgagataacatatanaatcaaacatatagatatagttactagtaaagtacaggatagacatatacacaactcacactatgatgatgatgaatattagtatagggatagttatgagttatatgtggtagtggnanaacaaccacacaagtaannannnnaaaacacacacccacncacncacccancacncnaccaccacnatctcacagcacagcangtgnctatnatgaatcatgctcgcgtatcancagagattgtngtatcgctgacactccgctcccactcccnncnctcancgcgnccacaacggcctcggcgtcacgcgacgcgcgcgctcgnnagcgcgnncgnaggacgcgcgacgcgntcgtgncgcgctgcgccgcgacgcgcgtcgcgcgcagacgcgcgnnncagcgacatgcagcancgncagcacgcnantgatcgntcgcagccgatncgtcatagatgagctgcagcgatcngncgnctagnacgtacntacgcatntgtagcactgggatcatactatgaactnagagtacaccgactggtgntcaggttgcncgtgcgacncgatagtagcacgatatgacgagncgagcgatatcagatgacgcatcancgtgcctggtagcacnagatacgntatgtgaacgctaagtgatctcgacgcgcngccgacacagcatgnntgcacnaantgtcgacgcgtantacantgtcgacgccagcatctacgttctacttgcacagtgtacgcatgctgtngtcgagatgatgtgatatatngcacncgnatngncatcggcagnatgcactactncatgatgnaagtagtgcgtagcgncatcagtccatcgtatatgacgatgagacacgttactgcgnctgcgtgccncacnncnaccaacncgacgaacgtatgtgacgttgcatgctcncgntagcccncagacgcccacggtctnncacacncacnngcgacagganagttaagatctggcagtncagtgtagtgcgtgtgtggtgagtgtgtgntcgtgtgcaangcgtgcgactgtgtngncaaagntgataagtngncgtgcactantacactagagtgatctgatgatnatctctgatgagtattaagtagtgttcttcacgatagcagctatagtctgacttttgcnatcgn

SEQ ID NO: 1895 - DNA, 261 bp, Glycine max
  Probeset Number=SeqID_11674
cattttattaagattctctcttctttttaagtttggaactatccaaatgtacgcgggccgaatgtatacgcgctcaaattggttacatctggtactaactagagcttggatgcgtgataatgagcaggttgtgtttgtgtattaccgataaaactatgaataagagtggctaataattaaattgcaaaaaaaaaaaaaaaaaaaaaaaaaaaaaaaaaaaaaaaaaattaaattaaaataaaaaataaataaaaaaataaa

SEQ ID NO: 1896 - DNA, 1420 bp, Glycine max
  misc_feature (19)..(19): n is a, c, g, or t
  misc_feature (43)..(43): n is a, c, g, or t
  misc_feature (76)..(76): n is a, c, g, or t
  misc_feature (103)..(103): n is a, c, g, or t
  misc_feature (106)..(106): n is a, c, g, or t
  misc_feature (162)..(164): n is a, c, g, or t
  misc_feature (171)..(171): n is a, c, g, or t
  misc_feature (173)..(173): n is a, c, g, or t
  misc_feature (175)..(176): n is a, c, g, or t
  misc_feature (178)..(181): n is a, c, g, or t
  misc_feature (186)..(186): n is a, c, g, or t
  misc_feature (190)..(193): n is a, c, g, or t
  misc_feature (196)..(197): n is a, c, g, or t
  misc_feature (199)..(199): n is a, c, g, or t
  misc_feature (202)..(202): n is a, c, g, or t
  misc_feature (210)..(210): n is a, c, g, or t
  misc_feature (245)..(245): n is a, c, g, or t
  misc_feature (264)..(264): n is a, c, g, or t
  misc_feature (269)..(269): n is a, c, g, or t
  misc_feature (271)..(271): n is a, c, g, or t
  misc_feature (281)..(288): n is a, c, g, or t
  misc_feature (291)..(291): n is a, c, g, or t
  misc_feature (298)..(298): n is a, c, g, or t
  misc_feature (300)..(300): n is a, c, g, or t
  misc_feature (309)..(309): n is a, c, g, or t
  misc_feature (316)..(316): n is a, c, g, or t
  misc_feature (343)..(343): n is a, c, g, or t
  misc_feature (361)..(361): n is a, c, g, or t
  misc_feature (426)..(426): n is a, c, g, or t
  misc_feature (432)..(432): n is a, c, g, or t
  misc_feature (436)..(436): n is a, c, g, or t
  misc_feature (463)..(463): n is a, c, g, or t
  misc_feature (467)..(467): n is a, c, g, or t
  misc_feature (478)..(478): n is a, c, g, or t
  misc_feature (483)..(483): n is a, c, g, or t
  misc_feature (489)..(489): n is a, c, g, or t
  misc_feature (514)..(514): n is a, c, g, or t
  misc_feature (526)..(526): n is a, c, g, or t
  misc_feature (536)..(536): n is a, c, g, or t
  misc_feature (577)..(577): n is a, c, g, or t
  misc_feature (603)..(603): n is a, c, g, or t
  misc_feature (660)..(660): n is a, c, g, or t
  misc_feature (678)..(678): n is a, c, g, or t
  misc_feature (718)..(718): n is a, c, g, or t
  misc_feature (764)..(764): n is a, c, g, or t
  misc_feature (776)..(776): n is a, c, g, or t
  misc_feature (778)..(778): n is a, c, g, or t
  misc_feature (868)..(868): n is a, c, g, or t
  Peptide Sequence Number=SeqID_9471
  Probeset Number=SeqID_11675
taagagcactcacgccatntatgcgtgtatcgtcagtgtaccnctagtctatggcctgtgccgctgtccgtgagangatttgtgagcatagatgtgctagcancgncgtgattctacgatctcacgcagccactatgaacatgtatggtaggtcatggtagnnnaaggcgngngnncnnnngggtngtgnnnnagnnantcnctcgcgcncaccatacctcacgctccacagttctatctgtacngagtcgcgtcaccggaccncttcncntgcatagagnnnnnnnnggnggcgacncncacacgggngcgcgcnagctctctcgcgcgtcgtctgctgtgnactccgctcccacgatgnctggcgcgagcgcacacgccccggcgttcagctatcaacgcaactaccctcgcactgaagagtgnatctcnctancccacccaccactgcggcacaaggacnatcnagcggtggcgngcggnccggtngcgcgcggcgtgcagcacgggagangcagcagacccncacagccgcntcgtgcgcgagcgagaacgggacgccgcacactaccgccgnctcgtgtcggacggtgaggcggtcgntgcctcagccgcctcgcggcgcctcgccgagtagtgtggctgacagcacgggcgcgngcacacgcacacactcantaaacgcgcgtggccacgtccggggcgtcggctcgcaacnagtggcggcgggcgcaacaacacactccccctcaccaccaaacganaagcagacccgncnccgcggcgggggcgggggtacgccagtgcgatagcacagaagcccacacggagcgaattatatctagtgtggcgcgggcggctgctcacncaggaggcggttagcacatactcgctcggctcgcgcgcggccactgaccggactcgtcggcttaatacacaagatacacgaggggcgcacgaggtattcttcgtccgcatctctaacgacttgcgcgtgctaggaacacgtcctccactcaataatgagctaggcgccgctggcgagtcgtggactaggaaacacagcgaagaattattaggccatgcagcgaaagaactatatgattgtaggctgcgggctgggtgatcgtctaaagaggaggaagggcgacagttggatgagtacaggatagatgatagttgtgaggcaggcagttggccgagactatgtatatatctctatatggtggagtcgggcggcctctagtattgtgaagatgaataatatattgaacgcctcatcctgcgcggtttggggggggggcggtattatgcctgttttcgtacgtgggggcgcgccctcgtcccctttgttagagaatgctgctgtctatcttggggaggagggtggggcagcgggcggcgggcggggcggtccaca

SEQ ID NO: 1897 - DNA, 427 bp, Glycine max
  misc_feature (22)..(23): n is a, c, g, or t
  Peptide Sequence Number=SeqID_9472
  Probeset Number=SeqID_11676
ccaagataatttccgccgttcnnatctcactctctctctctctctctctctctctctctctctctctctctctctctctctctctctctctctctctctctctctctctctctctctctctctctctctctctctctctcctcgtgccgaattcggcaccagcttaagcttgctactgagtttccacactgcataccttaggtcttccgaattcgaagttaatttgcaagatggctaaggaaaaggctcagatcaacattctcgtgccgaattcggcaccagatcgagaggacgatcaggatgcctggtgtttcttccatgcttcttttgtttctatttgtaatattaatatctcaagtcagtgccttaagcgtatcctgtgattacagctaggtcggaaattacacagcaaatagcacctataaca

SEQ ID NO: 1898 - DNA, 745 bp, Glycine max
  misc_feature (744)..(745): n is a, c, g, or t
  Probeset Number=SeqID_11677
ttgggtaccgggccccccctcgagtcgttacgtaggccccccccccccacaaactattgaacttcacttcttaaacctcaaggatctcaacaaagctcaaaatgcgattgaaaattttgttgaaagtgagccccttctatccagaggccttcagaaccataaaattgctttctataaaatatttgtgcaaccatatcttaaaaagctcgcacctgaagaaacccaaaatcttggttccgaagccagacctgaacagttagatctacagcctactgataaattacaaatagatttttctacaaactacggtgaggtggaaaaagactacaataaatatttatcatacaatatcttccatttcccaattggtgaagctggatatagatcattattagaagtacaaagagttcaatataagagaagacatttcaagaagatcattgctcacatcgcaagattcgactcagatatatccgttaaaaatttggaactcatagctactatctgtcacgaacaaaagatcgctttgagtcttatcgaaatcgctgaattattcatgaagaatggagttattaatagacttgagcaattcactgctgttattgaaaagctcagattctttagagatctcgctgatagtagtgaatatcttgctagatcattcgccagatataccaaggttccattcacaattgctctattgaaccctcacttggattcgcttatgaagtatggaaagaatgnn

SEQ ID NO: 1899 - DNA, 571 bp, Glycine max
  misc_feature (10)..(12): n is a, c, g, or t
  misc_feature (26)..(26): n is a, c, g, or t
  misc_feature (28)..(30): n is a, c, g, or t
  misc_feature (52)..(56): n is a, c, g, or t
  misc_feature (229)..(230): n is a, c, g, or t
  misc_feature (267)..(268): n is a, c, g, or t
  misc_feature (382)..(383): n is a, c, g, or t
  misc_feature (489)..(490): n is a, c, g, or t
  misc_feature (563)..(564): n is a, c, g, or t
  Peptide Sequence Number=SeqID_9473
  Probeset Number=SeqID_11678
aacgacaccnnnatactagcatctangnnngaaaactacaaagagcacgctnnnnntagacatgatgatgcggggagagcgcagagagctctacaactgtaaaagcaccgaccttcttaaacgggagaaaaaagacacgaaaccaatcctatcatagagaatactaacttaacattttttttatgagagacaaaacgcggaaactatggttccattacttatcttgcgnncatcgcgaagcgctctcggacactgctgctcaggctnnctagacgggaggcaatatttaaaggaggatactttactttagttatttactttatttcatggcttaagtatgtacttccggatttgctataaactattaaatataattgaagcnncatttataaaaggaggagccttcgtctcattacttggtttcaagtgagaaaaaatggacgagggttaacactcaatcctataagattaagtgcttggaaagccctnntgggatggaggataacattttattgatcaaggtctatcattagacacctctatacaaataaactctagatctnngtatttt

SEQ ID NO: 1900 - DNA, 1614 bp, Glycine max
  misc_feature (9)..(9): n is a, c, g, or t
  misc_feature (63)..(63): n is a, c, g, or t
  misc_feature (99)..(99): n is a, c, g, or t
  misc_feature (114)..(114): n is a, c, g, or t
  misc_feature (148)..(148): n is a, c, g, or t
  misc_feature (157)..(157): n is a, c, g, or t
  misc_feature (290)..(290): n is a, c, g, or t
  misc_feature (333)..(333): n is a, c, g, or t
  misc_feature (346)..(346): n is a, c, g, or t
  misc_feature (397)..(397): n is a, c, g, or t
  misc_feature (489)..(489): n is a, c, g, or t
  misc_feature (536)..(537): n is a, c, g, or t
  misc_feature (627)..(628): n is a, c, g, or t
  misc_feature (630)..(630): n is a, c, g, or t
  misc_feature (672)..(672): n is a, c, g, or t
  misc_feature (751)..(751): n is a, c, g, or t
  misc_feature (875)..(875): n is a, c, g, or t
  misc_feature (887)..(887): n is a, c, g, or t
  misc_feature (957)..(957): n is a, c, g, or t
  misc_feature (960)..(960): n is a, c, g, or t
  misc_feature (1112)..(1112): n is a, c, g, or t
  misc_feature (1388)..(1388): n is a, c, g, or t
  misc_feature (1579)..(1579): n is a, c, g, or t
  Probeset Number=SeqID_11679
aacacgcgnaggagcgagtggcattatgcgcttaggtcgctcgcagttagagtatatacagtntcattgtcgagagcgagaggtgcgaggtgttatatngtggctagagaatgntgtcaagagcacttagcacatggattatattgangcagtatanaataagactctgaggtcgagtcactagatgatgtgagcgtcgcatctccgacatcgcgcatctggatatgcgcgtagagagtatctcatctctccgcgcacttgcgccaattacgtgtagcggtagagctatnacaagcgatcgctgagacgttcgcgtccagtaaatacgagtancgccccggcatgntgtaaagcatcatcatgcggcgtgcgacggtagcgtgtacgtagagttggnatcctaataatgatggcgtcgttgtccgccggcagtgcgcggtgtcgatagtgacatattgcaccattttgtcgcgacatatacaatcaatntagcatcgtgtaacgtcacgtgatgtaacgtgtaactgcgtatatanncgccatctgattaggaggagtgacattctcgctatgcgttgtgggggtgatggcgtgttaatcattatgtgtagtacgactatccaccanntnaatcctcgcgtctccgtggctgtgctctgcgtatgagagatncatttgtggtatctactccctgatactcggcgaggcacgggtgaaggacgtgagatctcatgcagtctcttcaacactngatatctcaacagacgccgcgcagcgcaatcaccgacggtgaggacatctagacgtgtcggaagtcactattattctagtactaaatctaggtgatgtatggttcatgggtggggtagctcttngccgataattcnaggacatactatgtgtggcgatcacgccttagtgactctatcgtcgcggtactgtgcattcacatggtcnttncctcttacatgtagctatatattcgttatgcaggcgcggggcggatatatattagagtagaggaataagaggcgcgtatactctgcgaataattgtatatgcgtgatatcgtaaataagcgatccgagctcgacgcgagttcggtgtaggtncgcctgtcgtctcaagatgcggtacctcctaccgtcagcgacccggcaccacaaaaagaatgtccggctgcggcgcgaaaataacaagacgggagcgcaaaaaaggaggaggcaaaagtgtacaagggagaaacgagtaatcacggcgatagggcccacaaaaattttctcctaatgtattagctctcactctctagcttgcgagccactgtagatgtcggtcgtgctatgtgtcactgcgtttttcaggcatagtggataagagtgaagagacgnggaggttgatcgccctgtgtattgttcgggttggttgctcataagatagaagatgagaagtttactctgcgcaattcaccgtgtcaggactcgcggcgcatattcacaacttaggttgtcaagagcctggctcccgcgcggcggcggtggaagttccctaagttttgagtatggtggtgggccttgcgtgnggccgcgggggtggaagggccgtggggtgtgtggc

SEQ ID NO: 1901 - DNA, 797 bp, Glycine max
  misc_feature (10)..(11): n is a, c, g, or t
  misc_feature (13)..(15): n is a, c, g, or t
  misc_feature (20)..(21): n is a, c, g, or t
  misc_feature (35)..(35): n is a, c, g, or t
  misc_feature (41)..(41): n is a, c, g, or t
  misc_feature (46)..(46): n is a, c, g, or t
  misc_feature (51)..(51): n is a, c, g, or t
  misc_feature (57)..(57): n is a, c, g, or t
  misc_feature (60)..(60): n is a, c, g, or t
  misc_feature (63)..(63): n is a, c, g, or t
  misc_feature (68)..(68): n is a, c, g, or t
  misc_feature (86)..(87): n is a, c, g, or t
  misc_feature (93)..(93): n is a, c, g, or t
  misc_feature (98)..(98): n is a, c, g, or t
  misc_feature (104)..(104): n is a, c, g, or t
  misc_feature (132)..(132): n is a, c, g, or t
  misc_feature (135)..(135): n is a, c, g, or t
  misc_feature (149)..(149): n is a, c, g, or t
  misc_feature (158)..(158): n is a, c, g, or t
  misc_feature (162)..(162): n is a, c, g, or t
  misc_feature (174)..(174): n is a, c, g, or t
  misc_feature (180)..(180): n is a, c, g, or t
  misc_feature (199)..(199): n is a, c, g, or t
  misc_feature (204)..(205): n is a, c, g, or t
  misc_feature (212)..(212): n is a, c, g, or t
  misc_feature (220)..(220): n is a, c, g, or t
  misc_feature (227)..(227): n is a, c, g, or t
  misc_feature (231)..(231): n is a, c, g, or t
  misc_feature (247)..(248): n is a, c, g, or t
  misc_feature (257)..(257): n is a, c, g, or t
  misc_feature (266)..(266): n is a, c, g, or t
  misc_feature (270)..(270): n is a, c, g, or t
  misc_feature (278)..(278): n is a, c, g, or t
  misc_feature (290)..(290): n is a, c, g, or t
  misc_feature (358)..(358): n is a, c, g, or t
  misc_feature (373)..(373): n is a, c, g, or t
  misc_feature (391)..(391): n is a, c, g, or t
  misc_feature (398)..(398): n is a, c, g, or t
  misc_feature (435)..(435): n is a, c, g, or t
  misc_feature (440)..(441): n is a, c, g, or t
  misc_feature (445)..(446): n is a, c, g, or t
  misc_feature (448)..(448): n is a, c, g, or t
  misc_feature (455)..(455): n is a, c, g, or t
  misc_feature (470)..(471): n is a, c, g, or t
  misc_feature (478)..(478): n is a, c, g, or t
  misc_feature (485)..(485): n is a, c, g, or t
  misc_feature (494)..(494): n is a, c, g, or t
  misc_feature (511)..(511): n is a, c, g, or t
  misc_feature (513)..(513): n is a, c, g, or t
  misc_feature (518)..(518): n is a, c, g, or t
  misc_feature (520)..(520): n is a, c, g, or t
  misc_feature (534)..(534): n is a, c, g, or t
  misc_feature (543)..(544): n is a, c, g, or t
  misc_feature (546)..(546): n is a, c, g, or t
  misc_feature (559)..(559): n is a, c, g, or t
  misc_feature (586)..(587): n is a, c, g, or t
  misc_feature (601)..(602): n is a, c, g, or t
  misc_feature (622)..(624): n is a, c, g, or t
  misc_feature (630)..(630): n is a, c, g, or t
  misc_feature (637)..(637): n is a, c, g, or t
  misc_feature (644)..(644): n is a, c, g, or t
  misc_feature (658)..(658): n is a, c, g, or t
  misc_feature (660)..(660): n is a, c, g, or t
  misc_feature (662)..(663): n is a, c, g, or t
  misc_feature (669)..(670): n is a, c, g, or t
  misc_feature (672)..(672): n is a, c, g, or t
  misc_feature (708)..(708): n is a, c, g, or t
  misc_feature (724)..(724): n is a, c, g, or t
  misc_feature (756)..(756): n is a, c, g, or t
  misc_feature (761)..(762): n is a, c, g, or t
  Peptide Sequence Number=SeqID_9474
  Probeset Number=SeqID_11680
aggcccaaannannnaaggnnttgggcccattttntggggngcccngtccnacctancgntgngttcncagggaaataaggtgggnnattggnggccntacggnagaccagaactttcgccaagaccgtganctngaagtgatccactncaggtgggncatnctcgtagcattnggctgngtcttcctggagagctgtnccgcnncggggtnaagttcgnataaccngtgnggttcaaggccgggtnncagatgttnagtgagggngggntagactanttgggcaacccnagcttgatccacgcccagagcatcctagccatttgggccacacaagttatcgttaatgggtgccgttnaaggattccgtattnttggtggccccctcggtnaggtcangtgacccaatatacccaggtggcagcttcgacccatngggcnntgannangacccanaggctttttctgagnntaaggtnaaggatngtcaatgancgagccgacctggccangngcatnangtctggcttcttgncccaggccnntntcgttggaaaggntccattggagatacctcaccgatcacnnggttgacccttgtnnacaggatagcctgggcctannncaccangtttgtnccagganagtgagggtcaaanancnnaaaganntngagagtttttatatttgtggctggtgaacctacttnagataatgaaataatnttgagtatcggaatccaagcaaatgtcagatncttannacaaaaaaaaaaaaaaaaaagaattcctcagccgg

SEQ ID NO: 1902 - DNA, 1374 bp, Glycine max
  misc_feature (42)..(42): n is a, c, g, or t
  misc_feature (89)..(90): n is a, c, g, or t
  misc_feature (98)..(98): n is a, c, g, or t
  misc_feature (121)..(121): n is a, c, g, or t
  misc_feature (131)..(131): n is a, c, g, or t
  misc_feature (143)..(143): n is a, c, g, or t
  misc_feature (176)..(176): n is a, c, g, or t
  misc_feature (387)..(387): n is a, c, g, or t
  misc_feature (410)..(410): n is a, c, g, or t
  misc_feature (417)..(417): n is a, c, g, or t
  misc_feature (443)..(443): n is a, c, g, or t
  misc_feature (559)..(559): n is a, c, g, or t
  misc_feature (561)..(561): n is a, c, g, or t
  misc_feature (1020)..(1020): n is a, c, g, or t
  misc_feature (1202)..(1202): n is a, c, g, or t
  misc_feature (1336)..(1337): n is a, c, g, or t
  Peptide Sequence Number=SeqID_9475
  Probeset Number=SeqID_11681
gtgaggagagtgagcgtcggcgttgagcacacagactacgancgagaagatgtatggtgatgatagtattgatgtatgatctacaatcnntttatatnttctcctcacgtacgtgtctatnccacatcttngtgagtgtgtgnttcggtgttgtgagtagtagctagatagatatnctaggcatctgagcatatcgtatgatatgtatagaaggaatgttaatcaaacgacacaatacttatacatcaactgtggtcgattctatgataggagtagagatggtaggatattgtgtgtatgagtgcttgcgaatgcgctgagtgtgaggtagagagtgagtggagtgtccaggagcaccaccacgcacgcctggctcgctgcgtcgtntgtgatcatcacaataagcgggntgatgtngcgtgagctgactgaggctactgttntctgtcgatctctctatctgaatacacggcgtgtgattctgttcatacagcagagtgtgtgtggtgggtgtgcgtggggacccactattaatcagatagtccgaacaatataatananggtgtgtgtggggtgcagccatgcgcggcaacagggtattgtttagtgttgttttgtcgctccctggatgtgtgtgaggggtgctgtggtggtgcttgcggtctaaatgtttgtatgtaatatagtgttgttgttttctgttcttttcggagacacaagattagatatctcatctactcactaaattgaacgagatatatttagtttgctgatgcccgtatttcagggtggtgcttcttaatttattatagagaagttgttcttctcactacccaaacacttatatccacataataaaacaggcgtgtgtgaatgtgtgttggcgacaagagatagccgagtgcaaaaaccacaaagatctattaatgagcgccattttggtaggattgcacatatagtgcggaaaagatgacagtggaaaaggaaacaatattgtattacgatattaagaaattgganttcatttcgacaatgcttatcaaaatagcggccggactctgcaaatacctaaaataagaaagagatgactggccgggattgtgcggaagatttttattttatcaacaattataatgtggtaatatccccgccagattaaaacaacagagatagatatattgagattccacagccacgccccngggggtggtcccgattttgtattcttagaggctggttaggtactttttatcgaaggattaatcattttttttctccagctttttataattgggggttgttgtggttgttgtgtggtcttgtggggggtcgtttnnggagagaggaaacacctccatatccacaaaaaaatat

SEQ ID NO: 1903 - DNA, 461 bp, Glycine max
  Probeset Number=SeqID_11682
attgtgaagttgttgccatttctctttcttgcattcgtttgtgattcaattcacctcagatagcacgttcacgcctcaggagaaaaaaagaagattgtaggggtgttctacaaagggaatgagtatgcttcgaatcccaattttgtgggatgtgttgaaagagcattgggtatacgtgagtggttggaatcacagggtcaccagtacatagtcactgatgacaaagaaggacccgattcagaactagagaaacacattcctgatgccaatgtcatcatatctactccatttcaccctgcctatatcaccgcagaaagaattaagaaagccaaaaatttggagctgcttttgactgctggcattggttctgatcacgttgatctcaaggcagcagctgctgctggtttaactgtggcagagatcacaggaagcaacgtagtctcggtcgcggargatgaact

SEQ ID NO: 1904 - DNA, 736 bp, Glycine max
  misc_feature (1)..(5): n is a, c, g, or t
  misc_feature (693)..(736): n is a, c, g, or t
  Peptide Sequence Number=SeqID_9476
  Probeset Number=SeqID_11683
nnnnngaacatcctaatcgaaaaattcggtttgttaattgtgtcgctgtttgttatcttcaaacgatagcgttgagctctaggaaaagtgtgtttgatcgcagaaaaggcttcgtcttttgtcttgcaacaggcttataaggaatggcaaagagcacattcaaggaagagcatgacctagagaaaagaagtgcagaggctgctcggattagagagaaatatccagataggattccggtgattgttgagaagggggagaagagtgatataccaaccatcgacaagaaaaaatacctagtcccagctgatctgacagtggggcaattcgtgtatgtcattcgcaaaagaatcaaactgagtgctgaaaaggctatctttatctttgtggacaatgttcttcctccaactggtgcactaatgtctgctgtgtacgaagagaaaaaggatgacgatggctttctctatgtcacttacagcggagagaacacatttggatctccatagagatctcttgctggatatttcgtttctattttacctatttcgcctgagtatttcatatcttattattagttatctatgtactactttctctaagaactttaagatggccgttaatgtgtacagagaacataaaaataatgtagtatatataatctcaaaacctactttgtcacaaaaaaaaaaaaaaaannnnnnnnnnnnnnnnnnnnnnnnnnnnnnnnnnnnnnnnnnnn

SEQ ID NO: 1905 - DNA, 1603 bp, Glycine max
  Peptide Sequence Number=SeqID_9477
  Probeset Number=SeqID_11684
attaatttcatttttctgtcaaagacagtttgaacttattattaaatctctaacgacttgacaaaaaacaatggcagcctttgtctattacaacccaaaaactaacaccattgaacgaaagttcccaactcaacctgttggctttcaagtaccttacctactaaacatccaacctcaagatataaattatgcaatgagaaacaccgctgatgtcagagctaatccccctaatttccatcaaacccctgaaacttttctccctcaacctcctcaaaaagaagaagtcaaaagtttccgtttaacaaaaaaagctgataaagaaactgaaaagtctagcggcgcttatcaacaaaataaagcttccccttcaaagaactttggatcaactacgaacgagtttcttatgatggaagacttacatgaggaagatcttaactctattcctgattactatcaggctcctggaatcgaaacaaagacaagatctctgaagcctcagtcctttgagcctgaaagattaacaaagaagaaagtagttattcaagagccccaacagaattatcccgaacaagaggctcaaggagattttaagttagtcagacatgaggatattatgcttaaatatagacctgaaaatttcagtatcaatgaaagaatactgaatgcaaagtatgtaagagaagaacaagagaaaacaaggaggtttatgctagacagaattggcaatgatataaaggtcatggagaaagctgcgaatggacttgaaagagagttcgagaaaacaggaaaagaaactcataatcttgaagagaaaacaaagcaaatctgggaagaagttgaacgcaagaggtttgaattaaaggctcaagagattatgaacaacattgatcgagcagttgaaatagatcatgagctggaccaagaagatagaattaacgccttactaaatgaaaatagagctttatatgacgagattgacagagttctagaaggagatgaagaacctgaagagccagttccgcagtccctatatacaattccggagacaggaagatcagggtcatcaaaaaatgcaaaaggttcaagcaatgcaagaccaagtacctcaataggaaggactacagctcaaaagaaaccaggatttaatgtatccaagagtattgtagagcagaaatttggaaggaaaaatattgtaaagactgtaagtgagaataagattaaaggtgcgactcgagttcagataggtacaccagagaagaagaaccgaaataccgcaaccaaggatggtaatgcgatgtttaagaatcctaaaaaggttgaagaggctttacagaaggcaagagaaattgcagacttgtattaggtcataagagcgtgcaaacaagttgttagggtttgttagcagtaagcattttttatatagaaatttttatgtatttttattatatttctcgatttttacctatggagcttataagctattattaaagcaaataactcattattttggctttgcatactgacaatatcaggacaaacaatttatataatgttatgagtattgaacatatggatgcaattcctttttttgttaataaatttc

SEQ ID NO: 1906 - DNA, 1425 bp, Glycine max
  misc_feature (1)..(1): n is a, c, g, or t
  misc_feature (37)..(37): n is a, c, g, or t
  misc_feature (42)..(42): n is a, c, g, or t
  misc_feature (69)..(69): n is a, c, g, or t
  misc_feature (74)..(74): n is a, c, g, or t
  misc_feature (76)..(76): n is a, c, g, or t
  misc_feature (107)..(108): n is a, c, g, or t
  misc_feature (140)..(140): n is a, c, g, or t
  misc_feature (200)..(200): n is a, c, g, or t
  misc_feature (246)..(247): n is a, c, g, or t
  misc_feature (249)..(254): n is a, c, g, or t
  misc_feature (369)..(370): n is a, c, g, or t
  misc_feature (374)..(375): n is a, c, g, or t
  misc_feature (406)..(406): n is a, c, g, or t
  misc_feature (444)..(444): n is a, c, g, or t
  misc_feature (567)..(567): n is a, c, g, or t
  misc_feature (581)..(581): n is a, c, g, or t
  misc_feature (608)..(608): n is a, c, g, or t
  misc_feature (648)..(648): n is a, c, g, or t
  misc_feature (785)..(785): n is a, c, g, or t
  misc_feature (1269)..(1269): n is a, c, g, or t
  misc_feature (1414)..(1414): n is a, c, g, or t
  Peptide Sequence Number=SeqID_9478
  Probeset Number=SeqID_11685
ncgtggactacagtacgcgtcggaaacgccacgatgnacacnctgcatttatcatctagttgtatatantcacngnaaagcaacgacgacgggcatcgcatctgggnnagcaacgctatgtcatctcactcattcctcgnatcgatcagcgatgtactcgggcatatcgcagatatctcgtatctgtgtagcggctcggncgggtgttgtgatatatataaagcgtcgcgcgatgtagatatgganngnnnnnncttatctttcctgtctccgtatgctcttttatgccagcttggacgtgcggcggatatagttcccagaatatcgaaccgcatcctcgccttctactctacatagtgcgtgtctctnnatanntctgcctatatatagacgacacatatgtgangagggtcgtacggcattaaacacgataactatcacctncacaacatgaaacgtgatacagagtatatgcatgtgtattggaggagggtgcttatactccacgtcacgtcgcgatgagagtatggaagtatgtacgtttatgtgcgacgccgcgtgttacgngttgttacgccgcntgactaggcaacatcatacgaacgtanatctcgctgtatatgtgccgtgatgccagatggtgtatantccaacaccaacaccccaacaccacgacaagtccttaaaatggagcgcggaattattgagtgagggcacggaagatcgtgcttacctatcttgtgcgcgggaaccattcgtggatatccaatccgcatcttagctgngcgtccttcgctgcactccacgcataactcgcgacacaggcgcgggaggctgggcagacggtgagaacacacaccgggcaaagaaaatgaaaaagccgcccgagattgcgtctcttccaactacaaacataagggcgaagataacaccacacagtgcacaccgcgctcacgcgccacccaggcacgcagcatatcgggcgactacacgcgacatacgtatgggcgcgtcgctcgtaatataatcggcatgtgtggaaaagggtcagtattacgccccgagctcataccgcggcgccgcgatttcgcgctcacgggcgtaggcagagggcgtgcggtgattgagttagcacggtgaataatgctgcaaaaattatagggatagagacgccggagaggcgcttcggccacccgttatataacaaccactccccgcgccgcgtgtgtgggcggcatgtagggaccggccatgtggaacacgattcgncgggagatattcctctattataccctccgccggtgcatactcgtgcacgcagggggacgtctgatgggaggcgcacgcgccgacacgccaacgggccgcatcgatgacccgccgccgctaccagaatcacacaacgcagctctanaagcgtaaaac

SEQ ID NO: 1907 - DNA, 1414 bp, Glycine max
  misc_feature (22)..(24): n is a, c, g, or t
  misc_feature (30)..(30): n is a, c, g, or t
  misc_feature (33)..(33): n is a, c, g, or t
  misc_feature (35)..(35): n is a, c, g, or t
  misc_feature (129)..(129): n is a, c, g, or t
  misc_feature (240)..(240): n is a, c, g, or t
  misc_feature (390)..(390): n is a, c, g, or t
  misc_feature (536)..(536): n is a, c, g, or t
  misc_feature (811)..(811): n is a, c, g, or t
  misc_feature (853)..(853): n is a, c, g, or t
  misc_feature (898)..(898): n is a, c, g, or t
  misc_feature (937)..(937): n is a, c, g, or t
  misc_feature (943)..(943): n is a, c, g, or t
  misc_feature (1007)..(1007): n is a, c, g, or t
  misc_feature (1047)..(1047): n is a, c, g, or t
  misc_feature (1169)..(1169): n is a, c, g, or t
  misc_feature (1214)..(1214): n is a, c, g, or t
  misc_feature (1310)..(1310): n is a, c, g, or t
  Probeset Number=SeqID_11686
gggttgtgttggggtggttgtnnntctccntcntnccatattattctctctctccctgtgtggcgacgatatctattagctctcatgtcgaatatttatgattatgatgccatcgtgcctggcggtacncactctctacatattctaactacagatcgactacccacaaagtgtgatatatatgagtcttatatgtgtaatttaatttgttttggtgatttgaatatatatgatggtgtnagactatgtttacatttataacgctatttatatttattatgatgaagttggagtgagtgtaggagtagttgcacgctaccatgctcgtcttgaccctcattacacttaatatcaataagtatacaatacacaactcaacaaccagacgtnacgtacataacgcgacctgagagttaatatatgtgtctgattctcatctgtctctagactgtttgtctctttatggatatatctaacctactctactcaattatggcctgcccatcctaacatctttatatcgacaacctccgtcnacgcatatttgtgtatatgctattatttcacgcagacttagtcgtggtcttcgttcctcccctctcacctctcattattgtggcgtggagggagagtcgcaacccacaccaccacaccgacacgacaagagttatatatgacgagtgaatgattatattgtatatcatattatattataatgaccatatagaactatcacggccacgttactcatacataattacattgtgacgaaggtcagacatggaatgatctgaatgtgactcacgacaantatacactagtgatgtgatgctcggcaacactgtctgcttgncgctgattgtttctgactgattgtgtttgagtcactatgcaaacncacccacactatatggctgacacccatacaagttagaantatgtngtattgatatgtttgatgaatgtgagacgcgcacacgatgtcaacacactagtcgctctcatantcatctattagaatccatatataaacgcatgtcttgcacnacgcttgaggcgtctagctgagattgttgatattacactacatatgagagtgtatagaagactaagattgtaacgacgcgatactccctctcttctgcgttgttgagtttctgccgtcgctncctcgttcgtgtgtcgaatgactgcagcctacgtggcacgcgtcntgatgtcaaggtaatcgcacgcgtgcggtactgttgtatggtgtatttgtctgcccgtggtcttgtgggactagatcgtgcatctctgtcgcggtntcggtggaacgtggtgctgtccgcatggcaagtctctattatcatatataatattatatatatgtatgataccacaatgtattctaatcgatagatcgtcctgt

SEQ ID NO: 1908 - DNA, 1980 bp, Glycine max
  misc_feature (1)..(1): n is a, c, g, or t
  misc_feature (51)..(51): n is a, c, g, or t
  misc_feature (93)..(93): n is a, c, g, or t
  misc_feature (95)..(95): n is a, c, g, or t
  misc_feature (116)..(116): n is a, c, g, or t
  misc_feature (141)..(141): n is a, c, g, or t
  misc_feature (179)..(179): n is a, c, g, or t
  misc_feature (190)..(190): n is a, c, g, or t
  misc_feature (265)..(265): n is a, c, g, or t
  misc_feature (325)..(325): n is a, c, g, or t
  misc_feature (393)..(393): n is a, c, g, or t
  misc_feature (415)..(415): n is a, c, g, or t
  misc_feature (451)..(451): n is a, c, g, or t
  misc_feature (453)..(453): n is a, c, g, or t
  misc_feature (469)..(469): n is a, c, g, or t
  misc_feature (509)..(509): n is a, c, g, or t
  misc_feature (732)..(732): n is a, c, g, or t
  misc_feature (738)..(738): n is a, c, g, or t
  misc_feature (815)..(815): n is a, c, g, or t
  misc_feature (1061)..(1061): n is a, c, g, or t
  misc_feature (1164)..(1164): n is a, c, g, or t
  misc_feature (1176)..(1176): n is a, c, g, or t
  misc_feature (1178)..(1178): n is a, c, g, or t
  misc_feature (1205)..(1205): n is a, c, g, or t
  misc_feature (1291)..(1291): n is a, c, g, or t
  misc_feature (1342)..(1342): n is a, c, g, or t
  misc_feature (1354)..(1354): n is a, c, g, or t
  misc_feature (1429)..(1429): n is a, c, g, or t
  misc_feature (1434)..(1434): n is a, c, g, or t
  misc_feature (1488)..(1488): n is a, c, g, or t
  misc_feature (1497)..(1497): n is a, c, g, or t
  misc_feature (1509)..(1509): n is a, c, g, or t
  misc_feature (1511)..(1511): n is a, c, g, or t
  misc_feature (1609)..(1609): n is a, c, g, or t
  misc_feature (1672)..(1672): n is a, c, g, or t
  misc_feature (1677)..(1677): n is a, c, g, or t
  misc_feature (1698)..(1698): n is a, c, g, or t
  misc_feature (1782)..(1782): n is a, c, g, or t
  misc_feature (1804)..(1804): n is a, c, g, or t
  misc_feature (1849)..(1849): n is a, c, g, or t
  misc_feature (1854)..(1854): n is a, c, g, or t
  misc_feature (1856)..(1856): n is a, c, g, or t
  misc_feature (1872)..(1872): n is a, c, g, or t
  misc_feature (1880)..(1880): n is a, c, g, or t
  misc_feature (1887)..(1887): n is a, c, g, or t
  misc_feature (1893)..(1893): n is a, c, g, or t
  misc_feature (1903)..(1903): n is a, c, g, or t
  misc_feature (1905)..(1906): n is a, c, g, or t
  misc_feature (1909)..(1909): n is a, c, g, or t
  misc_feature (1929)..(1931): n is a, c, g, or t
  misc_feature (1933)..(1933): n is a, c, g, or t
  misc_feature (1935)..(1936): n is a, c, g, or t
  misc_feature (1940)..(1940): n is a, c, g, or t
  misc_feature (1942)..(1942): n is a, c, g, or t
  misc_feature (1948)..(1948): n is a, c, g, or t
  misc_feature (1958)..(1958): n is a, c, g, or t
  misc_feature (1963)..(1963): n is a, c, g, or t
  misc_feature (1966)..(1966): n is a, c, g, or t
  Peptide Sequence Number=SeqID_9479
  Probeset Number=SeqID_11687
ncgaggacgtcgtcgctatcagctcacacgagcgtgcagtgtctgatgtcncgcgcggaatagtcgtaggagtcgtatatataagtagactgntngaactgcatctcatcctcggncgtaggtcgttcagcttgtgcgcgntcagtgtagtagggagcgcgaagtctagtgcgtcgcgngctgcatgcgnaagcacgcgcgcaagtagtataagtctgctcgcgtagtcgtgcacgctcgacgtgcgcgctcaacacatgtaatnatgatacgactcgacgttgcgtcagatgatcgctgtgctcagacgattaccatgagagtntatgtcggaaggattgacatagtacgaagacagcagacgcggccaaagtgatgtcgtacgcgcgcgangtgagtatagcgtcgtctctanagagcagagagtgtatcagcactacgcatgtactgnantacgcgcgtcgagcgncctgcgagcgtggtgcagcgagagtcggggggtgtgggtntaaacaattatacttcaagcttagtaagagcgcgtgacacgatagttgagctcaagcatatgagagtaggagagcggagatgtaatagcataaatataactaatatataagagtgctgagtatccggtgaaggcaatcgaactgcggatggggatgtcgtcgagcggcgacgagccgtgagacgagagtcatctgctatcggagcaactcaggcgcgctatancttgcncacacgcgcagccagtcagaggtgtctgtgcgcatgcacatcgtgatatgagagatgcagtaggcacttgagctcgnagcatcgcttgatataatacatagtcacgcatgatagatgtatatttgtggtatatggtagagtgagagtgagtactgcagcaatgtaagcagtagtgtacacgtactaatctacgacacgagcgagccgcacatactctacaccattcactataagatatagtaccatacagccaccagacgagagagcagagaggcgcgaagtgagagtacatgcagcatgtagacacatggcgcggtgactantatatggaagacatcgaagcacatgtgatagcgccgtggaggcgcggtaagatagagaatgccgcaaccatagagtacaacgaatgacgtcacgacggataancacacctttcgntntcttctacgtctatcatgccactaagntaggagcagagctgatagacgtcgcgcagagagtggtcagacgcatcaatgagagcggtgtagacgagataaatagcagtatgganaggcgagtatgatgttgtgaggcgcatgtagatattagtgtgcgttgtctncaatgcgttgcnacgatggcgtcgactgtatattcgtatcgcgcaatgtcgttgtctgcgtgctgactctcgtcatgtgtgagcctntgagngcggcggagtggagtgagagggtgtggctgtgtgatgagcgctgcgccgtcgcncgcctcccncttgtggtcgantntctctctactactcgatcacacacgtcatctcacacgtgtgtaaggcaacagatctattctggcgagactgagactatgtaccttgtatcgagggagntgtgtctcccataattatgtgagtgttaatagcggtgtagcgagtgtgttgtgatgagttgtncaatnttcatacatattacataactnttatctctatacgtacatatagcgagagtagcgtgctgagcgctatgactcttagtagcacatagatatatgctgtagtagtgnggtggtgtgattacggggggtncgcgtccctccacaacgacagacatatcgagagctgcccactaancatcngnacggctcacttcctcntcgcgcgnccgacgnataacnagggggagcncnngtntcagatgtacatatagagannngngnnaggnanacaaancacagaacanaaccnaancacacgcgcacccc

SEQ ID NO: 1909 - DNA, 1494 bp, Glycine max
  misc_feature (45)..(45): n is a, c, g, or t
  misc_feature (89)..(89): n is a, c, g, or t
  misc_feature (264)..(264): n is a, c, g, or t
  misc_feature (305)..(305): n is a, c, g, or t
  misc_feature (310)..(310): n is a, c, g, or t
  misc_feature (382)..(382): n is a, c, g, or t
  misc_feature (412)..(412): n is a, c, g, or t
  misc_feature (533)..(533): n is a, c, g, or t
  misc_feature (583)..(583): n is a, c, g, or t
  misc_feature (635)..(635): n is a, c, g, or t
  misc_feature (784)..(784): n is a, c, g, or t
  misc_feature (999)..(999): n is a, c, g, or t
  misc_feature (1001)..(1001): n is a, c, g, or t
  misc_feature (1003)..(1003): n is a, c, g, or t
  misc_feature (1007)..(1007): n is a, c, g, or t
  misc_feature (1033)..(1033): n is a, c, g, or t
  misc_feature (1035)..(1035): n is a, c, g, or t
  misc_feature (1051)..(1051): n is a, c, g, or t
  misc_feature (1053)..(1053): n is a, c, g, or t
  misc_feature (1080)..(1080): n is a, c, g, or t
  misc_feature (1153)..(1153): n is a, c, g, or t
  misc_feature (1187)..(1187): n is a, c, g, or t
  misc_feature (1215)..(1215): n is a, c, g, or t
  misc_feature (1256)..(1256): n is a, c, g, or t
  misc_feature (1282)..(1282): n is a, c, g, or t
  misc_feature (1309)..(1309): n is a, c, g, or t
  misc_feature (1336)..(1336): n is a, c, g, or t
  misc_feature (1376)..(1376): n is a, c, g, or t
  misc_feature (1378)..(1378): n is a, c, g, or t
  misc_feature (1381)..(1381): n is a, c, g, or t
  misc_feature (1421)..(1421): n is a, c, g, or t
  misc_feature (1424)..(1424): n is a, c, g, or t
  misc_feature (1463)..(1466): n is a, c, g, or t
  misc_feature (1468)..(1489): n is a, c, g, or t
  Peptide Sequence Number=SeqID_9487
  Probeset Number=SeqID_11688
ctctttgctgggatcgtatcgttagcgcgctggccgctctctcgncagtgttgcggcagtgcgtctgatgtacgcgcgttcgcgcactncgtcgttgtgtgtgatagctgagatcattttacttcagcggtgcttgttgatgtggatgcgcgtgaagatcgtagaatgtacaagcgctagatagagtgtatacctactctcatgagctcgcttatggttgtgctgtagcgaggtgggactatcgagttcctacgggtattaganagcgctcgcacctgtcaactcctctattgctaccggcagangtganggcgtcttacagtgcgagacatcctgcgggtcggcagctgtcttcgtatagcatcgtcccgcatgcacactnctgtatggaggcagtgtgttgcgcggtgcncgtggtgtatagtattcatggatacaagaaggaaggtaatctgcgatcgtctctctccggagtctctagtgttgtggagccacagctatcgcagcatgtgtgaggcgcgtctatgctctgncgagcgagctctctcatgtccagattctgatgtcagggggaggcgaagangatgagacgccccttggctgagtgtgtcttcttcctatcatagggcctaggnaggagtataatctatatcaacagatataacactactacgttggcgtgttacatgccggagagtcacaaagagagtaagtgtgagccgaccgcgggactacataattagagatataaaatcatactttctttgtgtgagagatgtgaggntgagtgccaggcggaggctcgcgcgcgcgctggtggtgggtgtctcctccgtgccctctcgcacgcctgtgaatctagaggcagaggcacaggaacaacgcgacggaacactttacatcgaccagacagactaatcagataacagaggagcacacgtacctgacgtggacgagactctttctgctcgctctagcatactttatgagtgagagttntntngatngtgagactatactactgattctgctngnataccgactcttactncnagagagagtctccgatcgatggcgctngctcgctcttgccactctcgcgcttgcagctctctcgaagacagagagatctctctcatggtatctcgcgtgngcgaggatctcgcgtgggcagtataacactgcanacagtatagagcacatcgtacacgtctngtgcgtgcgtgccgcgctgttgtgtctagaatatactgtgnggagaggatagctatctccacagcgngtgagcatggcttcagacgcgcgtctnctgctgctctgccctcgcgacgccgcnctaggcgtgcatcgtcttctatgtctgctgaggacggcgncnccncctcggcgggggaggtagaggcgccgcgagtctgtttttnttntgttgtggttggtggtgtgtgggtggtgtgggggggggnnnngnnnnnnnnnnnnnnnnnnnnnnccccc

SEQ ID NO: 1910 - DNA, 2457 bp, Glycine max
  misc_feature (14)..(14): n is a, c, g, or t
  misc_feature (23)..(23): n is a, c, g, or t
  misc_feature (25)..(26): n is a, c, g, or t
  misc_feature (32)..(32): n is a, c, g, or t
  misc_feature (39)..(39): n is a, c, g, or t
  misc_feature (47)..(47): n is a, c, g, or t
  misc_feature (58)..(58): n is a, c, g, or t
  misc_feature (60)..(60): n is a, c, g, or t
  misc_feature (62)..(62): n is a, c, g, or t
  misc_feature (65)..(65): n is a, c, g, or t
  misc_feature (67)..(67): n is a, c, g, or t
  misc_feature (69)..(69): n is a, c, g, or t
  misc_feature (71)..(71): n is a, c, g, or t
  misc_feature (76)..(76): n is a, c, g, or t
  misc_feature (78)..(81): n is a, c, g, or t
  misc_feature (85)..(85): n is a, c, g, or t
  misc_feature (87)..(87): n is a, c, g, or t
  misc_feature (90)..(90): n is a, c, g, or t
  misc_feature (92)..(92): n is a, c, g, or t
  misc_feature (95)..(95): n is a, c, g, or t
  misc_feature (102)..(102): n is a, c, g, or t
  misc_feature (105)..(105): n is a, c, g, or t
  misc_feature (107)..(107): n is a, c, g, or t
  misc_feature (115)..(117): n is a, c, g, or t
  misc_feature (121)..(123): n is a, c, g, or t
  misc_feature (125)..(125): n is a, c, g, or t
  misc_feature (130)..(130): n is a, c, g, or t
  misc_feature (132)..(132): n is a, c, g, or t
  misc_feature (142)..(144): n is a, c, g, or t
  misc_feature (160)..(162): n is a, c, g, or t
  misc_feature (165)..(165): n is a, c, g, or t
  misc_feature (168)..(168): n is a, c, g, or t
  misc_feature (170)..(171): n is a, c, g, or t
  misc_feature (173)..(173): n is a, c, g, or t
  misc_feature (178)..(178): n is a, c, g, or t
  misc_feature (181)..(181): n is a, c, g, or t
  misc_feature (183)..(183): n is a, c, g, or t
  misc_feature (198)..(198): n is a, c, g, or t
  misc_feature (202)..(202): n is a, c, g, or t
  misc_feature (250)..(250): n is a, c, g, or t
  misc_feature (253)..(254): n is a, c, g, or t
  misc_feature (261)..(261): n is a, c, g, or t
  misc_feature (286)..(286): n is a, c, g, or t
  misc_feature (334)..(334): n is a, c, g, or t
  misc_feature (343)..(343): n is a, c, g, or t
  misc_feature (345)..(346): n is a, c, g, or t
  misc_feature (354)..(354): n is a, c, g, or t
  misc_feature (357)..(357): n is a, c, g, or t
  misc_feature (391)..(391): n is a, c, g, or t
  misc_feature (397)..(397): n is a, c, g, or t
  misc_feature (443)..(443): n is a, c, g, or t
  misc_feature (457)..(457): n is a, c, g, or t
  misc_feature (470)..(470): n is a, c, g, or t
  misc_feature (520)..(520): n is a, c, g, or t
  misc_feature (524)..(524): n is a, c, g, or t
  misc_feature (530)..(530): n is a, c, g, or t
  misc_feature (562)..(562): n is a, c, g, or t
  misc_feature (587)..(587): n is a, c, g, or t
  misc_feature (589)..(589): n is a, c, g, or t
  misc_feature (608)..(608): n is a, c, g, or t
  misc_feature (616)..(616): n is a, c, g, or t
  misc_feature (643)..(643): n is a, c, g, or t
  misc_feature (663)..(663): n is a, c, g, or t
  misc_feature (715)..(715): n is a, c, g, or t
  misc_feature (733)..(733): n is a, c, g, or t
  misc_feature (775)..(775): n is a, c, g, or t
  misc_feature (826)..(826): n is a, c, g, or t
  misc_feature (830)..(830): n is a, c, g, or t
  misc_feature (870)..(870): n is a, c, g, or t
  misc_feature (912)..(912): n is a, c, g, or t
  misc_feature (916)..(916): n is a, c, g, or t
  misc_feature (935)..(935): n is a, c, g, or t
  misc_feature (969)..(969): n is a, c, g, or t
  misc_feature (978)..(978): n is a, c, g, or t
  misc_feature (985)..(985): n is a, c, g, or t
  misc_feature (1012)..(1012): n is a, c, g, or t
  misc_feature (1073)..(1073): n is a, c, g, or t
  misc_feature (1121)..(1121): n is a, c, g, or t
  misc_feature (1207)..(1207): n is a, c, g, or t
  misc_feature (1218)..(1218): n is a, c, g, or t
  misc_feature (1221)..(1221): n is a, c, g, or t
  misc_feature (1230)..(1230): n is a, c, g, or t
  misc_feature (1240)..(1240): n is a, c, g, or t
  misc_feature (1259)..(1259): n is a, c, g, or t
  misc_feature (1278)..(1278): n is a, c, g, or t
  misc_feature (1280)..(1280): n is a, c, g, or t
  misc_feature (1293)..(1293): n is a, c, g, or t
  misc_feature (1295)..(1295): n is a, c, g, or t
  misc_feature (1300)..(1300): n is a, c, g, or t
  misc_feature (1325)..(1325): n is a, c, g, or t
  misc_feature (1330)..(1330): n is a, c, g, or t
  misc_feature (1339)..(1339): n is a, c, g, or t
  misc_feature (1343)..(1343): n is a, c, g, or t
  misc_feature (1351)..(1351): n is a, c, g, or t
  misc_feature (1353)..(1354): n is a, c, g, or t
  misc_feature (1376)..(1376): n is a, c, g, or t
  misc_feature (1391)..(1391): n is a, c, g, or t
  misc_feature (1395)..(1395): n is a, c, g, or t
  misc_feature (1398)..(1398): n is a, c, g, or t
  misc_feature (1408)..(1408): n is a, c, g, or t
  misc_feature (1415)..(1415): n is a, c, g, or t
  misc_feature (1421)..(1421): n is a, c, g, or t
  misc_feature (1438)..(1438): n is a, c, g, or t
  misc_feature (1447)..(1447): n is a, c, g, or t
  misc_feature (1482)..(1482): n is a, c, g, or t
  misc_feature (1529)..(1529): n is a, c, g, or t
  misc_feature (1558)..(1558): n is a, c, g, or t
  misc_feature (1567)..(1567): n is a, c, g, or t
  misc_feature (1581)..(1581): n is a, c, g, or t
  misc_feature (1606)..(1606): n is a, c, g, or t
  misc_feature (1611)..(1611): n is a, c, g, or t
  misc_feature (1614)..(1614): n is a, c, g, or t
  misc_feature (1617)..(1617): n is a, c, g, or t
  misc_feature (1624)..(1624): n is a, c, g, or t
  misc_feature (1634)..(1634): n is a, c, g, or t
  misc_feature (1673)..(1673): n is a, c, g, or t
  misc_feature (1684)..(1684): n is a, c, g, or t
  misc_feature (1700)..(1700): n is a, c, g, or t
  misc_feature (1707)..(1707): n is a, c, g, or t
  misc_feature (1709)..(1710): n is a, c, g, or t
  misc_feature (1719)..(1719): n is a, c, g, or t
  misc_feature (1725)..(1726): n is a, c, g, or t
  misc_feature (1752)..(1752): n is a, c, g, or t
  misc_feature (1757)..(1757): n is a, c, g, or t
  misc_feature (1762)..(1762): n is a, c, g, or t
  misc_feature (1776)..(1776): n is a, c, g, or t
  misc_feature (1781)..(1781): n is a, c, g, or t
  misc_feature (1785)..(1785): n is a, c, g, or t
  misc_feature (1792)..(1792): n is a, c, g, or t
  misc_feature (1827)..(1827): n is a, c, g, or t
  misc_feature (1833)..(1833): n is a, c, g, or t
  misc_feature (1839)..(1839): n is a, c, g, or t
  misc_feature (1841)..(1841): n is a, c, g, or t
  misc_feature (1847)..(1847): n is a, c, g, or t
  misc_feature (1855)..(1856): n is a, c, g, or t
  misc_feature (1883)..(1883): n is a, c, g, or t
  misc_feature (1885)..(1885): n is a, c, g, or t
  misc_feature (1896)..(1896): n is a, c, g, or t
  misc_feature (1903)..(1903): n is a, c, g, or t
  misc_feature (1921)..(1921): n is a, c, g, or t
  misc_feature (1924)..(1924): n is a, c, g, or t
  misc_feature (1934)..(1934): n is a, c, g, or t
  misc_feature (1940)..(1940): n is a, c, g, or t
  misc_feature (1943)..(1943): n is a, c, g, or t
  misc_feature (1960)..(1960): n is a, c, g, or t
  misc_feature (1970)..(1970): n is a, c, g, or t
  misc_feature (1990)..(1990): n is a, c, g, or t
  misc_feature (1998)..(1998): n is a, c, g, or t
  misc_feature (2000)..(2000): n is a, c, g, or t
  misc_feature (2019)..(2019): n is a, c, g, or t
  misc_feature (2023)..(2023): n is a, c, g, or t
  misc_feature (2029)..(2029): n is a, c, g, or t
  misc_feature (2032)..(2032): n is a, c, g, or t
  misc_feature (2039)..(2039): n is a, c, g, or t
  misc_feature (2053)..(2054): n is a, c, g, or t
  misc_feature (2060)..(2060): n is a, c, g, or t
  misc_feature (2064)..(2064): n is a, c, g, or t
  misc_feature (2068)..(2069): n is a, c, g, or t
  misc_feature (2071)..(2071): n is a, c, g, or t
  misc_feature (2075)..(2076): n is a, c, g, or t
  misc_feature (2099)..(2099): n is a, c, g, or t
  misc_feature (2101)..(2101): n is a, c, g, or t
  misc_feature (2125)..(2125): n is a, c, g, or t
  misc_feature (2128)..(2128): n is a, c, g, or t
  misc_feature (2135)..(2135): n is a, c, g, or t
  misc_feature (2158)..(2158): n is a, c, g, or t
  misc_feature (2163)..(2163): n is a, c, g, or t
  misc_feature (2192)..(2192): n is a, c, g, or t
  misc_feature (2211)..(2212): n is a, c, g, or t
  misc_feature (2261)..(2261): n is a, c, g, or t
  misc_feature (2264)..(2264): n is a, c, g, or t
  misc_feature (2267)..(2267): n is a, c, g, or t
  misc_feature (2303)..(2303): n is a, c, g, or t
  misc_feature (2320)..(2320): n is a, c, g, or t
  misc_feature (2325)..(2325): n is a, c, g, or t
  misc_feature (2370)..(2370): n is a, c, g, or t
  misc_feature (2381)..(2381): n is a, c, g, or t
  misc_feature (2383)..(2383): n is a, c, g, or t
  misc_feature (2395)..(2396): n is a, c, g, or t
  misc_feature (2398)..(2398): n is a, c, g, or t
  misc_feature (2402)..(2403): n is a, c, g, or t
  misc_feature (2411)..(2411): n is a, c, g, or t
  misc_feature (2414)..(2414): n is a, c, g, or t
  misc_feature (2420)..(2421): n is a, c, g, or t
  misc_feature (2434)..(2434): n is a, c, g, or t
  misc_feature (2438)..(2438): n is a, c, g, or t
  Probeset Number=SeqID_11689
tggtttgggtgttngtgtgtggngnntctgtngcccccngcgtctcncgcgccgcgtntntnttncncntnctccncnnnngccncnggntntgntgtgttnggntngtgatttnnngccnnnanctccntnggtatggtgnnnttttctctcaatctcnnncgnacnannanagacngangncggctgcagaccccntacntccgctagctcacacgtcggtgtccgcgcactgtctcgggtatatgtngtnngagaggngaggacggcggtgtccgagggtgtngcgtcactgacacgctgtgaccattgccatcctgttttcgcgcgtccncacggccantnnctacacantgncacaggtacgcgacagcgagctcagatgcataanaaattnatatatagtgtgaggtgtgatgatgtatactcggcctgtacatgtntgcgtgacatccanatatactttatcntttatatatatagatgtcatcctgcttctctctctgctccgatccatcgnctcngcgggngcgcgcctgcgccgccacacccacccccatcnctcgaggtcgggtgctggctgcttncngctgtcatactctacttgnttcctccncatctctttatttacttcgctctcttnactactgatgtcgtgtatcnatagtcgttgtcgcgctagacatctcctcagataacaccatcacgatccatnctagctcccgtgatcttncatctatctacgacgatcttatgcgctgctcgcgtgaggcgntatgctcgtagtgttgtgtgtgagtagagatagatgtgcatatgtataaantagnagttaagacatacgtatactcgattaacatacaacaagangcaatacactgatcgtctctactcatcagagactgacacatngcantacactacctgcttacgcnccagtatcagcaggaatcagcagcgatagacgangcaatagtntgagagngtacaggtaaatgtatagttcagtatngactaatactttactctatacctacttcttggcactcaacgtcagtagtatacacagcacnctcagttagctcatcagccaccgagatgaccgaatgcgtctgagcatngtgacgagactatagacgtatagcagtgagtagagatgcgcggagtcagcagatgcagtacgagcgtcgctgcagtacggtactgntactgtgtagnagntgttgtagnagatgatganatagatagatcaaatcagncacactagcgagcgtgcgnantgatcacgcgacnancgccnacgtatgcacgtcttgctacgtcancaagncggctatcnagtnatgatganannatagagtgacgtgagtgatgantagagaagtgcagtntcgntgntcgatgatanagctaantgaccnagatgagcatcgcgctngcgacggcntcgcgtcgtcgtctagttttcctactggtgctccnatctctgctgcgatgggtctgtgacgtctgcgctttccgtgctgtcntactaggtgcgtcgctgatctagatacancgatgttgntgcgctcgtgctgngacgcgtaaactgatgacgacatgntgatnacngangcgacangaggtgcgcngcatgctgcaggacacgcccaaacgtaaaccacgaccancatgatgagcntaagctagtttagctngtgattntnntggatgacncaccgnncgatgaccatcactacgacgaccagntcatncactnatactgagcgggancagtncaangattcgncgatgatgcgacatacatgatcctcgaatgcgacnctgatngatgtncntacgcnacgtcggnnatcagcacactatgcaatcgactgccngnctgtagatgcnccgagtngccctgcccgatgcgtcngantactgactangcatcntcnaggtacgatcgtctacntgtactgatnactgtcatcagtcgctactngcatcgtncnatgttcatgtcgccgagtnacgncctacntangtaccantatcacctgtcttnngttgantgcngagnnantagnnatgtgatgatgactgatatccgnangcaatagtactacatctggccatncgntcgagtntgactactgactacttgcgactnccctngcgatcgtcatgctcatgtactccaatantacgtagtcgacgtaaggnnacgcatgatagtacaggacaaaccactgctgacgatcagacgatacgcngcnagnagttactgcgatcgatactctcacttaccagacgancccggatccgtagttantccantcagggcgatctcgaatgctttacccgtcacctgactcgactacntgatgcccacnangctatgtgttgnngntggnngagtaccncgncgcagnnacccaccatgcancgancattgactacccatcgatg

SEQ ID NO: 1911 - DNA, 1565 bp, Glycine max
  misc_feature (1131)..(1131): n is a, c, g, or t
  misc_feature (1439)..(1439): n is a, c, g, or t
  misc_feature (1499)..(1499): n is a, c, g, or t
  Peptide Sequence Number=SeqID_9488
  Probeset Number=SeqID_11690
tggtacttgcggcatagtgtggtcgcggtcacgcgataacttgtgatggtaacactcactacaacactccactaggagccctgaccagatatatgctccgacaacataagacacacaaagcaaagagagagcgcaggacggacggtgaggagaaagacaaagaagatatcgtgtcgcctgaccgagagtttaatatggtctcatagggtcatctaccgtttcgcaacatagttcgcaaccgcgcggtcctattctctatgctcgttctaatgtctccggtggcggcgtcgtcgagggtgcggggttttgttttcattttgatatctcgcccgcgccgatcacgtgtgcggcgtgaatattagttctgccgcgcacggggtgaatgccacagcgtcgtccacgattccgtcccgcactcgccacccatatttatgctgtacaccttattcactcctctcatctactctacatatgttagcgcttgtctcgctatatcgacgctaaagctacattactattatattgctcgtcggccgtgtgcgttttatacccatcatctttctattcaccgccaacacgcgcgccccgcgagtatagccgcgcgtgcgccggactctttttcatctgtggctataatgtatatagaatctagttcgtgtttcatggtgtgtagactccgcgacgtctccgcatgcgggtatattaatatactaggcgacacagtcgctcgcggtatctttatttaagcacgtggctgcgatacagtacgtgttcgattcacatcgtgtctgaagagcggcccgcgcgctgagtgtttagatgagtagctatgcgactgtatgcccgcattcaacagtgtgtgtgtgccgcacgctggtcttttattttacgcgcgccgcccagtctactgcgtgaagtctcttgcggcatattgtcatctttagtttcagtcgtaccaccgtactgactatggtactctgcgacaagtgaatacttggggatatatatctgatctacagtagtgcgctgatgatcttccgagccgtgatctatcctgtgcgggcctctgagttatgtgtataggagagaaagttattctcgctctcgattatcatagctgcgcgattggtngtgtatatgtatgtgatcacgacatggatgatatgcacagtacgagcatacagatatgtggagtatgcatgactggtctgccagagtatgcgcgagactagtcgcagctcgctatgtatgcagtaggatgtatacgtggggctcgatcgaccaccgagagtggggatcatggatgtctcgctcgtaattgtgttatatccccactatgctccgttttttatatgtcggcgagctagagatgtcaactgctcgagaacgaccgtgcgctgtattatattcgacccgggagttagacgacattgctgtgngttaattatagccggcattaacttgcacgcgctggtctctgtatattaagagctcgctgntatatgcggacgcgactatagccgacgagtgagactactagcggtatatctctcaccgatcgtgcc

SEQ ID NO: 1912 - DNA, 442 bp, Glycine max
  Probeset Number=SeqID_11691
gaagcccttgacttcacacacccgatctccgatcaggctcctcacgtcgcacctcacagccagccacattcagttcagttgctgagtaaaaagcttattcgcacgcatcttccttctcttatccgcttgagaaagggttttcttaagaaaagctacaactgtacgctaccaatctttgcaaggtggataatcatgtcctggaggaacacacactatgggtgcacttatcctacggtatgtgaactcactctcacgacggatatatacagcactgttgcttacgttatactgtgtattgctcattaacagtagtatgtgatccgatttgttgtcatatgccaaattgccattaaaacaccactccgaggaatgcacgttcgtggccagcgctttgttttaggtagccaggcatggaagatatttacaagatgaaccctcttct

SEQ ID NO: 1913 - DNA, 345 bp, Glycine max
  misc_feature (50)..(50): n is a, c, g, or t
  Peptide Sequence Number=SeqID_9489
  Probeset Number=SeqID_11692
gaattgacttcacaatcggatgtttcggttcttcactttccagcggctcnggcactcgaatttccttaattggatggtaaaatctaaaagatgtataggggtggaaagatttgcttgattgtgtactttaagcttttttgggccaaaaattgccccagatttggtattgcacatgcactttgtttaggttttgcacggtggcttgcagcagaggttcccatccttgttgattgtggtatgatcaagcacaaagatgacaccgcaaccacatcaactgaattttagttagcatgtcttgctaaaactgtagaagtataattttgttacctgattggtcaaaggaaa

SEQ ID NO: 1914 - DNA, 439 bp, Glycine max
  Peptide Sequence Number=SeqID_9490
  Probeset Number=SeqID_11693
aaatcttcgatggaaaatctttctcctctacgagacgacgatgaggaaaacgaagtagacgaagccaaaatgctcctcatcggtgagaacggaaccaacggtgatagcttctctcctcggtccgacggtgcaccggagctccagcattacactatccgctccatcaagtcaacggtcgtgattcgtcaactgacgtcacagggtctctccttccagctctggccagccgcttctactttcgtcgcgcttctcgataactaccgcctcgaccctgccaacagccccctcgccgcaacactctcctcgctgaaacccgccggctctactactacaccgatgaacattctcgagctcggatccggaaccggcgtcgtcggaatcgccgcggcgatcactctttccgcttccgtcacggtgacggatctcccgcacgtcctcg

SEQ ID NO: 1915 - DNA, 513 bp, Glycine max
  Peptide Sequence Number=SeqID_9491
  Probeset Number=SeqID_11694
tgtggatcaagacttgaagggcagctacgatccagctgagaaatagctgctaaagagcctgattcgacaattaagggagatgctagctgttgaataaaataattaatgttatttcatttcactcactaaaagacaaatttagtcaagtagaaaaaaagcaatatattcttgatgtttcaaagaagtgattttttaaaaaaataatttttctcactcgtgaaatgtgagatgtgcgtaagaaagagacggaaacaaagagagagaaaaaaacaaataagataggaagaaaaagaagaataaaagatgtgactggagacataaaaagaaaaggtgagtataatgaagaaaaaaaagaacaagacaagaagtaaaagaaaaagaaaaataaaagacgtggcaggagatataaaaagaaaaagtgtgtgcaaatgaaatgtaaaagacaaagatgtgagaaaatttgggttttttttttttttttataaaaaaactataacctttaaaataataatt

SEQ ID NO: 1916 - DNA, 835 bp, Glycine max
  misc_feature (2)..(2): n is a, c, g, or t
  misc_feature (5)..(5): n is a, c, g, or t
  misc_feature (29)..(29): n is a, c, g, or t
  misc_feature (32)..(32): n is a, c, g, or t
  misc_feature (45)..(45): n is a, c, g, or t
  misc_feature (427)..(428): n is a, c, g, or t
  misc_feature (454)..(454): n is a, c, g, or t
  misc_feature (456)..(456): n is a, c, g, or t
  misc_feature (481)..(481): n is a, c, g, or t
  misc_feature (483)..(483): n is a, c, g, or t
  misc_feature (489)..(489): n is a, c, g, or t
  misc_feature (495)..(495): n is a, c, g, or t
  misc_feature (505)..(505): n is a, c, g, or t
  misc_feature (512)..(513): n is a, c, g, or t
  misc_feature (525)..(525): n is a, c, g, or t
  misc_feature (527)..(527): n is a, c, g, or t
  misc_feature (533)..(533): n is a, c, g, or t
  misc_feature (539)..(540): n is a, c, g, or t
  misc_feature (543)..(543): n is a, c, g, or t
  misc_feature (545)..(545): n is a, c, g, or t
  misc_feature (548)..(548): n is a, c, g, or t
  misc_feature (551)..(551): n is a, c, g, or t
  misc_feature (555)..(556): n is a, c, g, or t
  misc_feature (558)..(558): n is a, c, g, or t
  misc_feature (562)..(562): n is a, c, g, or t
  misc_feature (564)..(564): n is a, c, g, or t
  misc_feature (568)..(569): n is a, c, g, or t
  misc_feature (572)..(572): n is a, c, g, or t
  misc_feature (579)..(579): n is a, c, g, or t
  misc_feature (581)..(581): n is a, c, g, or t
  misc_feature (585)..(585): n is a, c, g, or t
  misc_feature (589)..(589): n is a, c, g, or t
  misc_feature (591)..(593): n is a, c, g, or t
  misc_feature (600)..(835): n is a, c, g, or t
  Probeset Number=SeqID_11695
tnttnaccctgtgtaccgcgcccccctcnagncagctcgtaggcncccccccataatagtattatgctctttctctctcggctcgagttagaaaacaccctctaccgcctctaagtcctacagggacacccatcccctccccagccgctcccaaaatctcactcttcttactcttcttcctccaagagaagtaaacaaccctcacattcaccacagcagcacacactgacaaagacaaccttggttgtctccaatcaaaacctttcaagctggcgttctgagaaccaaggacaaccctgtccgagatatcaagcccaggaataggagtatcatgggtgctggaggccctgatgatgaggacaacaacaggtggccccgtggctgaagcctctgctacaagaaagtatctttggtcatgcaagcttcnngctgatccgacaagaagcgagtgcancntgggctgcttggatctggatgaacngngctttntggctntctcttcctnggctttnncattaacggtcntnagtcgngttcannatnanggnggngctnncnccgntnatgnngantaggcgntnaacnagancnnnaataggnnnnnnnnnnnnnnnnnnnnnnnnnnnnnnnnnnnnnnnnnnnnnnnnnnnnnnnnnnnnnnnnnnnnnnnnnnnnnnnnnnnnnnnnnnnnnnnnnnnnnnnnnnnnnnnnnnnnnnnnnnnnnnnnnnnnnnnnnnnnnnnnnnnnnnnnnnnnnnnnnnnnnnnnnnnnnnnnnnnnnnnnnnnnnnnnnnnnnnnnnnnnnnnnnnnnnnnnnnnnnnnnnnnnnnnnnnnn

SEQ ID NO: 1917 - DNA, 481 bp, Glycine max
  misc_feature (1)..(1): n is a, c, g, or t
  misc_feature (139)..(139): n is a, c, g, or t
  misc_feature (248)..(249): n is a, c, g, or t
  misc_feature (306)..(306): n is a, c, g, or t
  misc_feature (414)..(414): n is a, c, g, or t
  misc_feature (470)..(470): n is a, c, g, or t
  Peptide Sequence Number=SeqID_9492
  Probeset Number=SeqID_11696
ngaaaattaaaagtaaaacattagaaacaaaaaacaaatgaatatagctgctaaacttgcggataaaattttgggtgaagtccctactagcacccctgctaaaccattggtcgatgagtcaagaccaatgaaggctctngctggatgggaaagaaacatgttgaaattatttctgctcctagaccaatgatcactgatccaagagacattgtgttaaagattacagcgactactatatgtggatctgnncttgcatcttttcacaggtgctatgttagacatgcataaaggagatgtattgggacnacgaatttatgggaattgtagaagaagttggttctgaggtaaaaaatattcaacaaggacaacgagtcgtagtggctttcgatattgcttgtggtgaatgcgattatngtaaaagacaagaatatactgcttgcgacacaaccaatccttcaaaactccaagangaaatgtacgg

SEQ ID NO: 1918 - DNA, 1463 bp, Glycine max
  misc_feature (1)..(1): n is a, c, g, or t
  misc_feature (61)..(61): n is a, c, g, or t
  misc_feature (1046)..(1046): n is a, c, g, or t
  Peptide Sequence Number=SeqID_9493
  Probeset Number=SeqID_11697
ncatgcgtacgcgtcggtaccgcaatatctgtgcgctctttcatatagtgtgtagagtgancacgacgagattatactctcagtcaatgccatacttacagagcagcataggtcgcgcggcgacgtgatgacgcgcatatatagctacgcgcgcgcggcgccgttatggagatgcgaagtgaggttctataacacgccgaatctaacacgcacccgcgcggcgtcaggtgagctccgtctttccataatccgcaggagacacagtgcgcgagatttttgtgagagcggcaaacgagcgcgcccggtcacgccatattttctgacacgatagttagttgtataccattctccgcgtgcgggcggagtacgcacgtatatgtaacttccgtgtgtatcccacgcgacgcgcgtgtattatgtgcggcgcgcggtatgtttatttataatgatacatccgccgcgcccgaggcctcggaggctgcgctttttgggggtagagagcgggccacatatgcggcgcacgcgtacgcattggcacaggttgcagcaacactctgtcttacaatttccagcctaaacaggcggtggcaagtgtacgacacgagtcgatgtaacgaaaaaaggatggtacgaagctagcaatcagcgcgtttttgtctgaataatagcgtcgcgtgggttgacaacaacttttgtggtagagagatggtaagggtgggacgacacccgaatttattctagttatccgccgaccgcacaggtgatcagagcaacaaatggtgtctgggaaagtatacccgccgtgttcattttattgcccccagcgacgggttgttttttatcggagggggcagcagtaatatagaatggagggggcgaatagaatagggcgtggggaaaaagaaataaaaagatgggttatcgggcgccgggtggatcgtcttcgacaatataatatttttatatggatcagggatggcccgggttggctgggcgatgataagtttaaatgacaagagcatgtggaatataaatgtttttgtggntgggtgggggggagaggggggaacacggcacacgcggttctcaaaaaggcggggagatatcataacgggtgggtgtgaaggggggcggaatataagaaataaggggagggatggaggaatttatactgctcgaggggatgatagttgcgggtggtgggtgctgtattataattttacattgggagtaaaaagtggtcggggtgattttggtggtgagcatgggggggtggaaagagcatatcttgtggatagggggggagggaaacgaagaccccacatggcaggggcccgcgcggggacaaaacataatatcggtaatccggagcgaggaggggagtaaataagcaggacagggggcgggagggctccggcgcgtagatagccaagcggtaaatgatgggggcagtggggggcacc

SEQ ID NO: 1919 - DNA, 335 bp, Glycine max
  Probeset Number=SeqID_11698
ccttgtcaagcgcagggctgaatataaacctttgcagtttttagcctatgcctttttttataggctttttgagaagtgaaaaaccttggaatctcctgcaacccccagctacaggaaagacggtgaagacacaggcgatcgactcctcatgggaaaacgatcgcttcgatcactaggccttggttattgaatgtgtacctatttcatctttggcatacactttcattttggacataattgagtttgcaggtggttttattcctactcttgtgtacaccagtcagaagatggaactatcccctatccgtgtgaataatataatgcatgacctgcag

SEQ ID NO: 1920 - DNA, 1882 bp, Glycine max
  misc_feature (160)..(160): n is a, c, g, or t
  misc_feature (274)..(274): n is a, c, g, or t
  misc_feature (323)..(323): n is a, c, g, or t
  misc_feature (501)..(501): n is a, c, g, or t
  misc_feature (707)..(707): n is a, c, g, or t
  misc_feature (761)..(761): n is a, c, g, or t
  misc_feature (867)..(867): n is a, c, g, or t
  misc_feature (996)..(996): n is a, c, g, or t
  misc_feature (1044)..(1044): n is a, c, g, or t
  misc_feature (1064)..(1064): n is a, c, g, or t
  misc_feature (1088)..(1088): n is a, c, g, or t
  misc_feature (1091)..(1091): n is a, c, g, or t
  misc_feature (1147)..(1147): n is a, c, g, or t
  misc_feature (1162)..(1162): n is a, c, g, or t
  misc_feature (1191)..(1191): n is a, c, g, or t
  misc_feature (1259)..(1259): n is a, c, g, or t
  misc_feature (1282)..(1282): n is a, c, g, or t
  misc_feature (1286)..(1286): n is a, c, g, or t
  misc_feature (1331)..(1331): n is a, c, g, or t
  misc_feature (1333)..(1333): n is a, c, g, or t
  misc_feature (1451)..(1451): n is a, c, g, or t
  misc_feature (1463)..(1463): n is a, c, g, or t
  misc_feature (1474)..(1474): n is a, c, g, or t
  misc_feature (1508)..(1509): n is a, c, g, or t
  misc_feature (1517)..(1517): n is a, c, g, or t
  misc_feature (1596)..(1596): n is a, c, g, or t
  misc_feature (1676)..(1676): n is a, c, g, or t
  misc_feature (1794)..(1794): n is a, c, g, or t
  misc_feature (1840)..(1841): n is a, c, g, or t
  misc_feature (1844)..(1844): n is a, c, g, or t
  misc_feature (1873)..(1873): n is a, c, g, or t
  misc_feature (1875)..(1875): n is a, c, g, or t
  misc_feature (1882)..(1882): n is a, c, g, or t
  Peptide Sequence Number=SeqID_9494
  Probeset Number=SeqID_11699
ttgattgccctgttgactgtaggcggaggtgtatgcgcgacaggactatgtcgaggtagattgctacggcacgagcgctcgcgcgccttcgcacgctcgaataaccatctcactgcacggcggacgtaagacgcgccgcgaggcagtagttatatcctgnatattctgacgcgcatggactatatagatgatttgagattatgacgcagtgctaccatccgcgcagcctgacgccgtagtagttattctcgtcttttcattccctctccgccantgcccgcaatacatactcgctcgactgccgcactattatatattattcncgatgatgggcgaaaggaggcgcgaacgtgtgatatgtgcgcggcgtctctctaatcgctagtgatccgaagagatgcgcacttcggtgtgttgcgcgcgccgtatgtgaactgcctgcggcggtgatatgagcggcctccaattcacgacgatcacacagcacgcggcggtgatgtnggatcgacgatcagtggcgccgctgtgtatatcggcgcatctatcacgcgtgacgaatagagacggggaacgagcgcacagtctcgagcgtgcgcgtgacgctgtgtcgtcgcgactcgagagacgtatttatgaaataggacagataagacgagagatagtcgcagaactcacgcacagacacgcgcctcgacgtatatactctntctagtgtctctcgcgcgtcctgtgtctgtgtctcccgcagacgacgatggcgngctgcgcgcacgagagtgcgtagttgtggacgcgcaatatacatctcgcactcgtacgcgccgtcggcatacaacccgcatcgacgtcatcgccgcgttgacgttncgccggcctgcggtgtgacgatgcatcggtagcgatgtcgcggacgctgtctcgccaatatatgcgtgcggcgtcgcgtgtattaagcgatgcgtgctgtgtgtgcgagtggcatgacgcgataacgcngccacagccgcgctcatgtcactgtgtcgtcgctgtgttggtgacgantgagagacgtatcgatatgnagtatagcgctcaggcactcgccnatnatacatcacgcgatcacgcgtgcgcgcgacgcggcgacttgatgcgtatacgcgtncactcatgctgctcntgtgggtctcgatgctgcagagcgaatantcgcggcggcgcgtcgctctcaccaccgcgcaagtatacacagctatagactgtggcgcgtcacagantcatgctatgtctctcgcatctngatntggccacagcgtcgcgcccgctccgacatatcacactaccgcgcntnattagttatgcgcgtgctcgatatcctgcgacccacgtgactgagcggactcataagacatgacatgttggtgcgctgtcccgtatatacgtataatcatgcgtttacgcgcccccangcgttcgtcagngcgcttcgttnagatagagcgatatatcgctgatcgagctcgganngttacggncgctgtccgcatacgcgccaacgaagcgacatacggtcgcatccatctttcatatatatatctatctacggacgcgcancgacgacgagccgagaaccgaagacagacagtgtaagtcctggtagagctaggctcgccactatcatgtcagtcgctgcncgttgcgatgcaaatcgctaggaaacatatataaatatatgtattacgtatatgcacatacgtcgatgctgcgccgcacgatagcgcactatttatcgccctctcactatctattacntgtgatatatatcatcatacattgcgcgtcgttgctgctccgtggnnctngtgtaacgagcgtcgtgcacgcgacgaancntaatgan

SEQ ID NO: 1921 - DNA, 2358 bp, Glycine max
  misc_feature (2358)..(2358): n is a, c, g, or t
  Peptide Sequence Number=SeqID_9495
  Probeset Number=SeqID_11700
gaagcagaagacccaataagaaaccacaaaccaatgactgcttaatcaatgcagcatatatgtaattaagacccggactagaatgaaaaattctgcaagaagtgtaattttgaacggagattttgatgttttataccgacagtaatcccagacataagctgtggctgacaagaaaaaaacaatggtccatgtacattctaatttgttgttatttgctgcaggtagcggctacggcctttggctgagcgggagagatatggcttggtgtctgttgtgggccccgccccgtgacaaattgcttccaacccattatacagccccgggttttttcgtttcacacccctttttggtgaccgattgccgccccagtggcccttactttttggttgggtattttttttcgaggcgtgtgctgactctgccttggggggggggaagctacgtaggccccccccccccatctctttcatactctcacgtcattatattaagctagctttgctaatattggacccttcttcaaccccaaaaatataaaaaactaaaaaaacatcaaccgaaggggtcatttctcccaatccgtttctgtttctgtcttccaggaacactgtcagtgagtgaaggatacgatgaacatcatgtctacccaccagtgtagttggcctgtgagaattcaggatcatcctgacaaaggaagtattaatagggctccattttccagaggatcagacttccttaatgttggataccatactcaaaaatatggtcatagtgccagaaaatgtaggcccgttttttccagttcagtgagcaacattacggatccttcagattcagataacactgataagaaaaaacctcagaatggtgaaatgggaggagtgaatagtgaaatgcttagagagagtctcgagaaaatagttggaaaagatgattccacgtttagtggatttgaccttgctacccttatcaggaacaaatatgggaggtcttatgatgttcagttgataaagaaggagttcatgggaagaaatctccttgcgatgaatgtcatgtggaagtacatggagcagagatccttcccattgaccgaagaagagtatattttgaggcttgatgatattgcaaacaacttaaaatgttggggagctgtgtctcatattcggaacagcctagaaaagtcgaaggaacgacctcggatagggaaggcagtaagcatttttatagatatggatgagtcgggtgctcgttccaacgagtggatctacaaatagaatgtgttactgatttgaaatcctaaagttagtcactggtttccagataacagtgaaggaaaagtccataggcagcaggtccaccacttttagtgaatttcgttagtttggaatttattacacttggatcttaacatctacagaagcttttctgacgtttctgttggcaacttggcatcaggcctaggcaactatatttttggttctgcccttctttttttcctttgttcatattgatgtaaaatgagttaatataagaaaaagcattcatattaaatttctaacaaactttctcttcaaattagaggagacactaatattaaaggtgttgtcctaagtgcatgcacattcctcgtgggaattacttgaaacatgagagaaatttgaatcctttgccagcaagtatgattatagccagctgatgctataactgcttggatagagaatacgatttttcagtgtagcttttatcaaagtagaaatttctttcgatgccaaaaaaaaaaaaaaaaaaagaaaaaaaaaaaaaaaaaaaaaataccaaaaaagaattcctgcagcccggttctaaagcgtcccggcaacgccactctccccgcaagcttaccggcggtccctacctcctggggggggcccccccccaccttaattaatccccgcctagcgacttccgggaaattcaatcctttatctgccttcccgggaacatccactaatcaccccccgggaaatctgcggatccgaatcaaattccccccaaaaaataaaaacccaaaagtgtaaaaggcaaaaaccctgggggtccccatgggatgggagcaacctccacttactttggctctcggcctaccgcccccatttaggctccactatttatcatagggaaaacacccgatagtcgcccaacatgcaaataataagaataccacaaatactcacccgcgaaaaagcccccatcttcgccgaccacgaaccccacccccatttgatctcattaaatcacaccacccactttcgcctcccccaccatattccacctcacccttgcaatctagttttaactcacgcgccgttttaattgacn

SEQ ID NO: 1922 - DNA, 317 bp, Glycine max
  Peptide Sequence Number=SeqID_9496
  Probeset Number=SeqID_11701
tgtacaaagcggtgcgggactgtgtgaagagggtaatgagtgaggatgggttagtatcgtgctatagcttattataggaccactgcgttggcgaatgcaccgtcaactgctgtgcatgccacgacttctgaagcccaagaactacgtctcatggaggactcgacgcagagtgtgtataataagaggctggatagcccctccactgatgaggctggttctctcacgccggctgctgtagctaccacacacgtttgatctcacagagactcatatgccgggaccggattaagatgaatgctctaactcgatgatgtagg

SEQ ID NO: 1923 - DNA, 1612 bp, Glycine max
  misc_feature (16)..(16): n is a, c, g, or t
  misc_feature (60)..(60): n is a, c, g, or t
  misc_feature (161)..(161): n is a, c, g, or t
  misc_feature (239)..(239): n is a, c, g, or t
  misc_feature (243)..(243): n is a, c, g, or t
  misc_feature (245)..(245): n is a, c, g, or t
  misc_feature (309)..(310): n is a, c, g, or t
  misc_feature (397)..(397): n is a, c, g, or t
  misc_feature (507)..(507): n is a, c, g, or t
  misc_feature (511)..(511): n is a, c, g, or t
  misc_feature (731)..(731): n is a, c, g, or t
  misc_feature (912)..(912): n is a, c, g, or t
  misc_feature (1074)..(1074): n is a, c, g, or t
  misc_feature (1373)..(1373): n is a, c, g, or t
  misc_feature (1450)..(1450): n is a, c, g, or t
  misc_feature (1591)..(1592): n is a, c, g, or t
  Probeset Number=SeqID_11702
tagaagagaataagancatacgatgaggagatgtatcgtgagccagcgaggtctgtcatnacagtgcagcgatagaagagcagaggaagcatcatcacttagtcgctgcgatgcgcgtcacggtcgcgatagacgttatgcatatctacaggaatagagangcttccgatcgcacttgggtggcttccgtagaatcacagtgagcatagtagtgtatcacgttccgtcatatacaaganatantnttcgggtggtagtcacattgtatcatgagaggagagagtgtgtaaagtagtataggagtcgtgnnaatgtggcaagcggtcgcgtgcaaggatagataccacgagaacgtgatatacatgagcacagtgcactctacacctagagatgagcnaagcgtctagtagcatattacacagaggtatgtggcataagaatcaggtagtggagtactatcatatatgtagcgcgatgtatagtcctacgctgcgacaatgatagagngacncctctattgtgtgcaagtctgtatgcaccatatgtcgcacactatatcactatatctacatatagacacagctcagcgcatactcgaatatacatatatatagctagatagaatagtcgtcgcgggcgccaaggtaccgagacagatgatactcgtcgttctacacaagcacgtgtggagagagaccgctgatgaacagaagagactaatagcgcacggngagcgatagttccgcgtaatcgccaccgttgttaagcggagcgtcgagagagagaatccggtcgaagggagcgtagatagccggttgtcgcgaacgctctgcatgttcatgttgacacgcactcggagaacagaacaggcatgaaggcgagcagcagcgccaagccgatcccgaataactnaagagaacatagagagcgttcgcaggacgggttgccgtagcggacgcgatagagtgtacagacacaaggcatagagttaagaggtctagtcagatttgtcgggtgggactgtactgtcggtgacttcatgcgtgacgacaagtgtggatatgctctgtgtgnccggggggtcgcgtgttgccagcacatgtacgctgagacaaaactcgatagatagggtattacgatcagtcgtacgactatgcaacctggcattaatagtaaggagcgccgggtcggccgtcgcggtgatatagtaatatctggtccaatctgtttatgcattattgacctcgtaactgtagtttgatatgaagatgattaggcatagtcatactgccggaccggccagagagattgtatcgtatgacgattacggtgtaagacatagccgtagcgggatgactgtgtgatattatagntgacgagagaagaatagatcgtctgaggtcactatacatcgatatatctgcgtcgctgtacaccaacaacaagaganaagaaagaagaaggccttcaatacgtatcagcgcgtgcgcaccctgcgtaggggggggtgacgcagtctacctatcacttaaggtaacatatctagggtggtgaagggcaggaaggtgaggagggtttggcgaggaaggannggagagagtggcaggagtca

SEQ ID NO: 1924 - DNA, 825 bp, Glycine max
  misc_feature (1)..(1): n is a, c, g, or t
  misc_feature (612)..(825): n is a, c, g, or t
  Peptide Sequence Number=SeqID_9497
  Probeset Number=SeqID_11703
ncattgacagcggcacctacctgtacttgtattattttggtattcgtataaatgttttcctctttctctcttctcttctaaatctaattcgaatcttcgccagttaatagaaactcaactttgagtagataatactgctggatgtctcgtctctaattattgtatttggaaaatagttttgagttgaggatctaatcattaccagatttaatatacttggcaaatggggtctgaaggtcctacgacaccgacaacaacaattcatgtgacaggatttaagaaattccatggagtttcagagaatccaacagaaacaattgccaataatttgacggagtacatgaataagaagggtttgcccaaagggtttagtgaacgggggcggcgcaccttttctttgagacttgctgggtcaagggaacaccttggttcccactggaacccagaagattaacaaatcccgcccgttaattggcccaagggaccacctgaaatctcttcaaaatttccaattaaggaattaattttgggcctggcatttttttggcgcgtttaaaccaggggcggtgcgaacaaaagggtttttgctaataaaaaagaaacccaaccctnnnnnnnnnnnnnnnnnnnnnnnnnnnnnnnnnnnnnnnnnnnnnnnnnnnnnnnnnnnnnnnnnnnnnnnnnnnnnnnnnnnnnnnnnnnnnnnnnnnnnnnnnnnnnnnnnnnnnnnnnnnnnnnnnnnnnnnnnnnnnnnnnnnnnnnnnnnnnnnnnnnnnnnnnnnnnnnnnnnnnnnnnnnnnnnnnnnnnnnnnnnnnnnnnnnnnn

SEQ ID NO: 1925 - DNA, 1449 bp, Glycine max
  misc_feature (21)..(21): n is a, c, g, or t
  misc_feature (27)..(27): n is a, c, g, or t
  misc_feature (41)..(41): n is a, c, g, or t
  misc_feature (207)..(207): n is a, c, g, or t
  misc_feature (686)..(686): n is a, c, g, or t
  misc_feature (704)..(704): n is a, c, g, or t
  misc_feature (728)..(728): n is a, c, g, or t
  misc_feature (867)..(867): n is a, c, g, or t
  misc_feature (905)..(905): n is a, c, g, or t
  misc_feature (907)..(907): n is a, c, g, or t
  misc_feature (918)..(918): n is a, c, g, or t
  misc_feature (972)..(972): n is a, c, g, or t
  misc_feature (1077)..(1077): n is a, c, g, or t
  misc_feature (1092)..(1092): n is a, c, g, or t
  misc_feature (1141)..(1141): n is a, c, g, or t
  misc_feature (1197)..(1197): n is a, c, g, or t
  misc_feature (1260)..(1260): n is a, c, g, or t
  misc_feature (1264)..(1264): n is a, c, g, or t
  misc_feature (1316)..(1316): n is a, c, g, or t
  misc_feature (1355)..(1355): n is a, c, g, or t
  misc_feature (1367)..(1367): n is a, c, g, or t
  misc_feature (1395)..(1395): n is a, c, g, or t
  misc_feature (1407)..(1407): n is a, c, g, or t
  misc_feature (1444)..(1444): n is a, c, g, or t
  misc_feature (1449)..(1449): n is a, c, g, or t
  Peptide Sequence Number=SeqID_9498
  Probeset Number=SeqID_11704
ggaggatggtgtgcgattttntttttnctcctattcctttngccactgactttccgtttgttatggttgtcggttggatttattctgtgtgtccccccccccccctgcatacattaagagaaggaggggcggcccctcttcagggagcaaagtgtgaggcagcgagggacccctcttacgtgagagatagatatgccgaagtggganaggtgattgattgtatcgttagtaaagaatagacacacggaggaggccttcccgccatgtaccgtcgtaatatctagacttacaacacatactcgacacatatcatgtaacaatgatcaagtcatatatatgctcactctcttcccctcaccgctataagctacatattatactcgaagttaaacgcagaataagatataaattaaaagatctctatcaaataatcaatgatggatcacctcccactctcacctcatggcacgcgataaggcgatcctcacctcgtgtggtgttctattttctttgatgactcgcgccgcgcgtatgtcatcatgtgtgtatgtgtgctcgtgcacgcgcttactatctatttcataattagcgcaaccgttaaattacttaatattgactatctgcgctacgttgatttcggaaacagatcaattatatatataaaccaataagtgtgtgatgagggngttacgtagtataccgtngtagaacgcgctactcatacctantagtgagatccgatagagagcagacgtattactatgtattacttcttctctagactatgatgtatcacgatggttgtggtagtagacaagagtatagagtagtctgtggtagtgtgggatggctaacgcatgaattagnaggatatttgtcgtctcactctcacgtcctggcacgcnanctagcgcaccnacgaatatagtatagtctgtgatatgtgacgtgtgtgcgttgcgctgatatggngcatatcagcattcatcagtgactcatgttcgaagcgtagtgcgtctcgcctctcctcgatcgctctgcacgatatcactcatactgtttattagcgtgtctccntccacttacccatcnattcatacttcagtacacaatcgatgctgcgatctagttgaatctgaanactcagtcatcagacagcgtcactgacatacatgatatgcgcgatgccgcatcgcncacacgaatgatagtagtttagttaaataactataaagtgaacgagcaatggactgaatctcntaantcatatatctagcacaccgagcattagtagacacgacgcaataagcttgtcngctgcagtatatatgtatatatgagctctcaacgtagantcacctatctcntacatcatgacagctaatatctactatntctctagtcgancatgcgtcaagagacacgcgacactgacgactctatnactan

SEQ ID NO: 1926 - DNA, 726 bp, Glycine max
  Probeset Number=SeqID_11705
gccttttatttggtaggtaatatcgatgaagctactgcgaaagctacgaacttagaaatggcttgttcaggaagaccatctaattctccagaaagaatcaatttaaaccctctaattgtttctttctggagaattagatggtcttcctgaacaagccttttatcgggtaggtaatatcgatggagctactgcgaaagcttcgaacttgagaatgggggagcagtttgaagaaatgcctttgaatctttgtgtcctgcccccccatcgaattgtttgggattcggaagtgaaggaaatccttttattttttaatagcggccaaattggagtttttccaaatcttgcgcctattgccccaccggtaaatttaggtattttgagaatccgtttttttaaagcccaatggttaccgatggttttgatgggcggttttgttaaaataaccaataatgggatccctgttttagtaaatgatccggaaaagggtagtgccattgatccccaagaagccccgcaaattttttaaatagcagaagttatttttaataagggggaaggaaagacccccctcctccccccaatttagtttttagaggagttaggccccgagtagaggctttcaatgtgttttcttaccaagttgaggggtccgaatatcggaatacctaaaaaaaaaaaaaaaaaaaaaaaaaaaaaaaaaaaaaaaaaaaaaaaaccacccccccc

SEQ ID NO: 1927 - DNA, 696 bp, Glycine max
  misc_feature (637)..(696): n is a, c, g, or t
  Peptide Sequence Number=SeqID_9499
  Probeset Number=SeqID_11706
attcctcgacttaggcgttcattgttaagcccataacgaaataaacacaaagagaagtagcacatccaagaccaaagatcatcaatttcatcatcctcatcaatggctgtccaagtttatattgtgtattactcaatgtacaggcatgtggatagactagcggaagaaataaagaaaggagttgattctgtagaaggtgttgaggccaaactatggcaggtaccagagacattgccagaagaggtgcttggcaaaatgagagcaccacccaagagtgatgtgccaattattacccccaatgaactctctgaggctgatggctttgtctttggcttccccacaagatttggaatgatggcagcgcagttcaaagcatttctggatgcaactggaggcttatggaaaacacaacagcttgcaggcaagcctgctggaatcttctacagcactagttcccaaggtggtggacaagaaacaacagcgcttactgctataactcagctggttcatcatggaatgcattttgttcctttttgctactaatatggtgctggatgcttcgattttgaggagctcctaggtggaaggtatcatggttcaggaatagatgcaggttacatgtcaagaccaccaactnnnnnnnnnnnnnnnnnnnnnnnnnnnnnnnnnnnnnnnnnnnnnnnnnnnnnnnnnnnn

SEQ ID NO: 1928 - DNA, 1508 bp, Glycine max
  misc_feature (21)..(21): n is a, c, g, or t
  misc_feature (59)..(59): n is a, c, g, or t
  misc_feature (153)..(153): n is a, c, g, or t
  misc_feature (418)..(418): n is a, c, g, or t
  misc_feature (426)..(426): n is a, c, g, or t
  misc_feature (445)..(445): n is a, c, g, or t
  misc_feature (1022)..(1022): n is a, c, g, or t
  misc_feature (1175)..(1175): n is a, c, g, or t
  Peptide Sequence Number=SeqID_9500
  Probeset Number=SeqID_11707
gagatatgtcccaacgcatanctagcactactcatggcgtatgagttggtagaggtagntgtggcaaagtagagaaatagagagagcaccctcactcattcctctgtgcgcccttccgccgctcgcgcgcgccgcttgtgtgtggcggcgcgncggtgagacagatgctcgagcaatctaatcagtgtacgtacatacttccgtagagtgacgtgagctagggtgacaaaccgaacgacaaacgcatcgtctgcgagccgtatacgacgtactacgacagagaggagtgggtggaatatagagcgctggacagagcagcaacctagatcacaaacgtagactgattggtctagtacgcttatgtaatcacagacgacgcccgcacattccgcgccgggactgtgtagtatactcacantcatattnagtaccgcacgacgcgccnaccgcggccgaccaccgagcataaccgcgaatcatagatatatgagaaaactatatcttcgcgacgcagcggcgatattattttcgtgatcggtcagctacctcgtgaattgtaatggaacaggcagggcgacactgagcgactacgggacaaatgcaatagcgtatatttactgccgatagtgtatgacgaactagctcgtacgtacgagacgctgcgagcgacgcagtgtacataatagtaattaatatattaataataataccgcaccagcttacctccctgtgtcatagaactcgaccagttccggatcgtgtcgccccgcaccaatatttccacgcgcagttatatcacacgtaaccgggtgaaaccctcacctcatgctgtgtggtgccaccgacactttatgcccgtcgccggtataatgttaatctataattgtatcacgcgatgcatcgcactttatccacaacgcgatcataagaaaatgagacacagtgtgagaacaccgtcttatgatcctgtcgtcccataaaaggccggtatcttacactcatagataacatgacttgcgacngagtgtgccacacacatatcaaataagcctcaatatgtgtcgatctcacatgctatacgaatatctaacgagccgcacaccgttctacatcccgcagtagcatgttgatacgaaccgatacatcgactgctggcggtaaaacattcgtcaccnactataataatgttaccgcatactcactcccatgaacgccgcggccgtctgtacgaatacgcggcctaataacattccttcgattcaatatgatgatagattcgcgccgcccggcgagtagtcgaaaaagataacgagatcgtagatatccgttacaatattaaaaacaacggatcatcggtattgctccgggtacgcacccacttctaaatatatgtagagcactaatgtactgggatagaatatcgcgaaccgcgctcgtcacctgtgtgagtatagaggataaggatgtcatctgtctacaccgaatgtatcgcccacgacccgcactcc

SEQ ID NO: 1929 - DNA, 1526 bp, Glycine max
  misc_feature (471)..(471): n is a, c, g, or t
  misc_feature (867)..(867): n is a, c, g, or t
  misc_feature (1302)..(1302): n is a, c, g, or t
  misc_feature (1316)..(1316): n is a, c, g, or t
  misc_feature (1363)..(1363): n is a, c, g, or t
  misc_feature (1435)..(1435): n is a, c, g, or t
  misc_feature (1466)..(1466): n is a, c, g, or t
  misc_feature (1491)..(1491): n is a, c, g, or t
  Probeset Number=SeqID_11708
aggagaggagagagagtgatggtgaagatcacaccagttgacagacggtagaatgttggcgtacaggtatcggtgggaacgataatggaaaattatgtagtaattcattgatgatatatgaggaatgattctctctgacactgctgggatagcgagtatctatctgttatggaggggttacccgccgcgactgtgcgcccctcctgcattgacacatctcttaatattattttttataccaattctaaaccgaacatctcgatcgtgcgacattcaatgaggactattcccgtaacccctatccttgtgtaggaggtggtctgaaggctctgtgggtagaaggagacggagagatagcatggaaagacgaggggggagcggcggcggtcggtgcggggggtcgaacacacgcaactaccattgtgcgatggtactgcacgggtgcagttcgtacacttactgtggcgctgnctcgactccttctacgagggatggcgcgctgctgatgcatgttgataggacgcacaaggaaatgtaatgtatttctgagaaaagtgcagacggaacatgtaagaagattatgaagataatatctaatgcatcacgtgtaattgctccttcacgcatgtgcgcatggagattgcgaagtgtgtggtgctgtgatggtacagtctaccgttagtattggttaatgtatatgatatgtggtagatcgacaactgacgtgcagggctgaatgtgtgataacgtgggacgtggctgacacgctcacatactaagtataacaagtagagtggccgacagccgagccggtgatgcttgtgataggacagcacaacgttccggagttgtggcgagtgtagctangcagacacactcgggagagtgacagtacatgaatgaaggagatgtagagatatggaggtcgcgcagggataaatgagtacgactgtgcaggatgtatgagatgcggatagtgacttgacagtaatgaatacgcttgtgtacacaatggtgtgaggtgagtgagcaagacggatggaggccactctcaatccgtgcgatggactctgtcaatgagcatgtcagcgatacgatgtcgacgacatacttgatcgcgtgtcacggtaacgttgaaggagccttcagcgcgtatatgcgcgttatatagggtagcatgatgaagcgcaatcggcgactctggctaacgctgatatgagcgagcggaagactactgcgctaggtatatgtggtgcgtctagtgagtctgatatgctcactacgacagttgtggtgcgtctntatcgcgagagtcncgtacagcatcaccacgctcatacgacgtgatgagcgtgtatattgncacgtagtgacgtgctgctgagatgtgcgcgcgatagcatagtgcgagagcagtcacggccgagcgcgaganacagagctgttatagtaggatgctcacaganctgtatcgatcagcccacgtcgcanactgataagatggtacgcaaatgagttgtacatgg

SEQ ID NO: 1930 - DNA, 1956 bp, Glycine max
  misc_feature (1)..(72): n is a, c, g, or t
  misc_feature (1938)..(1956): n is a, c, g, or t
  Peptide Sequence Number=SeqID_9501
  Probeset Number=SeqID_11709
nnnnnnnnnnnnnnnnnnnnnnnnnnnnnnnnnnnnnnnnnnnnnnnnnnnnnnnnnnnnnnnnnnnnnnnntaatcactataaaataaaatcttcactatctatccttccacaagccgacacaattcaataccatttatcaaactcactcatcaattctcgtttgttctcactaactattacttcatcatgtcgtcgagcacatgttgggcaagtcatcaaatgcaaagctgcgcgtttcatgggaggcagggaagccacttgtgattgaagaagtagaggtggcaccaccacaagctggtgaagtgcgtttgaagatcctctacacctctctttgccacactgatgtttacttctgggaagccaagggccaaactccattgtttcctcgtatatttggtcatgaagctggagggattgtggagagcgtaggtgagggtgtgactcatctcaaaccaggggaccatgccctcccagtgtttaccggggagtgtggagaatgccctcattgcaagtcagaggagagcaacatgtgtgatcttctcaggatcaacactgataggggtgtcatgatccatgacagccaaacaaggaatttataattaagagggacacagcagttttatatcccattttgtggggtacaaattggctttgcagtgaatacaagctgttgattcatagccggatgtgttgacaaagtcaatccatgcttgtccgacatgacaaaaatattgtgttgtgaaagtagtggtaagtcgggaatgattgtagctgacttgaaagttgaaactgaagatgggagaagcaacagaaagatatgcagttgtgacgggtgcaaataaaggaattggtttagagatagttagacacgttagcttcagctggaatcaaagtgttgctcacagcaagaaatgtttatgaagggtctccaagcactggaaacaactttaagatctcaggtctatccgaccctataaggtcttgataaggtggatctggagtgatgtaataaatttagcgtatttgggaggatgttggcaaatttgaatttagggaacttgatatactgattaagaatgcagggattgagtgcgtcagttgtaatttgatgacaactgaatttaatcacgtccgccaccatgaatcgggagtctaaactacatgataatagtaaattgaacatagcgaatactaacgggttacttgtagaataattgcaaatccagcactagacgtcttaataaactccagaatcacttatgtcgggaatgtggatatggaaaaaaccaacctttgatagatttctaatacactcattaagaaggtttttggtgtcttgcagaagaaggagtcgatagaggtactctaccagtaaaggatgctaaacttaaatgaatccaatagttggatgaaatattgcctcttgattgtctgaggtttcgaaaaaggttgacgaagaaaataaagtatggtgtaataatatgatttaaaacaatgtcgacaaagtcactatgagtgcatctacttgaatttgttagtagagaaagccttcactatgaatgaatagtttttgcactggttatgtcaagatagaaatgactgccaacaccggcttcttaacagttgatgaatgtgctgctagtcctgtgagtctagcactgcttcccattggtagtccatcaggcttcttcttttacaggagtgatgtggcttccttttgattagtaatgcaatgttatgcttttgtttgtcaatttactcaattctaaattacacacaaatgtttattgaggctactttaagcacattatatcatgttgtttacttctatttaatttttctcattaggaagtaggcacagaaggttgtggagctccccatttttggatttgaaattgattgcttgatttgagttcgaagttgagttggcaaaannnnnnnnnnnnnnnnnnn

SEQ ID NO: 1931 - DNA, 280 bp, Glycine max
  Peptide Sequence Number=SeqID_9502
  Probeset Number=SeqID_11710
cctccatccacaaggcacacattctgtgtatcagatataacatgcgcactcgtacctcgctaatattccatactacaaaaaacatggatatggggtggagaaatctaactcgaccttgtatgatgaatgggttaacaaggccaatgcaccagcactgcccgagactcttaagaattacaacacgctggagtcttttggcttcaacattatattcttgtcatgaagaacactggacatacacgccgtaacagaagcaaacttatagaaggctggctaccac

SEQ ID NO: 1932 - DNA, 1498 bp, Glycine max
  misc_feature (359)..(359): n is a, c, g, or t
  misc_feature (361)..(361): n is a, c, g, or t
  misc_feature (544)..(544): n is a, c, g, or t
  misc_feature (771)..(771): n is a, c, g, or t
  misc_feature (890)..(890): n is a, c, g, or t
  misc_feature (1017)..(1017): n is a, c, g, or t
  misc_feature (1253)..(1253): n is a, c, g, or t
  misc_feature (1317)..(1317): n is a, c, g, or t
  misc_feature (1418)..(1418): n is a, c, g, or t
  misc_feature (1481)..(1481): n is a, c, g, or t
  misc_feature (1485)..(1485): n is a, c, g, or t
  misc_feature (1488)..(1489): n is a, c, g, or t
  Peptide Sequence Number=SeqID_9503
  Probeset Number=SeqID_11711
tccggtggtgcagtcgttggttgcatatgtcgattggcagtggttctttcgttataatatcgtcagtgcgctgataaagatgataaggagataagtcgttatgtggtctgttgattataatgtctagcttctcttgcagttagtacgtgtgtgtcgtgagatttcgtctaaataaggaatagcgatattacatacaagagatatgtgagtgtgacatgacgagaggcgagtaccctcgacgtaacttgagagagtgaaatatatgtactgatcggtgagtagtgggtgactcgcgatagcatagtccgtataggcgtagctagattgtctgtgaagcagtgtggatagaggatctatananaattatcagacagtataatcaggtgtcaggagtaggagtgggactggagaagagagttagatgtgatatcatccatactctagcaggtgcgacgagttgtagaagtattaatatagtctcatgcagatagacaacgtgcggaggatatattgctagaaatatggatgcgaatgtcgaatgaantcactagacagttatggctgtggtatgaatgtatcgctcaatttatatataagcgcggttgggtgttgtatcgaaatggagtaggtgacgactgagctggtgatcgtgcactgtcgtacagttgagtatcagtcgtttcgtattgtgagtgtcttagtttcgagtagagttttgttatgagtggctgtctctacgatgtttacgtatagctagaggccatgaaccangcaccatctcacaacaccacacccagagagcaagtcggaggtgatgtgttatggtggaatggagtgtgtatagtgtgtgtattgtttcgttgttatattgtgagtgttgttgtatctgntaacctcggctctcctctttagcttttatttcatataacatttgagctatatgtggtgaggagctcgtttgttaatgttatgtattgtaggtgttttcttcttagtgacaaaataatcacctccgcncacgacgagttataggattgggtgttggagactgtttttattatttagtacatgtgagaagtactgctgtaatatcagttaactagtatcaagatcaggattgatgtagtgtattatgttaattgtttatatggagttaagaacatctaataaatgttatgctaatctagtgtatatatattttattgtgtggagtgacgagagccataggtattgaagggtggtatagatataangatgtgtttatttattatttgtatatgcatatcttataaatttgtggggggggggagggataanagttatgttagaagttaataaaggagggaagaccgacatatcctcatctattgtattgtagtatgcgggagaagggtggggggggggaccacacagtctanctatttacacaaatgaagaaatataggatatgcgggacttacagttggagttccggaacaganaacnacnncaacataaa

SEQ ID NO: 1933 - DNA, 1769 bp, Glycine max
  misc_feature (10)..(11): n is a, c, g, or t
  misc_feature (14)..(14): n is a, c, g, or t
  misc_feature (16)..(17): n is a, c, g, or t
  misc_feature (19)..(21): n is a, c, g, or t
  misc_feature (23)..(24): n is a, c, g, or t
  misc_feature (28)..(28): n is a, c, g, or t
  misc_feature (31)..(32): n is a, c, g, or t
  misc_feature (83)..(83): n is a, c, g, or t
  misc_feature (85)..(85): n is a, c, g, or t
  misc_feature (88)..(90): n is a, c, g, or t
  misc_feature (97)..(97): n is a, c, g, or t
  misc_feature (680)..(680): n is a, c, g, or t
  misc_feature (773)..(773): n is a, c, g, or t
  misc_feature (1208)..(1208): n is a, c, g, or t
  misc_feature (1264)..(1264): n is a, c, g, or t
  misc_feature (1419)..(1419): n is a, c, g, or t
  misc_feature (1531)..(1531): n is a, c, g, or t
  misc_feature (1630)..(1630): n is a, c, g, or t
  misc_feature (1688)..(1688): n is a, c, g, or t
  Peptide Sequence Number=SeqID_9504
  Probeset Number=SeqID_11712
ttcttttttnnctntnntnnncnntttnttnntttttctcttttcttttgcgtcttcttcccttttctttcttcctccgcggncngcnnnccaaccnggcagcatgtcgcacatgatcgcgacaataactggaacatgaactttagaaagtcttgtttatcagcagagtgagcatgagcgagtgtctgagttctatttgtgaaatcacgtcatttatgattagaaggtgatcgcatcatgaactatatctaatattatcttgatcatatcagcattcttctccaaagagtattatgtatttatattaaccgcacactacttctatctaatgagtatatagtgctgaatcagttttcttgttatttatcttttatgtctattattcaatgttatatctttcaatcagtttctactcactaaatacatacaggctctcaatacaacgagatgctgacgcgaataaaccgcggaactaatcgcgcccaaccatgcacgcacgccagctggtgcgacgactagcgctccacagcccggcctgcccaagtgctattccctcgctgacctcgccctatcagccgccgtaaatcgtcgcacttccgcctcttgctcgtctcgccgctgtcgcgcatcaccaccttgcccttcgtatgacaagtagctgcatagatgctaaatcgctnactctatacatactcctaccgatgtatatagtaggttacgatttacttgaacctacacggcggctattctatatcacatccgtcgcacttcantcgcgcgatccgtcgctctctgtcttactctgtccttgtttctgtgtcgtgtgtcgattgcattggggttctgtgtctatgtttttccgcgtgctgctcgtgttggtctttctgtgtgatttctccattcatataccccatcgatgatcagctgagcagacacaaagtatacgaaatgcttatggtgattcacgctgacacgatacacgacgtgcgcgggcccgatcaccgttaagcgccatactatacaagcaatctacacatactaccgaccggcgcacgtatcaacgcactgtctgacccgctccgatagaacgacaaataatatcgaaccacgcagcactaacgaccacataaagaacgcaccgacaaaagaagacacatcataatactgatatcatctctcacatacttgttacccatagtatacggcgnacacagcggtgcctaccgatcgcctctacacacatctcacatatttataagacgancggaacaaaacaaattggaactaacttactgagaactcacgatgtcatagatacgcatcatatgagcgatagtggcatcttaactactatcgcgtattctcatatagactgctcattttgtctagtagcgcttatcgagtatcatagatattgcntatctctatcaagatgatggaatgattgcagacatgatatatgtaatagaggcgatgacactctcctccctcgagtcttgggttagtactcaatttacacggtcgctctttncttctatgcatatcaattgaccacatattctgttactattccttgctgctctagactcactcacacagatcgtacacgtggacgctcgctaaccggtangtaccagcgcgcatatgatcggatccttctattttcgagggacagagagcatcgtggntacggccagaattatgtaccgcgtgtttgccctctcctgtccagtctatagtccactatcatatatgttacttttagcgcg

SEQ ID NO: 1934 - DNA, 776 bp, Glycine max
  misc_feature (522)..(523): n is a, c, g, or t
  misc_feature (577)..(577): n is a, c, g, or t
  misc_feature (586)..(586): n is a, c, g, or t
  misc_feature (595)..(595): n is a, c, g, or t
  misc_feature (664)..(664): n is a, c, g, or t
  misc_feature (687)..(687): n is a, c, g, or t
  misc_feature (707)..(708): n is a, c, g, or t
  misc_feature (738)..(738): n is a, c, g, or t
  misc_feature (761)..(761): n is a, c, g, or t
  misc_feature (776)..(776): n is a, c, g, or t
  Probeset Number=SeqID_11713
agtctcattccgattggcactattcctctcattttctcttacggcatcatcgtccttgcctcccttaccggttttttcgaagcgttacgctccatcatcttcacttatccccaaagcactccctctgacttatggtctctgtggggtcccaacctcagtcctcagcccgggatcccaaggtagcgcgcgaactcaagtaatggttccaattccctcgccccttcctccccggggatccctcgcaacggaaagttggttttcccccccccaaaggggggggggcgggttcgaaaaaacaaaaaaaatttatttgggggccccccaaccccgttttggaaataaggcccgtcccccctaaaattttgggaagaacccccccggtaattcagtgcgtttttgaacccaaaaataaaaaggaccctgaatggggaaagaaatagagggagagggggtggaaagtacacaaacccgccctgggggagcgcctctaattgggcgagaagcgcaggccaagtaggggcnncccgggtaaaaacgagtgggagaagaagaacaattccgtgacgacgggagggcnccgcccgcngaggagagngagcaacacaaaaccactttcaggagcgcagaccgtggccaggtcgtgaggtagacgagggtcgcgtgncaaaaggacggaagaaacggganactgggcgggagggatgganncaacccacccgacacattatgagagagtangtcagtgttcagatttagaggtnctgacaaagacaacn

SEQ ID NO: 1935 - DNA, 1489 bp, Glycine max
  misc_feature (10)..(10): n is a, c, g, or t
  misc_feature (17)..(17): n is a, c, g, or t
  misc_feature (28)..(28): n is a, c, g, or t
  misc_feature (31)..(31): n is a, c, g, or t
  misc_feature (37)..(37): n is a, c, g, or t
  misc_feature (53)..(55): n is a, c, g, or t
  misc_feature (57)..(58): n is a, c, g, or t
  misc_feature (60)..(60): n is a, c, g, or t
  misc_feature (73)..(73): n is a, c, g, or t
  misc_feature (119)..(119): n is a, c, g, or t
  misc_feature (657)..(657): n is a, c, g, or t
  misc_feature (872)..(872): n is a, c, g, or t
  misc_feature (966)..(966): n is a, c, g, or t
  misc_feature (1071)..(1071): n is a, c, g, or t
  misc_feature (1118)..(1118): n is a, c, g, or t
  misc_feature (1151)..(1151): n is a, c, g, or t
  misc_feature (1198)..(1198): n is a, c, g, or t
  misc_feature (1264)..(1264): n is a, c, g, or t
  misc_feature (1304)..(1304): n is a, c, g, or t
  misc_feature (1306)..(1306): n is a, c, g, or t
  misc_feature (1349)..(1349): n is a, c, g, or t
  misc_feature (1368)..(1368): n is a, c, g, or t
  Peptide Sequence Number=SeqID_9505
  Probeset Number=SeqID_11714
cctaccccanaccaccnaaaacacaaanccnacctgnacactccccttattcnnntnntncgtttttccggtnaccaagccaaaatgggggtaacgggtgtcccccccccttcgcaggntcggatttttcatacgaatatagcgttatctttctctttttattgtttgtcagcccatatagcccccaccggcaataaccctaacaaggtcacccctacccgccgccgacccccctcacaatggttttacgtcccacaaaaaaaaagggtctggtagaattggttttaataacctttcgcgtgtcccccgccccacgggggggtccccatacagcgcgcgagatcatcgccgccccccaacgctcccaccagtaacgccaaaaacaggcctgccacgccacatataaatccacctgcgctgtctgaaacactcacaatacctcaagtcttctcttatataccctcccttacctcttttcattcatatctcccaacatctctatcatactctcctttcaggataatttcctcaccaccgtgcctcttaattttttcaatcatcaccccttagaaaagagggaccacttatcaactgtattatggtccgttcgcctacaattaaggccctgttataatatgccttccggcccccttatanctgctgttgtataagaataggggggcacaatctccctcctccactcgcgtcctccctctctcccgtacctcctggctcagcttccattctctctctattttctttgtaggaggactccttcccccgccattgttatgtgatgttatgtgtaatctctcctaatgcacacacgtgtctgcccccaaccgaagacacccaccacacaccaacacacnagaaacgagccttgctcgctttattaccttctatttcttttatgcattgctccttacaagtatacatatttgtgatgtctctgacatttggatntcgttagtgtttataacaagttgaggagagaggtagatatgaggtgagctgtatcctggtcgcgattctcaccgacttgtactagttttgccgtccgttctattntgtatacaccacttcgtatacccctgaaacaacttcaacgacacaangcgacaacggaataaagtataccccgcgcgtcncggacgcgccgcccacaccactagccacgatgcatacagtctctcgnacgcgacaatcacctccaagatgatctccgtgtctgatagcatgcgtagagacactcagagctttngaatgacattgtgaacctaccgcatattcctatgcttctngnacgatgagtccccctcccgatcaccacgtgtatccgagcgtcngctgtccgagcggcaaagngacatacaccactcttacactatcgcataatgtatatctgaatcgaaaatactcactcctaaacatcatctaatacgttagtatcacctcacatctcaccgcacctcgcgcacatcgacaa

SEQ ID NO: 1936 - DNA, 187 bp, Glycine max
  Probeset Number=SeqID_11715
tttagtaggtgtttcgttgttgttgctgttggtgtgttaatcttagtgggttcagagagctgggattggtgttaatagggggacacagtaaacacatcttttttcaccgtcgaaggtggtgaagatgcttaacgacagtggcattcataacgtgacgctctttgatgcttatgctataatctcggat

SEQ ID NO: 1937 - DNA, 1716 bp, Glycine max
  misc_feature (20)..(20): n is a, c, g, or t
  misc_feature (23)..(24): n is a, c, g, or t
  misc_feature (36)..(39): n is a, c, g, or t
  misc_feature (48)..(48): n is a, c, g, or t
  misc_feature (51)..(51): n is a, c, g, or t
  misc_feature (67)..(67): n is a, c, g, or t
  misc_feature (85)..(86): n is a, c, g, or t
  misc_feature (88)..(89): n is a, c, g, or t
  misc_feature (91)..(91): n is a, c, g, or t
  misc_feature (104)..(104): n is a, c, g, or t
  misc_feature (131)..(131): n is a, c, g, or t
  misc_feature (144)..(144): n is a, c, g, or t
  misc_feature (195)..(195): n is a, c, g, or t
  misc_feature (213)..(213): n is a, c, g, or t
  misc_feature (218)..(218): n is a, c, g, or t
  misc_feature (236)..(236): n is a, c, g, or t
  misc_feature (258)..(258): n is a, c, g, or t
  misc_feature (375)..(375): n is a, c, g, or t
  misc_feature (386)..(387): n is a, c, g, or t
  misc_feature (414)..(414): n is a, c, g, or t
  misc_feature (416)..(416): n is a, c, g, or t
  misc_feature (504)..(504): n is a, c, g, or t
  misc_feature (526)..(526): n is a, c, g, or t
  misc_feature (539)..(539): n is a, c, g, or t
  misc_feature (590)..(590): n is a, c, g, or t
  misc_feature (615)..(615): n is a, c, g, or t
  misc_feature (637)..(637): n is a, c, g, or t
  misc_feature (649)..(649): n is a, c, g, or t
  misc_feature (654)..(654): n is a, c, g, or t
  misc_feature (658)..(658): n is a, c, g, or t
  misc_feature (690)..(690): n is a, c, g, or t
  misc_feature (694)..(695): n is a, c, g, or t
  misc_feature (732)..(732): n is a, c, g, or t
  misc_feature (905)..(905): n is a, c, g, or t
  misc_feature (959)..(959): n is a, c, g, or t
  misc_feature (973)..(973): n is a, c, g, or t
  misc_feature (980)..(980): n is a, c, g, or t
  misc_feature (982)..(982): n is a, c, g, or t
  misc_feature (1079)..(1079): n is a, c, g, or t
  misc_feature (1086)..(1086): n is a, c, g, or t
  misc_feature (1088)..(1088): n is a, c, g, or t
  misc_feature (1149)..(1149): n is a, c, g, or t
  misc_feature (1283)..(1283): n is a, c, g, or t
  misc_feature (1296)..(1296): n is a, c, g, or t
  misc_feature (1602)..(1602): n is a, c, g, or t
  misc_feature (1682)..(1682): n is a, c, g, or t
  misc_feature (1689)..(1689): n is a, c, g, or t
  misc_feature (1716)..(1716): n is a, c, g, or t
  Peptide Sequence Number=SeqID_9506
  Probeset Number=SeqID_11716
gaggggtgtgtgggttggcnctnncttgtttctggnnnntcccctctngtnccatcaccggagtggngggagggggtgtgttagnncnngnaggtgagtggtgngctaactccagtaggagcgagcaacangagacaccacccntcctctagaggtggtatgactgatgcgtctggcgaggcggctcgccgcccnctcgctcctccaccaatntaatnaccatgagagcgtcgcgnttagtgtagtgtgtgtgattcntccatcatcttatcttgctccacttcatcacagtactacattatatacgaccactacatatagtcggagtatgtacaccacgctctcgactgatatcgtatctcgacacatatacancatcatactanncaaacaagacactctatagattacatnangtcacgactactctcactggtctgacgtctattctgctgttcgatccgtgcacatgtgccaatacatgattgtgtcattacagctggngagagtcgcagacagaggagangagtatgagaganatgtgaggagtaggtagtacggagcatatgcaatctccttgcgaatctatngtagagatgaaagagtgtctctcantatcttgcacagtcgctagatngtgtgagcgcgntgtgngatngtgtgtcgtggtggtgtagtgagtgtgtgcgncgtnnctcatatcgcctcagtataatactcaccttcccattncacgacctaatgctcgatatggaagtgctgtcggagacctggtgtgtgagtgagcacacacgacaagaattcatacgagaactcctcgctcctgatcatagtgtgtgtatctgtctatcgctctattctaccagtagagatgtgtagcaggcgcctgctcctctacatctctntcgatcgacaccagcacgcgagtcgctaacgacagtcgtggagtgttgtagaanaccacacccacacnacaccanancaccgcatgttgacttgctctcatgagtatatatagtgtgtgttggtatgttgagtattgtgttgtgggatagcgccgaccccacaccagcggcggngacacancnagcacaagtgtggtgtgtgatgtcgagggtatctatatgtatgcagtgtgcgagtgaggtngataggactaccacaaaccactcactacacgccgtgtcgtgagcttgcatcagacgtccgccatgagatattgcgtatgcagagtactgtaatagtatataatgaagttgacggtcgtactatcctagacgganttctacatgattnattctgtatcgatattatatatcagatgacggtgtatatagtatagcatattcttgcgttaagtatatctagcgagctatagatattatgtagtactgtctgtatagcggacatgtgtcttgtagagggagtacccgtgccagatatcttgattcggtgtgcgatgagtgtgtcggtctgcgacaatagagtacatatcactacactcgatcggactactgactatctatctcttagcacatactacttcgactcaacgtcacgtcctgtactccgatccgtgcagagcagctgtctacttgtgantagtcatcatgaactactactacgtcatgcttctcctcagtcaagacgacactgtgcatgctgcacgacgcacgggtacntgcatgnagaacaacaagactactgactcgcacn

SEQ ID NO: 1938 - DNA, 241 bp, Glycine max
  Probeset Number=SeqID_11717
ggtaccacaacactcgggggtatgtgcaacatcacaatgtcacaacttcgaatatgtgtgaatcaagaccgatgattcacccatgatcggcactcttgcaggggcaaactcattgttgaacgcattaccagatgaagtgattcatcacactttcaacctaaaaagcctgccggctaggcaaataaagaacagacaccctttcaagttcctggttccacctcatgagtctcagaagagagct

SEQ ID NO: 1939 - DNA, 1923 bp, Glycine max
  misc_feature (1)..(113): n is a, c, g, or t
  misc_feature (349)..(349): n is a, c, g, or t
  misc_feature (1557)..(1557): n is a, c, g, or t
  misc_feature (1564)..(1564): n is a, c, g, or t
  misc_feature (1572)..(1573): n is a, c, g, or t
  misc_feature (1575)..(1923): n is a, c, g, or t
  Peptide Sequence Number=SeqID_9507
  Probeset Number=SeqID_11718
nnnnnnnnnnnnnnnnnnnnnnnnnnnnnnnnnnnnnnnnnnnnnnnnnnnnnnnnnnnnnnnnnnnnnnnnnnnnnnnnnnnnnnnnnnnnnnnnnnnnnnnnnnnnnnnnntttctccgctctcgtgctagacggattctccaacactctcaccagacgtggctactctcaaagcgcaacaaggggaggagttgcctccatagcacccaaatcaggggaagacaaaggtgtctcatcatacaaggtttcctgggtgccagatcccgtcaccggttactacaaaccggaaaacatcaaggaggttgatgttgccgatttgcgtgctacccttctccgcaaaaaattcncaactaatttcccccctccagttccaactttattgtgttttttttttttttttattttttttttttttttaaatcacaactatcgtactagtattttacatttaagtgaaatatgcatatatcaataaaaaaaaaaccataaattaaaaaaagatgcatagttgattcatttataatcttaaaaataagaatgacattttccaaaaaaaaaaaaattgattacggatgggaagagggtgaggccaaggtgaaaaaaaagggtagtgtacaggtccatgtatctatataacgcagcttgttcttgttcactttccccaattttctcttgacgcagaaagaaagaaatctctttgatgggtttcccagtggggtactcggagctcctgttcccgaagcttctccttcacatcctctccctcttgggcctcctcaggaagctgatttgcagcctcctccgcttcatgggcctccacgacttcctcgagcccgacattgccgcctggcccgaaacccgaatgcccgaagaattcgagtccgtgtcggccacgctcatccgggaaatcctgccggtggtgaagttccgggagctggtggaccccccggagacgtgcgcggtgtgtctgagcgagttcgaggaaaacgatgagatcagacagctggcgaattgtcgccacatattccaccgaggatgtttggaccgttggatggggtacgatcagagaacatgccctctctgcagaatgccctttatacccgacgaaatgcaaggtgcttttattgagagactctgggctgcctctggtatcgctgaatatccgcatgttgctcctttctagtatcattcatatttccttattttacttttttggggaagggatatcaaaagccataaccagaagaggttcttttgatttcgtggttttttttttgtgtatgtgtatatatacagagacctctatcaattgtatatcgatttctcttagatgatggattttattagaattaggaggggaagttcatctcatattctgacctccggggcatacttgaatctaaagggtggcccgattggtcagccccagttttgtccctttaaggaggtaaatgcgcgttggagcaaactgtctccgggggaaattcccccccatcccaataaaacgggaaggtatgggattaattttgatactcatatgctctgcccactctcnttatacnattggctnnannnnnnnnnnnnnnnnnnnnnnnnnnnnnnnnnnnnnnnnnnnnnnnnnnnnnnnnnnnnnnnnnnnnnnnnnnnnnnnnnnnnnnnnnnnnnnnnnnnnnnnnnnnnnnnnnnnnnnnnnnnnnnnnnnnnnnnnnnnnnnnnnnnnnnnnnnnnnnnnnnnnnnnnnnnnnnnnnnnnnnnnnnnnnnnnnnnnnnnnnnnnnnnnnnnnnnnnnnnnnnnnnnnnnnnnnnnnnnnnnnnnnnnnnnnnnnnnnnnnnnnnnnnnnnnnnnnnnnnnnnnnnnnnnnnnnnnnnnnnnnnnnnnnnnnnnnnnnnnnnnnnnnnnnnnnnnnnnnnnnnnnnnnnn

SEQ ID NO: 1940 - DNA, 1021 bp, Glycine max
  Peptide Sequence Number=SeqID_9508
  Probeset Number=SeqID_11719
acgaggagagagagagagagagagagagagagagagagagagagagagagagagagagagagagagagagagagctccaattcgtgccactctcttcaaaatggccgttaccttctcaaatctccacacagaatcaggtctcaagtccctcgacgacttcctctctgggaaggtctacgtttctggggatcagttcacaaaggacgacatcaaagtgtatggtgctgttttggagaagccaggtgactcttttcccaatgctgccaagtggtacgaggttgtctcatctcagcttgctgcaagcttccccggcaatgctcaaggggtgagattcagtggcaaagcttctgctccagcggaggctgctcctgcgaaaccggatgcttctgctgctgaagatgatgatgaccttgatctctttggcgatgagactgaggaagccaaaaaggcaccagaaggagaggggggctgctaagaagtctcccaagaagaaagagagtggcacatcttctgttctgcttgacggtaacccttgggatgatgacccccccgtggaaaaagctgggagaggctggttcgcagtggttaggatgccctggtctattgtggggagacatcccaacgggcgccctgttggttatgggatcaaaaagtttcagatcattttaactattgtcgatgcccttgtatttgtggacccccttgttgaggagactttcccagttttgccccccaaagagtatgtccaaaactgtgacattgttgccttcaacaaaatttgggggttcatgttgaattcccgccctttttaaacagccaattagtttgtttttttttaaaaaaaaattccttttaacttattcatgtttagtttatgtttcaaaaaaggttttgttactagaattttgagaagtaaaaaaaatattttttgaataaaaaaaaaaaaaaaaaaaaaaaaaaaaaaaaaaaaaaaaaaaaaaaaaaaaaaaaaaaaaaaaaaaaaaaaaaaaaagaatatagt

SEQ ID NO: 1941 - DNA, 1458 bp, Glycine max
  misc_feature (17)..(19): n is a, c, g, or t
  misc_feature (21)..(22): n is a, c, g, or t
  misc_feature (24)..(26): n is a, c, g, or t
  misc_feature (58)..(58): n is a, c, g, or t
  misc_feature (65)..(65): n is a, c, g, or t
  misc_feature (68)..(69): n is a, c, g, or t
  misc_feature (83)..(84): n is a, c, g, or t
  misc_feature (86)..(86): n is a, c, g, or t
  misc_feature (88)..(89): n is a, c, g, or t
  misc_feature (119)..(119): n is a, c, g, or t
  misc_feature (426)..(426): n is a, c, g, or t
  misc_feature (462)..(462): n is a, c, g, or t
  misc_feature (561)..(561): n is a, c, g, or t
  misc_feature (640)..(640): n is a, c, g, or t
  misc_feature (825)..(825): n is a, c, g, or t
  misc_feature (838)..(838): n is a, c, g, or t
  misc_feature (1027)..(1027): n is a, c, g, or t
  misc_feature (1129)..(1129): n is a, c, g, or t
  misc_feature (1312)..(1312): n is a, c, g, or t
  Peptide Sequence Number=SeqID_9509
  Probeset Number=SeqID_11720
tgtggtgggaggtgggnnngnngnnnccctctctgccgcggtctctcccggccgcctnttctctnacnnctcctgccggcgcnngngnnggggcggcagaatgtgaggagtaggagcgngcacaccctctcctcataaggcaccagtatgggattatccgagataacagcctctcttctcttctatatttctcttccttccgcgcgtgtgtgcggatagggacgcgccgacccgtgtgtcttctctactctcgggagcgccagcgtgaggagatgtcacgggcgcgggtgagagtgtgagagagaggagatgacatgagaacgtgagtcgagtgatagagtcaagaggaacgaagagtagcggatatcgccagcgcacagaaaagagacagagacaagcaagtggtaatcagacactagcaccgcnatgacatgcacagccgaactgagcgatctgctatangagtgctcaagagaggaagatataaatgagtatgctatatagagaaaaggtgagatgacagtagtattatgtgatggtgggagattgcctactcgccantacaggtgtagcctcctgggtgtgtcgggcccaaccaccccacgctgtcgcgtgtgttgtcacgagatataataacagncgtacgtataaatatatactatgaacatgatacacaacacacgtgatgttgtacggccgcggcatagaggccacagctgcaacgccaagacaacgtgtacaaagcacgagacacggacaagaacaagacagaacaccaacctactccacgaagattgttactcattataatccacatgctagaantgtatgagtatanctatagcaccaggctgtgtgatgtgaaagcaatcgactagatagacagggtcatgttatcgctgcacacccctcgcccacgccagcgcgttattagaggaagtataatagcccgacggcgcacgaagaaggattaagtaacagaactcagaacaggatcaccttaagagatatcaagcgacatcatgtntatgtcaatgctagccatgaagacggcgggcattgttgacgcccccggccacgcctcacccactgcgcaatagcgtgcttggacatttacatcgcgctgctntcagtcggcggtacaaaccacgcgcagcagccacgcctcggtcatactctatactgcacactatatcgtgcctccgtccgccggcatcgcgccacggcgcgcactacgacgcagcgcgacgtaggctctcatgtccacgcaatgacgctcaacatattctcgcgcaccatcccgctgagtgcntcctatcaccactcatcatacaccattcctcatatctcgtgtgcactcgatccgtatgtactatgtgcgtacgacctcgctcgtgaagcgatgactcgtggaacacatatactaagagccaggcacaccatacacacacgacgaag

SEQ ID NO: 1942 - DNA, 1801 bp, Glycine max
  misc_feature (1)..(1): n is a, c, g, or t
  misc_feature (19)..(19): n is a, c, g, or t
  misc_feature (46)..(46): n is a, c, g, or t
  misc_feature (118)..(118): n is a, c, g, or t
  misc_feature (142)..(142): n is a, c, g, or t
  misc_feature (194)..(194): n is a, c, g, or t
  misc_feature (237)..(237): n is a, c, g, or t
  misc_feature (315)..(315): n is a, c, g, or t
  misc_feature (337)..(337): n is a, c, g, or t
  misc_feature (398)..(398): n is a, c, g, or t
  misc_feature (441)..(441): n is a, c, g, or t
  misc_feature (483)..(483): n is a, c, g, or t
  misc_feature (507)..(507): n is a, c, g, or t
  misc_feature (567)..(567): n is a, c, g, or t
  misc_feature (569)..(570): n is a, c, g, or t
  misc_feature (585)..(585): n is a, c, g, or t
  misc_feature (611)..(611): n is a, c, g, or t
  misc_feature (619)..(619): n is a, c, g, or t
  misc_feature (633)..(633): n is a, c, g, or t
  misc_feature (676)..(676): n is a, c, g, or t
  misc_feature (689)..(689): n is a, c, g, or t
  misc_feature (728)..(728): n is a, c, g, or t
  misc_feature (856)..(856): n is a, c, g, or t
  misc_feature (1271)..(1271): n is a, c, g, or t
  misc_feature (1367)..(1367): n is a, c, g, or t
  misc_feature (1735)..(1735): n is a, c, g, or t
  Probeset Number=SeqID_11721
naggagagtccgcatacgnctaagagagtcgtagtagtagcatcgncgaccagtagcaacgtgtctgcgatatacaagcgtgcgagtcgagagctgtgtccatattctgagagtgagngccgcgatatagatactgatacgnatgctagtagacacatgcagcgcgccaggtcgtaggatatacactcacgcancaagatgcacacttcgtgcgcgagttttgacgagagagcccantcagacctgcgtgataccgcgtgtgtcgatggaacgcgtcatgtatgcgtacgcaattctcacactatgtcgagacgnacacgatagtgaggagaggtantagacaattcatgtgtgtgttgaaggtacctgtagacgcatgacccgtgtccacactcatngacagagttgatctcaggagcgagcgtggtcagagacgcacanagctacgacagcacgcgtctcttgtactattacactcagatncgtgcgtctgtcacagcgccgatnttacgcgacatagacatcacatacgaccatatgtgcgcaactcgttgtaagtgtgaggcntnntgtcagcgcactgancagcgagagtgacgagtagagagtgngccacagnatgtcgtgcgtctngtgtccattcgcgtgtgatagtatgtccatgagacacgcgcgntcgtgatgacaantatgagggacgtgagccaggcgcatatcgatcgctccangtatgagtcgttgtggcgtaatacgtcgttgattctctgcgctcgaagtatcagctcgacaaatgaggcttatatgttggcccgccacgagagagtgatctgcccgatccgatattcagtccgcacgntcttttggcaaggagagatgccgagaacacacgtgttcagttgcgtgattgtattatagcacacgctagaagatactccccgatccggcctctgaccgttatgcggcagcgcttgctgtgtgggctcacaaggctccgtatacgcctcacagttcgtgtagagtaatgtggcgaccatccgaggccgttacattgtcgtcgacagatgtccgatgagagcacacgcacgcacccagcaagcgtatcgcggctaagttagtagagtgataatacattcgcggtaatccgtcgtcaattttactccaacaaacgatacatctgtaggtaaggagtgtagagagatctatctatccgatccactcaatactccaacctccctgcgtgctccagaacggcggcgtgacacgatatggancgctgctcaagactcaatgcatgttcatctcgcgcctgagcgcgtacattactggggcacgtacgttcaggatagctacactcctgacgacgagtngtggtgtagcaccctcgatacgacccctcttgtatactcatagcatcgcacgaaggatgaacgatcgtctaaggtatctagccgctgacgaaaggcttagacctatgaagcaggcgagtgttggggcgtatcgattcatagttggtcgaattaagcttcatataccccacggaggtgtgtcgcctacgcagatgaaatacctggacggctcttctgcagatatgagtgcatgtgtactcagagatgagagtgggtcctgcgtgggggagagttacgctgacaagtccctcgggcgcgatcatcgtctattgataaaagaacacggccgcgccccccccgccggtggacgccgcccaacctattagcangtaggtcattgtggtgtgtagacttgagggggggggtgcgcactcaagaggggtgggtgtggaggg

SEQ ID NO: 1943 - DNA, 646 bp, Glycine max
  Peptide Sequence Number=SeqID_9510
  Probeset Number=SeqID_11722
gccactaggggaataactagtccccttttgagtaatggagaagcagttgttaattcaaacacagcaaagagctttaatactgagtatgtgcctgcaagacaactccaaaagcctgaattatcaacaagacaaggtataactttagaaaataaaaaggctatgaactccaacgaaacatatcagaaaaatgtcaagaatttctttggagtagccggagaagatagtatttgctttaagtcaaagacagccactgaaaaattcgatagatttattaagtaaacataaaggaggttttctctaatgagtataaatggagatcagagcaaccataatatactcaataaaggtgttctttagtaacctcagcctgtatataaagcagttggagtgaatagaagaactagccacttataacaattttttaaatactacagtttatatccaagaacgtttgcaaacataattatataatgcaacaataaaaataaatatggcaggtaaatagtagaagcttcctcatgtatagcgacatatataggtgtgtttttttttgctataaggagtgttatataatttttctttgtaactttttttgtaaggctatccaacgattatatgtcacatttgctttaataattcttaaacc

SEQ ID NO: 1944 - DNA, 1489 bp, Glycine max
  misc_feature (1)..(1): n is a, c, g, or t
  misc_feature (7)..(7): n is a, c, g, or t
  misc_feature (14)..(15): n is a, c, g, or t
  misc_feature (18)..(34): n is a, c, g, or t
  misc_feature (37)..(37): n is a, c, g, or t
  misc_feature (39)..(41): n is a, c, g, or t
  misc_feature (47)..(47): n is a, c, g, or t
  misc_feature (49)..(50): n is a, c, g, or t
  misc_feature (52)..(52): n is a, c, g, or t
  misc_feature (78)..(78): n is a, c, g, or t
  misc_feature (81)..(81): n is a, c, g, or t
  misc_feature (85)..(85): n is a, c, g, or t
  misc_feature (89)..(89): n is a, c, g, or t
  misc_feature (131)..(131): n is a, c, g, or t
  misc_feature (143)..(143): n is a, c, g, or t
  misc_feature (291)..(291): n is a, c, g, or t
  misc_feature (356)..(356): n is a, c, g, or t
  misc_feature (417)..(417): n is a, c, g, or t
  misc_feature (458)..(458): n is a, c, g, or t
  misc_feature (543)..(543): n is a, c, g, or t
  misc_feature (568)..(568): n is a, c, g, or t
  misc_feature (944)..(944): n is a, c, g, or t
  misc_feature (1030)..(1030): n is a, c, g, or t
  misc_feature (1102)..(1102): n is a, c, g, or t
  misc_feature (1142)..(1142): n is a, c, g, or t
  misc_feature (1261)..(1261): n is a, c, g, or t
  misc_feature (1359)..(1359): n is a, c, g, or t
  misc_feature (1436)..(1436): n is a, c, g, or t
  misc_feature (1440)..(1440): n is a, c, g, or t
  misc_feature (1447)..(1447): n is a, c, g, or t
  Probeset Number=SeqID_11723
nggtttngggggannggnnnnnnnnnnnnnnnnnaancnnngggggnannanggagagatggtgagagcgcgcaagantangggntggncgaagggtcggaggtataacgcgacacgcgtggtgggggcgncggcggttggangcgaccgtgagtggtggccgaggcgcgcggcggcgcgggtgcgagcggagaggagacggcgtggactgactttcgttgtaatatcaacccttctactaaaccaccaattgtacgtcaattcgtcatatcagttaattatttcataccnttcacattaagctcaatatactccagatacacacctaccaccctcgtctctctatatctctctcncgttgacgatctctcgcgtcccgtcctctcgtactcctttctctctttcctcgctcatccnccgctctcttcgccccactatccgtgtgttgatattgttgntcgtgattatataataatataaatagagcatatataaatgtcttatgtcgttctttatatcgttataattttctatatggacagngaattgacagcgacacgtgcgtatnagaaagcactgaagaattttacgtctcactcttttctgatgctgctttacgttcagtctcgtcagctcgtgcttctcgtcactcttctttccactctatctcctctctcgtctcactgcgagcctcgcgcgatcgatatagcgtagctggagtatgtgtggtgtcgtatagactgcgttgttcttgaccctcctcaccatctctactactacgcgtgcctacactctcacaccccgtccccgcacctctctatgtgtgttcatctgatatattgtaatggtgctagtagtatgtagtgatgacacatcacggctacgcaacattatgaccgcacacaactgccatgacacgagacggcacacacactcgcaccccncgatcagagtattctgttatatatcttcctaatcctcttcacccaccagcaacactctctctcgcgttcctcgaacacaacacaangagcaacacatgtctatctccttcactttctctctactcatcatctctactatatcgtcataagtttatctntcatacttaatcctagcgctcctctcttatccactgctcnccctcacgctgctagcagcgcgccgacctcatgatctattacattagctcttctctcttctctctccctctctcctccaactcctccagcgcgctgtcactgctcgctccctcctctcntcccctgctacgcctgacctgcttcgcgcgctctcgcctacgcagcgcggcggtagagattcgtgtggatagattgtggtgatatgtctgcttgaggnagtgtattacgaatccacgtgtgcgtgctgtccacgcctacccacacaccactgcatattgatagcaatgaactaanacangtacgtntgatgatcgtgtaacatagatcatatgcactcactaattagg

SEQ ID NO: 1945 - DNA, 479 bp, Glycine max
  Peptide Sequence Number=SeqID_9511
  Probeset Number=SeqID_11724
gcgtccgctcagcccaaggtgcttggcttaaggactcaacacagctctctgcaggcttcaaatgcaagttccttcatgatggacaagagtataccctgctgctaactgaagcctttcccgaagatgaggccctatacacctgtgaagcacgcaatgactctggaatggcttctacatcagcttcacttacagttgaagccgttgaaaaagtacttcaatataaagagatggagactgaagccaaagcttctgtactgagaacgaagattgagtctttggaggcagctgttggccattctgcagtgttcacttgtgaaacagaacctgcgccaaacttgagttttcaatggttcaagtctggtcgagaaatttatgaaagtgacaagtactctgtaaagactttcacctatgtgtctacacttgaagttctgaaagcgcaagttgttgactgtggagactacagctgcaaagatcaaaac

SEQ ID NO: 1946 - DNA, 1586 bp, Glycine max
  misc_feature (1)..(1): n is a, c, g, or t
  misc_feature (84)..(84): n is a, c, g, or t
  misc_feature (91)..(91): n is a, c, g, or t
  misc_feature (125)..(125): n is a, c, g, or t
  misc_feature (127)..(127): n is a, c, g, or t
  misc_feature (176)..(176): n is a, c, g, or t
  misc_feature (197)..(197): n is a, c, g, or t
  misc_feature (245)..(245): n is a, c, g, or t
  misc_feature (252)..(252): n is a, c, g, or t
  misc_feature (349)..(349): n is a, c, g, or t
  misc_feature (351)..(351): n is a, c, g, or t
  misc_feature (518)..(518): n is a, c, g, or t
  misc_feature (607)..(608): n is a, c, g, or t
  misc_feature (721)..(721): n is a, c, g, or t
  misc_feature (939)..(939): n is a, c, g, or t
  misc_feature (942)..(942): n is a, c, g, or t
  misc_feature (953)..(953): n is a, c, g, or t
  misc_feature (1210)..(1210): n is a, c, g, or t
  misc_feature (1336)..(1336): n is a, c, g, or t
  misc_feature (1554)..(1554): n is a, c, g, or t
  Peptide Sequence Number=SeqID_9512
  Probeset Number=SeqID_11725
ncatcgcactcatcttagctgccagtcatactcgtttgcgtatctcgaacaataagctgtgacctccatactcacggtcacacnagtcacncattcacgtcgccgtcgttctcctcttgtctcgnangctcagcatctctcatcgtcgagcgatcgctagcgcttagagacttctnccggcccgacaccgcccgctnccgctcatgtcctacccgtctcacgttgcttctacgcgatcacgaacntacatcnacacagagcgtagacagctgcgacagtccacgctaaacacaaaccaccgcacggctaccagttcatgtgcactaccctctgctctcagctgccaccnangtcctatgtcgctcatacacatgtactcctccgcgctgcgatatcataacatacgacttacggcggggcacaggctcgcagtaaatgtgattacacatacacttctgccacggcaaccgctcaagacgatagcatcatgagcgccatccgtcagcctcctacttcgntgatgcagaagagagcactgtcacttcaccaccacgcgcctcgcgacatcagcactgcgctgcacagcacagatgaacaactactacannacagcagtcagtgtctctatataatgtgcgtcaggcgatgcaactactcgagaagcgttaacacattgacatctgcgcgctcgcttgatccggaagatcttgctaagtcatcnttgtgatattgcgctcatgcatcaggcacacgtcgactcttcacagacaatactacgtgcacgacaccgcgcgcgaacgcatgtgacgatagatcatatataagcaggcggcgatgatgtagagtgctgtgtgtccgagctgttagctatatatataggtatacgtatcatgtgatcgtcttgatgctctctgctgtacgtattccacactctcgcanatntgatctcgtgntctagcagtatacaccttactacccatcgtatacttcgtattacgttgcgactcgcagacataccaccgctcacaacaccaccttcctatctcacacccgccccgcggcacgaggcctgcgcacgcacgaccgcgcgacaacgagacaggccgctccaccctcctacacttatactcaattactcgatgtcacaatctccgccacgcgcgcgccgctctacgtcatcaccctctagacagagatgtggtccgcagtngcgttcgtgtctgcgtggctgggggtcgactatatctatatcagtcctatgtcatagagagtgacatcaatcgcgtcgggcgcgcagtgggcgtggagctcataaatagtaagcgtgtaagcgaanatgcaagcgaggcgcgcgcatcgcagtcacgtgtccgatacattaatatatatcatataactagacacagcttcgccgttactgcgcgtgattgctctcgcgcgcgctacttctcatctaccttcctcgacgcttctccctacgtcgcagtgctcacgtcctctaaccacgctcgcgtctgtgtcggcgacgcgcctcctcgccaggtgcgcgagagngggctagagcgagaggagagggggggcccccc

SEQ ID NO: 1947 - DNA, 545 bp, Glycine max
  misc_feature (21)..(21): n is a, c, g, or t
  misc_feature (34)..(34): n is a, c, g, or t
  misc_feature (37)..(37): n is a, c, g, or t
  Probeset Number=SeqID_11726
tccttccccaactcccttcantggtacatgcacntantggcacactcacccaggactcatttggggattgctaggctggtggggcaccttagcccacgcatttggtgtctctagtatcccaggatttggtcccagtctcaccttgccacaagcactttcccacactagacctgatgggctaggcgcactccacagagaaggccacgcctcctttcttacctccttggtgcaccacaggttcccttaccaccccccgcaagtcagagacagatttatcgcctctctcgcctcaaataacgccgcagaagcgcaaccacccctcctcaagatgcccaatgaggggcgaatgaccccttgacgcatgatatagttaatttggtttgtgtctcagtttacctagttaagaatattatgcccaagccttattttaagagtgtgttatttaggtttttctcttgtgtaatatggatctcgtttcacttcacaagctcatgttcccctttatggtctcttattttgtaataaagtttatatattgttacttc

SEQ ID NO: 1948 - DNA, 991 bp, Glycine max
  Peptide Sequence Number=SeqID_9513
  Probeset Number=SeqID_11727
atcctctcgattgagtaaaccctaattttcccccaaaccgcagccatgaacctcccgtcctccacggcgacctcaacttcggagtcgcctgatacggcggcgggggcgatttccccggagacgtgcggcggttgcaaaagccaagactcctgggtcatacactcggctcgtctccgcggcatcctccgcttctactgcacgcactgcctcctccgcaaccacccggcgtcgttttgccccacctgcttcgccttctacgactcctccccgccgcaccagtcccgccgcgtctcctgcaacgattgcaactccgtcactcacatccactgcgcgggagacgccaagtcccctccttaccgctgtcctccgtgccgcgaccccgacggcttctccttcttccgccccatcgtcgacgaaaacggcgcccggtgcatggataaggccctctcggaggccttcctgtgcgccgcgaagatcgcggcctcgtcgatgagcaaggccgttactttcttcagaagcgaagctgagcggaaagggaaagatgccgccgtggcgaagaagagagcgcgggaggctctcgaggacgtgctcaagctcgacgagaaggctaagttggccgtttcgaagccctccgagaatagagatcagaaaccgaaacagagtcctgcttcgaatggtggtttgaaacagattgagagctctgcggccaccgcccaagtcaagaaacagagttcgtctgtagtgcaagttaagcaagagaagtgattgcttttgaatggttatcagtgaataacttgatgtatcttttgtcttgtttgtgaaaaaaaaggttcaagcttggcatattatgtttcgggttttagtgtagatttgtgtaagtggtctccttgttttttcagtttctttttgggtttgtttgctatgtgtaggagtatgtggaacagtgtgaaagtgttagatttctaattttaattgcttcatcttgtgtctc

SEQ ID NO: 1949 - DNA, 518 bp, Glycine max
  Peptide Sequence Number=SeqID_9514
  Probeset Number=SeqID_11728
gtttttgggcgcaggcaagggtagggttccccctgctggtgggttccacctcggttgaaaagcatgatttggggggccttttgttttgtaacccatttggaaaaaagcgtttttggttttgggcaattgtgggggcggccccccttttttttcctcttccgaatgggaaaagctgggcaaggcgaattttttttgaggccccaaaatttaaattttcccggggtttttcaatttagaggcggtggtttttttttagggggggccgcccatttattttttttttttttatgttttttttttttttttttttttttttttttttttttttttttttttttttttttttttttttttttttttttttttttttttttttttttaatataaaattcaattgaagattcatgcaaaataaaaaccacttcaaaatctggcattgattttacatggaaatttcccccaaattgaagggttaactatcgtgaatagactgatctttctgaaagcttgaacatcac

SEQ ID NO: 1950 - DNA, 1545 bp, Glycine max
  misc_feature (118)..(118): n is a, c, g, or t
  misc_feature (282)..(282): n is a, c, g, or t
  misc_feature (284)..(284): n is a, c, g, or t
  misc_feature (354)..(354): n is a, c, g, or t
  misc_feature (381)..(381): n is a, c, g, or t
  misc_feature (589)..(589): n is a, c, g, or t
  misc_feature (619)..(619): n is a, c, g, or t
  misc_feature (1086)..(1086): n is a, c, g, or t
  misc_feature (1198)..(1198): n is a, c, g, or t
  misc_feature (1340)..(1340): n is a, c, g, or t
  misc_feature (1394)..(1394): n is a, c, g, or t
  misc_feature (1405)..(1405): n is a, c, g, or t
  misc_feature (1446)..(1446): n is a, c, g, or t
  misc_feature (1453)..(1453): n is a, c, g, or t
  misc_feature (1501)..(1501): n is a, c, g, or t
  misc_feature (1511)..(1511): n is a, c, g, or t
  misc_feature (1518)..(1518): n is a, c, g, or t
  misc_feature (1533)..(1533): n is a, c, g, or t
  Probeset Number=SeqID_11729
atcagtgtcacgccaccgccacttagtcgtcatatgtgatcggtgtgtcagctgggctgacgatggataacgcgagttgcgctgctatgtgagtcccgaatagttacgtcagtcagtnttttctgtttccttaatttagtgtgtcactctcgcgcatcctgagtatactcatcagcaagtagtctgcgtatacctcgtctgagtcttgtgcttgttcgcagcgtcgataccatcatataaccatattagtattctcacaatcataatacgacagatagtcgnantctcttactcatcctctcgcaccaccattaacagacacgactcgcagatagtttggcgagatgtgctcgnttggtcatgtgagtgacaccgcacccnggcttacagctcatgtctgagtggctccaagcagaatacagcaatgggtgtattgtgcggtcgagaggtcctaccgctacggcatcgagccgatagctagcaagatgcacatagtctcagcaaagctagcttggacacagtgcctcgacgtgtataaaatcagcatcgcgtgtgtgggcgacgcgagagagtcacaggcccagataangtatcggagtacgctatatcttcgtccacncgcctcactacgccaacaccgccattcacagtacaactgcccacaccaccacaccatccccactctacgcctctacttcacgcacttcatctctaccaatgaggagactcaatatgcgatcatctacgtcttcgtcgcaactcgcgacaagtgagtagctggatatcatgacatatatttcatatattgacattatttatttaatagatacaagttatgattacgtaggtagggtagtatataggtaagaaaagacgacgccaattcattatcaccaatatccaagcaacaactcgccacaccaccagacacgcaccacgccacagggcgaccccaccgccgacacccccggcagcggacccgtactcacactcctttagactccgttgagggatgttgtatatgtaaataggtctcttggtggacgcgttctgcattttgttattgttgtttggttttcatttgtngtgtgtgtgtgtcgaattagctgacagaacccccatgagacgccgacaattggcggagggacgagcgcagcgcgggtgggagggaagcaggacgagggtacaaccatccagnatatcacccctacctaccccccacaatagacccacccaccactctcctacaaatacacgctactccacaccgacccacaacgcatactaactcgcttctctatctaacgttgtaattgtgttggtatgggtgcttgtccgtncgccgcattacggtgtcagaagacatagagatagcgggccaacccactgggctnccgccgtgtgntgcctatataaaaaagataggaaaacaagccactaaacttntaaagancaaactctaatggtcggacatacgggggggatgtccagcgggaggccncctctcgggnggggggnggcggggcggggggngcgggggggggg

SEQ ID NO: 1951 - DNA, 2995 bp, Glycine max
  misc_feature (1)..(376): n is a, c, g, or t
  Peptide Sequence Number=SeqID_9515
  Probeset Number=SeqID_11730
nnnnnnnnnnnnnnnnnnnnnnnnnnnnnnnnnnnnnnnnnnnnnnnnnnnnnnnnnnnnnnnnnnnnnnnnnnnnnnnnnnnnnnnnnnnnnnnnnnnnnnnnnnnnnnnnnnnnnnnnnnnnnnnnnnnnnnnnnnnnnnnnnnnnnnnnnnnnnnnnnnnnnnnnnnnnnnnnnnnnnnnnnnnnnnnnnnnnnnnnnnnnnnnnnnnnnnnnnnnnnnnnnnnnnnnnnnnnnnnnnnnnnnnnnnnnnnnnnnnnnnnnnnnnnnnnnnnnnnnnnnnnnnnnnnnnnnnnnnnnnnnnnnnnnnnnnnnnnnnnnnnnnnnnnnnnnnnnnnnnnnnnnnnnnnnnnnnnnnnnnnnnnnnnnnnnnnnnggatccatacactcccagaaaacatttttcattctatttctcagcaccagtcagcaacaacaacatccctttcctttccacaagacaccaaacaaagttcacagctttttttgttctttcacctcgattcacgaactgggtcatcctctgattgtggattattggatttcattttgagctacaccacacccccaagactttgactttcaacccaaaaccagctctttgtggtttgccaggttgccagttactgttgatatcataatggattccccacaatctgttgtgtcacccttcaggagctcagtgttgggtgagggtgagaagcacaagtctgatgttttctcaggaaactctagtcctttgtccaaggacattgaagtgaatggcaaggaagttgtcatgtcaaatgtagaggagtttcttggagtgcttgatgtttacatacatcaagccagggacattcaaaacatttgcatataccacaagcaagatgtttatgctaagatttgtctgaccagtaatcctgagaccaccatgtctaccaaaaccatcaatggaggaggaaggaaccctgttttcaacgagaatcttcgtattgatgttaggactgttgatgcatctctcaagtgtgagatatggatgcttagcagggtgaagaactaccttgaagaccagttgcttggttttgctttggtacccttgtctgaagtactggtccagaatgggaaacttgagaaagagttctctctttcttcaactgatctattccattctccttcaggttttgttcagttgtcgctttcctacactggtgcttcacctgatgttatggcaatttctgcaatgccaaacaaggtggccacagatggtaccgtgcaggactcagatacgtccgagtcactggcccgggatttagacaaaatcgagttcccagatccaaagattgtgaatgaagaccacttgatggtttcagaatacttcggcattcggtgtgaggagactcagtgttctgatagcttggctacttctgatgctgaaaatcacagttccgaagccggtgttcagcttgtggaaagcttctcagcatgcagtgttgagtctgttcagccaactaaggtcgattccccccctagcagtgtgtcgacaaatggggtttcttccccttctgtgccagcaaactcagaatcatctgatgctgctgctgctgcttctaagtctcccattcaggagcaagtttcaggcaccaaagaggacaaaaatgtggatgccaaagatggtgagagtgattcctcatgtggggttcctattgattcattccctaagcctgttgtgagtgtgaacattgagcctgagccaaaggttgtgcagcaggatatagtagacatgtacatgaaaagcatgcagcaattcactgagtcgctagcaaaaatgaagcttccgatggacttggaaagtgaaccaaccagttcaggaaattcaaccactgagcagaaactacagccatcaaagagcaataattcccgcgtgttttatggcagcagagctttcttctgatcttttgcttcccttgttcaagggaatacaggcagtcgctgtagatccttagaagaaaactgatattaagtagtgaagtgaaataatcaatgtactatcctgtgtggtttccccttctgtatttcatcacaagttggttggttgtaggttacagggaatataactttgtactctcacaagcttgttgctatcttaactgctacatgaacttttgtgttaccttcttcctttgtcgttctcttgatttggatgccaataattttgaaatcttatttcaaaaaaaaaaaaaaaaaaaaaaaaaaaaaaaaaaaaaaaaaaaaaaaaaaaaaaaaaaaaaaaaaaaaaaaaaaaaaaaaaaggggggaacgaaggaaaaagaaaaaagaaaaaaaagaggggggggcccgggccggggggggctggggtcccggggattaatttgggggggggggcggggggggggcccaattttggttatgggggggccctggggggcggggggaaccgggggcaaaagcgcacagcggggggaaaagggggccccgtgggaaggccccggggggcttaaggggggagctaaaagggggaaattggggggggccaaagggggggggtaaaaccggaaaacggggggggccacccggcgggattaagaggggaaaaaccgggggggggggggggtttattgagtggccaaggggggggggaggggggcttgggaatcggggcccaggggggggttttttttcaccaggggatgggggaagaggggaatgggcttcaacctggggggctggaggaggggaaaaggggggtacaaggggggttggccccggaggcaaaaaaacctgtttgggggagtgtagggggggaataaaaagagatctggcttagaggtgcgcgctggcccccgccggggaatcgcccggcaagccgcagcccggggatgggaagagggccctattggcccgggagcaatgtgttgttgggaacccagcatgggatgggggaaaaccggcctgggcacctatttggggggttcgggtgaaaaccgggactggg

SEQ ID NO: 1952 - DNA, 1887 bp, Glycine max
  misc_feature (1)..(1): n is a, c, g, or t
  misc_feature (18)..(18): n is a, c, g, or t
  misc_feature (58)..(58): n is a, c, g, or t
  misc_feature (70)..(70): n is a, c, g, or t
  misc_feature (106)..(106): n is a, c, g, or t
  misc_feature (109)..(109): n is a, c, g, or t
  misc_feature (119)..(119): n is a, c, g, or t
  misc_feature (137)..(137): n is a, c, g, or t
  misc_feature (183)..(183): n is a, c, g, or t
  misc_feature (193)..(193): n is a, c, g, or t
  misc_feature (252)..(252): n is a, c, g, or t
  misc_feature (287)..(287): n is a, c, g, or t
  misc_feature (309)..(309): n is a, c, g, or t
  misc_feature (321)..(321): n is a, c, g, or t
  misc_feature (333)..(333): n is a, c, g, or t
  misc_feature (369)..(369): n is a, c, g, or t
  misc_feature (520)..(520): n is a, c, g, or t
  misc_feature (712)..(712): n is a, c, g, or t
  misc_feature (715)..(715): n is a, c, g, or t
  misc_feature (785)..(785): n is a, c, g, or t
  misc_feature (809)..(809): n is a, c, g, or t
  misc_feature (832)..(832): n is a, c, g, or t
  misc_feature (840)..(840): n is a, c, g, or t
  misc_feature (842)..(842): n is a, c, g, or t
  misc_feature (926)..(926): n is a, c, g, or t
  misc_feature (953)..(953): n is a, c, g, or t
  misc_feature (956)..(956): n is a, c, g, or t
  misc_feature (965)..(965): n is a, c, g, or t
  misc_feature (967)..(967): n is a, c, g, or t
  misc_feature (986)..(986): n is a, c, g, or t
  misc_feature (996)..(996): n is a, c, g, or t
  misc_feature (1009)..(1009): n is a, c, g, or t
  misc_feature (1011)..(1011): n is a, c, g, or t
  misc_feature (1112)..(1112): n is a, c, g, or t
  misc_feature (1185)..(1185): n is a, c, g, or t
  misc_feature (1339)..(1339): n is a, c, g, or t
  misc_feature (1431)..(1431): n is a, c, g, or t
  misc_feature (1601)..(1601): n is a, c, g, or t
  misc_feature (1621)..(1621): n is a, c, g, or t
  misc_feature (1625)..(1625): n is a, c, g, or t
  misc_feature (1636)..(1636): n is a, c, g, or t
  misc_feature (1652)..(1652): n is a, c, g, or t
  misc_feature (1731)..(1731): n is a, c, g, or t
  misc_feature (1788)..(1788): n is a, c, g, or t
  misc_feature (1791)..(1793): n is a, c, g, or t
  misc_feature (1797)..(1800): n is a, c, g, or t
  misc_feature (1805)..(1805): n is a, c, g, or t
  misc_feature (1808)..(1809): n is a, c, g, or t
  misc_feature (1812)..(1816): n is a, c, g, or t
  misc_feature (1820)..(1820): n is a, c, g, or t
  misc_feature (1838)..(1838): n is a, c, g, or t
  misc_feature (1846)..(1847): n is a, c, g, or t
  misc_feature (1849)..(1849): n is a, c, g, or t
  misc_feature (1856)..(1856): n is a, c, g, or t
  misc_feature (1863)..(1863): n is a, c, g, or t
  misc_feature (1880)..(1882): n is a, c, g, or t
  misc_feature (1887)..(1887): n is a, c, g, or t
  Peptide Sequence Number=SeqID_9524
  Probeset Number=SeqID_11731
ncggatgtcgcgcgttgntcggacgcagccgtcagtgtgttgtcgccgtcatctttanttgatgtgattnacacatgcacacagtacatgagtgtagtatgctatnagnttcgcattcntcaacatcgcgcgctcantgtcagcgtacaagttgtagtaccgcgcacgcgctggtgtgtgtcngtcgtgtcgngcagtgagtgtgtcgtcgacatggtcagcgcggtacacgcgcacgatgaatacgtcgtngcatgtggccagcatggctgtactggtagtcatgnaatcatgagtagcagatcgtancaggaacgagangaccacggagcnagtcgagtgatagagtcacagagcgtctgcatgtanagtgcacgagagtcaaagcgcagagtagagatacgataggcatgatatgagagaatgttgtatgagccgcaagcgtgatgcgcacgtgcggcgatgtgatacgcgctagcagtgtgagcagcagccgtcgcatactcgcgagagtgcgctncagctgcacacacgcagataccagtatactaagacgtgtataggcggagtagtgttggcgccggggagatagatcacacaacacttgcattatagatcacagtgtacaacacactagactcgcatagatgacaagtgacactgtccgacgagacagtgtgtcgaagatggagtgagttgtgcagcgagagcncanaacactgtcgccgcacacaatatacatatgataggtccacgtgagacgcatcgcacagtggcagtgcacnatgtcgcacatcgatgtgcacgcntttgtgcgtcgcgcgtcggtgantgcatgtntngcgcatcatactgtagtgatcatgtatagcatacaagtgctcatatgaggtgagctgctgtcgcagacgccgagagcatgtgangtgaggtagacgcgttgtacatctctnccnctttcgcgncncgtacattttcgcgcgaantgtatgtatnacactgaataatntnaatagcacacagtgaaatctcacaagtgtagatacatcaaacaataataatgataaagtagatatacagactatgtatatgtgcactattactgatatctnatactagcgcgatcgagatactctgtgacgagagcgagtcgcgagagcgcggggtgccgagcggtagagacgncgggatggtgtagtgagttgaattgagtatatgagtagttatgagtagagtgtgagtatattgtatgattgtatgttgtgtgtgtggtagggagtagtgtgatggcgcgccagcgatgtgttcgtatcatgattcgttttcgcatatgctatantgttctcaatgatcattcatctcgcgacatatgtcgcggtagctgagatggctcagtggcttggatcgcatgaggtagtcgcgataataagncagcgggtatgcacagctactgacgagcacgaattacttatgtatatgttcggctgcagatgtcacagtgcgtggtcacaatctgtaggaccgcagcggtgttgagtttagacgtgatcttaggtactcggtcgatagcaagtcgattgtctcagtctcacaggcacaanattgtatgatgcgtcggctntcantgcgtccgcanacaccactcgctcggnaggtggaggcgaggtgggggggagcgcgagagctagcaaacgggacgcgaagatgggaaagcgagagagtataccgcgnggaggcggagcgagtggctagtcatggagaaattagcactgacggaacaacccacancannntaannnnacttnttnnaannnnncccnccctctccaacaaaaacnccaacaannanaaaaaanaaaaaanaacaacaaaaacaaaannnaaaan

SEQ ID NO: 1953 - DNA, 809 bp, Glycine max
  misc_feature (1)..(161): n is a, c, g, or t
  misc_feature (762)..(809): n is a, c, g, or t
  Probeset Number=SeqID_11732
nnnnnnnnnnnnnnnnnnnnnnnnnnnnnnnnnnnnnnnnnnnnnnnnnnnnnnnnnnnnnnnnnnnnnnnnnnnnnnnnnnnnnnnnnnnnnnnnnnnnnnnnnnnnnnnnnnnnnnnnnnnnnnnnnnnnnnnnnnnnnnnnnnnnnnnnnnnnnnnnngaatcttattacctttttcatttttcagagttgcggtttcttcgtcacccttggagatttcttccttcttcattttgagaggcagtgccgtggttttcttcaccagctctactatttcagttacaccttcatctccaaaacgctcatcagattcctctaagatctgtgtaatgaaagtgaacaaactgatttcagtttcgcgagggtagtagctattgaaatagacaaaatcttttgaagcatattagtagcctcctagatcaaagtctgactaaaatgggagaaatacataacaagactctttgcagaaattttttatcaaacaaaacacagcacactgattccttgcgtcaatagttacgcattgctattttttaatgaacattcaaacttatgatgtttcccgactggataggcgttccctctgtacgttctgatcaatgaccggcacaaacaccttaaggagtgacactccgtaaagcgaaggttgtttgacaaatgctccctcagcgactgccggagaatgatcggaaacgtggatgccggcggtgacggcaacgtcaattttgaagagttcaagaagatgatgactcgctcgtannnnnnnnnnnnnnnnnnnnnnnnnnnnnnnnnnnnnnnnnnnnnnnn

SEQ ID NO: 1954 - DNA, 364 bp, Glycine max
  Peptide Sequence Number=SeqID_9525
  Probeset Number=SeqID_11733
actgatttcggaaacccaaccataattggtggattgagatactgaatataaccaacgatgccatggaagacttatggactatgcctttgatgtcataatccactatggcggcattaaatctgatgaagattacccataccgggatgtcgatggtatatgcaacgcatatatgaaaaatgccctactccattctatcgatgactaccacaatgtgcctgccaataatgaaatgtccttgaaaaacgccggtgcaaatcagaccgcgaacgatgctattcaacgagggggcatgaaactccaattatacgcatctggcgtattcactgtgagatgaggaacatcactaaatcatggtgtcatggct

SEQ ID NO: 1955 - DNA, 484 bp, Glycine max
  misc_feature (21)..(21): n is a, c, g, or t
  misc_feature (105)..(105): n is a, c, g, or t
  misc_feature (247)..(247): n is a, c, g, or t
  misc_feature (295)..(295): n is a, c, g, or t
  misc_feature (374)..(374): n is a, c, g, or t
  misc_feature (383)..(383): n is a, c, g, or t
  misc_feature (389)..(390): n is a, c, g, or t
  misc_feature (393)..(393): n is a, c, g, or t
  misc_feature (407)..(407): n is a, c, g, or t
  misc_feature (452)..(452): n is a, c, g, or t
  misc_feature (458)..(460): n is a, c, g, or t
  misc_feature (469)..(470): n is a, c, g, or t
  misc_feature (472)..(472): n is a, c, g, or t
  Peptide Sequence Number=SeqID_9526
  Probeset Number=SeqID_11734
ggcaatggcaacccaagcctntctcttaaccccacccctctccggtctcaaagccagcgaccgcgcctccgtgccatggaagcaaaactccagcctctccttctncagcccgaatcctttgagggggggcagaacaatttttttttttgccgccgactagtacccagaggcaccagcaaaaggggaggctgcaccggcccccttcaccccaccagaacttgacccaaacaccccttccccgatcttngggggcagaacaagagggctcctgcgcaaggcacaggtggaggagttntatgtcattacgtgggacttacccaaagaacagatctttgaaatgcccactgggcggcgccgtttcatgagggagggtnctaaccttntaaagnnggncaggaaggagcagngcttgggtcttgggactaggctcagggccaagtaccagaaccagncccagnnntacaggggnntnccttagggggag

SEQ ID NO: 1956 - DNA, 399 bp, Glycine max
  misc_feature (9)..(9): n is a, c, g, or t
  misc_feature (258)..(258): n is a, c, g, or t
  misc_feature (260)..(260): n is a, c, g, or t
  misc_feature (268)..(268): n is a, c, g, or t
  misc_feature (348)..(348): n is a, c, g, or t
  Peptide Sequence Number=SeqID_9527
  Probeset Number=SeqID_11735
acaaagtcnataaaatcagcataaaaacgcaaaccctagtttttattttttctctctctagattaaacgagagagagagatacttttatctctttctcgctccttcgctgctgttgtttcgtccaagttgcactgcttgacctcaaacccttcttccttttgttttctttctttcccctttccttttttccacaaccagtcaggtccacgctacttgtttgtctgtatcttggaagtgagagcaaggctaggattgtntnacttgganaggagaagcgttttagaagatataaatgcctaccgatggttaattcagtgccagatttttttagcctacttcaatatatnttgttgaggatttgctattgaatcgtaataactgaagtttaaaaagaaggg

SEQ ID NO: 1957 - DNA, 1212 bp, Glycine max
  Peptide Sequence Number=SeqID_9528
  Probeset Number=SeqID_11736
gaaattttgtcaatgtttattttattagtgaagaaaatacatttaatataacattcaaaatatattttagaaatgtaaatatatctatgtcataaaaacactcaataaattcgagagaaaaacaaacaaaaaagcactatgtgtaacgaatttgaattgagattatgataatggtcattagagttgctgttttgttgagagagagaaaaaaaaaggtttgtttcttgatgctaattcaaaaccaccaaaagaaaaaaaaacacggacaaaataattttcgaatgggtataaaaaatggaatttcaaattttctccttgttttttttttctttcttttcatctttgtttttgttttcattcatctcgttttaaaatacaaaaataaaagaaaattaaatagagaaatgcaggtgcaaaaatgattttcgtaactaattcaaaagttggcttcttggagaaartcagacttgataaccaatttgttgttgttgtttttcttttcgttttcgttttgtcatattcagagcttaaatattttgttgaaacattcattgtcaaaaacttatggttgaaaattcattttattgaagattagaaccagtttakaactacttgtgtcgttggctaattcaaatgtctctctaccaaattgttggggaagaagaaaagcaccaacaccactatcgccgcaacggtatgattggtttgtaagtgtgtgtgtatgcatggcagcatgtcgcggtggtttttttcttctattttttgttttgatttcaatattttttagtcactagatccaaataattctattgatgcatttggtacgtttaaaagagatttacaaacttgatttttttagatgagaacacattggatacatgacatcacattacaaatcctctctttgttttttttattcgttatttaactcatttttgcaaacaatttgtttcgtcgcgcttacttttttgtttttattgttgttgttgttgttgttgctgttttgtgctaacattctcatataaactacatcagtataagatatatacttgtttgtttgtttttttttcattatttatttatttttattattattattactttcttgttgtttgtgtgtatgtgtgtgtgtgtttgtttgtttcattgaatttttgcgcaaagagtttcatttttctttgtaaaacttatgatttcgtttgtatgtaattt

SEQ ID NO: 1958 - DNA, 1888 bp, Glycine max
  misc_feature (58)..(58): n is a, c, g, or t
  misc_feature (88)..(88): n is a, c, g, or t
  misc_feature (123)..(123): n is a, c, g, or t
  misc_feature (190)..(190): n is a, c, g, or t
  misc_feature (195)..(195): n is a, c, g, or t
  misc_feature (202)..(202): n is a, c, g, or t
  misc_feature (210)..(210): n is a, c, g, or t
  misc_feature (286)..(286): n is a, c, g, or t
  misc_feature (303)..(303): n is a, c, g, or t
  misc_feature (381)..(381): n is a, c, g, or t
  misc_feature (418)..(419): n is a, c, g, or t
  misc_feature (598)..(598): n is a, c, g, or t
  misc_feature (608)..(608): n is a, c, g, or t
  misc_feature (610)..(610): n is a, c, g, or t
  misc_feature (753)..(753): n is a, c, g, or t
  misc_feature (776)..(776): n is a, c, g, or t
  misc_feature (794)..(794): n is a, c, g, or t
  misc_feature (797)..(797): n is a, c, g, or t
  misc_feature (837)..(837): n is a, c, g, or t
  misc_feature (892)..(892): n is a, c, g, or t
  misc_feature (1043)..(1043): n is a, c, g, or t
  misc_feature (1055)..(1055): n is a, c, g, or t
  misc_feature (1128)..(1128): n is a, c, g, or t
  misc_feature (1351)..(1351): n is a, c, g, or t
  misc_feature (1360)..(1360): n is a, c, g, or t
  misc_feature (1419)..(1419): n is a, c, g, or t
  misc_feature (1421)..(1421): n is a, c, g, or t
  misc_feature (1447)..(1447): n is a, c, g, or t
  misc_feature (1478)..(1478): n is a, c, g, or t
  misc_feature (1486)..(1486): n is a, c, g, or t
  misc_feature (1551)..(1551): n is a, c, g, or t
  misc_feature (1553)..(1553): n is a, c, g, or t
  misc_feature (1595)..(1595): n is a, c, g, or t
  misc_feature (1601)..(1601): n is a, c, g, or t
  misc_feature (1608)..(1608): n is a, c, g, or t
  misc_feature (1685)..(1685): n is a, c, g, or t
  misc_feature (1687)..(1687): n is a, c, g, or t
  misc_feature (1713)..(1713): n is a, c, g, or t
  misc_feature (1716)..(1716): n is a, c, g, or t
  misc_feature (1724)..(1725): n is a, c, g, or t
  misc_feature (1731)..(1731): n is a, c, g, or t
  misc_feature (1735)..(1735): n is a, c, g, or t
  misc_feature (1745)..(1745): n is a, c, g, or t
  misc_feature (1752)..(1754): n is a, c, g, or t
  misc_feature (1784)..(1784): n is a, c, g, or t
  misc_feature (1788)..(1788): n is a, c, g, or t
  misc_feature (1819)..(1819): n is a, c, g, or t
  misc_feature (1822)..(1822): n is a, c, g, or t
  misc_feature (1843)..(1843): n is a, c, g, or t
  misc_feature (1847)..(1847): n is a, c, g, or t
  misc_feature (1859)..(1859): n is a, c, g, or t
  Probeset Number=SeqID_11737
ggagagagacggcgactgatgtgcacactgtgatgtcattggatcggtcgcgcgatancaccacgacacagtctaaacgacaagtatnaatgtcatgagtatacatgtatagatgagactgcncgccgatacgcgttctagtatatatctatctcagctggtatccggccgcaccacttcgtgtgtttcntatantgatttngtatcgcntcccgcgtacgacgcactacgatgctcatagaccgacagcagagcgatgcgcgcccagcaagcagcgagtaggtgntgcttcgcgcacactcncaccactgtacgagtgtgtcgtgcacgctcatcgattagacgcgcacacacacacagagagatagtattgatcattcnccgcacgagcatctagtagagccatctgcgcgtaatnntgagtgagttcacaccacgcactgatctgagtgtcgtagccatacactaacaccatgcgacgatcgtagaggagcgatacaggcgcgcacggcaccagtgatgtagaaatagcagtagagagagacgtcgatcatagtgatctgactgcagcgtcgagcatcagactgaatgtggatcntgtactcgcnancaccaccaagtctcatacgatgcatactcagctctcgtgtctcacgtgatttgtctcacacacacgcacgtcacatgtgtctagtctgtctcacgcactgccgcgccggagagatatgctgagagcatgtgagacatcacgangacgtctattgggagagcgccanccgagccgagacgtatgncanttgcgtgcgatagcgcgagcacgcagcacagcaggtatgnttgtggtcgtcgacgcgcgcgctcgcgagtgcatgatgaccgaacatacaacacntcgatctacacaatgatttcacagtgcaagcggcgattggcagcatgcggcattgcgcaaccgcacgccgcagacgagattaacagcacacacgtgatcgcagcgagcgatccgcagagacgatggtggttgcgtccggcgccgtgcgttnggcgattgtctngcacggcgcgacggggtctctctatagcatcatggacatagagtcatcagcgcacgcgacacaatgcatagtngcatatgtgagacacaattccacaacgagaagtcaagagatgtacacacgagtatgttgatcaggtcgttgcgaccaccaccgagtgaagtatgacattagcgatcacacgcccacctaatctactcatcgtcacacaagatacaagtaacaacacaatcggaacaattatcaacaatattccaccgcatggtgagcgttcgtactcacactcagtaatagantatatttanttagttatcaccaactatctaaaatagtcaattcgcgaggatgtaggtgatgaaagtantngaagagagaatgtctctactctccanacgcatcgcactacagcctagctcacatttnatgcaatncgcgcacgcgcgtgagcgaggcgacctatcgtctctcgtacctcagttctgtgtttcggtctcgngntgtcgccgctcaccactacatattgtgtgtaatatgacagtnattcgnttgtgtncataccacacatcacacatcgcatcagcaagacgtgctcgccgcttagatgtgcgtgtgcatgtgtaagttgttctntnagtataaatgattcatattacagtgnganacacgtcnnctctcntccngcagcgagcnccacccnnnccactccactatctctacataccacacctnctcncccgcggactcccagctcccgacaccacctnccncacgagcgctgccctctacgngcgngcgccgcgcggngcccgctgcccccgtcgtccctcccacca

SEQ ID NO: 1959 - DNA, 1966 bp, Glycine max
  misc_feature (1)..(3): n is a, c, g, or t
  misc_feature (11)..(18): n is a, c, g, or t
  misc_feature (37)..(37): n is a, c, g, or t
  misc_feature (39)..(41): n is a, c, g, or t
  misc_feature (74)..(74): n is a, c, g, or t
  misc_feature (80)..(80): n is a, c, g, or t
  misc_feature (87)..(88): n is a, c, g, or t
  misc_feature (125)..(126): n is a, c, g, or t
  misc_feature (143)..(143): n is a, c, g, or t
  misc_feature (148)..(148): n is a, c, g, or t
  misc_feature (160)..(160): n is a, c, g, or t
  misc_feature (167)..(167): n is a, c, g, or t
  misc_feature (173)..(173): n is a, c, g, or t
  misc_feature (181)..(181): n is a, c, g, or t
  misc_feature (213)..(213): n is a, c, g, or t
  misc_feature (215)..(215): n is a, c, g, or t
  misc_feature (218)..(218): n is a, c, g, or t
  misc_feature (240)..(240): n is a, c, g, or t
  misc_feature (279)..(279): n is a, c, g, or t
  misc_feature (397)..(397): n is a, c, g, or t
  misc_feature (406)..(406): n is a, c, g, or t
  misc_feature (408)..(409): n is a, c, g, or t
  misc_feature (417)..(417): n is a, c, g, or t
  misc_feature (478)..(478): n is a, c, g, or t
  misc_feature (487)..(487): n is a, c, g, or t
  misc_feature (515)..(515): n is a, c, g, or t
  misc_feature (603)..(603): n is a, c, g, or t
  misc_feature (772)..(772): n is a, c, g, or t
  misc_feature (791)..(791): n is a, c, g, or t
  misc_feature (831)..(831): n is a, c, g, or t
  misc_feature (901)..(901): n is a, c, g, or t
  misc_feature (911)..(911): n is a, c, g, or t
  misc_feature (983)..(983): n is a, c, g, or t
  misc_feature (1069)..(1069): n is a, c, g, or t
  misc_feature (1071)..(1071): n is a, c, g, or t
  misc_feature (1078)..(1078): n is a, c, g, or t
  misc_feature (1084)..(1084): n is a, c, g, or t
  misc_feature (1145)..(1145): n is a, c, g, or t
  misc_feature (1147)..(1147): n is a, c, g, or t
  misc_feature (1168)..(1168): n is a, c, g, or t
  misc_feature (1204)..(1204): n is a, c, g, or t
  misc_feature (1208)..(1208): n is a, c, g, or t
  misc_feature (1210)..(1211): n is a, c, g, or t
  misc_feature (1223)..(1223): n is a, c, g, or t
  misc_feature (1250)..(1250): n is a, c, g, or t
  misc_feature (1260)..(1260): n is a, c, g, or t
  misc_feature (1299)..(1299): n is a, c, g, or t
  misc_feature (1302)..(1302): n is a, c, g, or t
  misc_feature (1419)..(1419): n is a, c, g, or t
  misc_feature (1470)..(1470): n is a, c, g, or t
  misc_feature (1524)..(1524): n is a, c, g, or t
  misc_feature (1591)..(1591): n is a, c, g, or t
  misc_feature (1619)..(1619): n is a, c, g, or t
  misc_feature (1626)..(1626): n is a, c, g, or t
  misc_feature (1669)..(1669): n is a, c, g, or t
  misc_feature (1680)..(1680): n is a, c, g, or t
  misc_feature (1708)..(1708): n is a, c, g, or t
  misc_feature (1726)..(1726): n is a, c, g, or t
  misc_feature (1728)..(1728): n is a, c, g, or t
  misc_feature (1768)..(1768): n is a, c, g, or t
  misc_feature (1781)..(1781): n is a, c, g, or t
  misc_feature (1789)..(1789): n is a, c, g, or t
  misc_feature (1817)..(1817): n is a, c, g, or t
  misc_feature (1828)..(1828): n is a, c, g, or t
  misc_feature (1843)..(1843): n is a, c, g, or t
  misc_feature (1888)..(1888): n is a, c, g, or t
  misc_feature (1914)..(1914): n is a, c, g, or t
  misc_feature (1927)..(1927): n is a, c, g, or t
  misc_feature (1937)..(1937): n is a, c, g, or t
  misc_feature (1964)..(1964): n is a, c, g, or t
  Peptide Sequence Number=SeqID_9529
  Probeset Number=SeqID_11738
nnngggttttnnnnnnnngggtgttgggtggtggttngnnngggtagacgcgtagccagtcgcgcagaaagganaatatnatgagtnnagagagttgcgacacaggaggtgacggtctctcaccnnaccacccccacaacccnggtgncgctcgccccgntcccgcnctacgnccttctcntccactctacgacactcataactatatgcaangncgncgcaggcaacgtcgggtagcgntctgctgagtgtcgtttagatgtgagtcaggtgagtgangagaacagcggggcgcgcaggacagtgcaagtaggagatgatagtaggaaagaggagagaaaagaaagagaacgacacatcctctccctctcccgtgtttggtgacagggtgtggggnatagtgtgntnntttttttntaatctcatttacactctcgcgtagctctatccgcgcctgtgatttgctcgtatatgtctntgatgtcangagacagacatcagaagaatcgccgacngatgctcgtatcgccgcagagactacgcagacaaacatgatgtctgtcaccaccaccgcagctcgcacgatatattgctgctctagtntgtagtgtgccgtgcgtgctaccgcaccgtctacgcgttgtagttgtgtgtggaggcgttgtttcgtctatttgcttcctcgtgtttaagattagatataataacaggacgagtgaactagacatgtgcgtagcacgcgtgtagcgcgcgtgtactgctccgcgccgtntgagctggctcagcggggncgcagatcgacgatctccttcacgcgacatgaatgaatangaagcatgcgacgatcgacgtgtgttagtgagcgtagaatagaggaagcgagtacacgcacgactatgtnagcaagatangctctcagactacatcaagatacacactccacatcatgctagacataataactagcgtcagtctcctcaccngcgtccactcaactatctatcgagacactagttctgtacgcttcattcgcactcagacatcctacacacgatagcgcgaactacantnatctgtntgacangatatatgtatatatgaggtattgtatggatgtagtaaatggagagctgtagtaatctttnangcatcttctcacgctctatcnacgacgcggatagtgtcaatcactatataaataaantgtnannagccagaaaccnagtgatagcgtgtgtgtatgcgactgnacatggatcntatcactactaccatcgcgcagtgagcgcgatgcagagntgntgagtgagcagagcggatcgtgcatgtgcacgagcacggtcgtccacgaccatgcatatcgtgctgcgtggcgcggagcctcactactgtgcagtgcgtgctgatgttgaacactcngctcacgtcggagtcagcgacacgcataataatgtgaaaaattacgatacnatgtataacagcgtacgcgcgatcgtatcacatatgatcgatgatcatggcttncatcattatcgttcgtcttatccgtcgatcctatgtaactatcatactacatacattatcgtgaccncacattcacatcaacgaccactgcatgntggttcnctgtgcgatcatcatgtgcgtgtcgatcgcgatcgcccgagtncggctacgaanagcatatgaactacgtcaacgacgcagngctatctactgcgacgantnctgtcgagtgacacgaggagtcatgaacgatggacgcttncgacagaagtganatattagnatgtgattgatatcacttactctaaacngtctgtgtgtnagcatcgttaccacntttcgtcgcgacgtcgccacgtactcaacgtcgatcatataatantacgacatcaacatcatctatcacangcacatgctactnctgacactgncacgcagactgctcagctgcctctcgncg

SEQ ID NO: 1960 - DNA, 1698 bp, Glycine max
  misc_feature (9)..(9): n is a, c, g, or t
  misc_feature (13)..(13): n is a, c, g, or t
  misc_feature (15)..(16): n is a, c, g, or t
  misc_feature (18)..(18): n is a, c, g, or t
  misc_feature (20)..(20): n is a, c, g, or t
  misc_feature (49)..(49): n is a, c, g, or t
  misc_feature (68)..(69): n is a, c, g, or t
  misc_feature (98)..(98): n is a, c, g, or t
  misc_feature (120)..(120): n is a, c, g, or t
  misc_feature (152)..(152): n is a, c, g, or t
  misc_feature (162)..(162): n is a, c, g, or t
  misc_feature (251)..(251): n is a, c, g, or t
  misc_feature (272)..(272): n is a, c, g, or t
  misc_feature (318)..(318): n is a, c, g, or t
  misc_feature (402)..(402): n is a, c, g, or t
  misc_feature (424)..(424): n is a, c, g, or t
  misc_feature (494)..(494): n is a, c, g, or t
  misc_feature (521)..(521): n is a, c, g, or t
  misc_feature (532)..(532): n is a, c, g, or t
  misc_feature (587)..(587): n is a, c, g, or t
  misc_feature (629)..(629): n is a, c, g, or t
  misc_feature (660)..(660): n is a, c, g, or t
  misc_feature (707)..(707): n is a, c, g, or t
  misc_feature (810)..(810): n is a, c, g, or t
  misc_feature (944)..(944): n is a, c, g, or t
  misc_feature (1060)..(1060): n is a, c, g, or t
  misc_feature (1123)..(1123): n is a, c, g, or t
  misc_feature (1130)..(1130): n is a, c, g, or t
  misc_feature (1146)..(1146): n is a, c, g, or t
  misc_feature (1215)..(1215): n is a, c, g, or t
  misc_feature (1248)..(1248): n is a, c, g, or t
  misc_feature (1266)..(1266): n is a, c, g, or t
  misc_feature (1315)..(1315): n is a, c, g, or t
  misc_feature (1345)..(1345): n is a, c, g, or t
  misc_feature (1572)..(1572): n is a, c, g, or t
  misc_feature (1574)..(1574): n is a, c, g, or t
  misc_feature (1605)..(1605): n is a, c, g, or t
  misc_feature (1698)..(1698): n is a, c, g, or t
  Probeset Number=SeqID_11739
ctgtttggngcgntnntncngcgcggcggcgccgcgcgtagtacctctnctctccacacacagtaccnnacacacagacactacgtcacgcgtcaacngtagcaacgctactcgcgacancagcgcgtgagcatgagttctcagtatgatgnagctactctngagtgtatgtgatagttggtgtgtggtagcttgaatatatgcttacatccgagtcttgttgtcgtctcgtggttatatatattagatgntactcgtaatatatctaacgncatgtctacagagtacgtccgtggtgcgtgtttctgtccatcacgntctcatctctcgttcgtctccgtcgtagtgtgtcggcgcgttatgtgcctctgcgaccacgtacgcatctatcgccgtagaccnctcgacgatcgctatatgattngatgtacaacgactcgatgaatgtacgtgtcgcgtcttgtcatctctatgctgatatgtacgcgctcacncagctgcatcggcgcgcttgatcgtcngctatcgactngcctatgtatacgctgtgctatgtgtctatctcgcaacatcgcctcgacgtgatncgctactcactacttctgctgttctgtactctaagtatgatngcatatgactagatcgagtgtatgatatgtngatgagattagtcttatgcttatatacgcatgctaccgatgcacatncgtatgtctcagtctcgtcagtcgctgatgtgagcacgaacgcgtatgcagagagatggcgtctacgccgcccgctagctgagtaacatggtcgctgcgttgnattcgtctctgacatcgaatacgacgacgtctatctgtgtatactgtcatatcatcctagtatatctcgctagtatagcatctgcgcgcgcatctgtcgcactacgtactctactataatgtagcgctacctcntgcgcgcatgtactcgctgttgcactctacatctgacagcttacctacagtatatactcgcgtatggacgtcatgattatgtattgatcacgtagtctgatcgtgtcttgttgtgngtgcgtcgcacgagctgtacgcatgcgcagcgtgagcgtgaactgtgtagacggacgcgaccnagctgtncgcagatacgctcggntgctatgtacactactgtgtgccgcgtatctagcgcacgtgacctatgctccatcgtcatgattcatcngctatacgcactgagtctatgagtggcactgtnctgcttactatctatgcngtattgcacttatctcactcgtcttatctgttgcgctctccctctgtcncgactaacgcatcgtgcggtgagcatgtcncttggtatatacatagcgactagctgcgatgtattcgtattgattactgatatgtactctgctcgtctagcgacatcatgatgtatcatcactcgtactctgtgagtccagatgtatagcgtcaatagtgtctcgcgtagcaggactattcacgtatgtgatctcacgtgtacactcgctctcgactattatgcgtcggatgatctctactctatctccggcgtctncnatccattcactctctaggttagttcatttantgtcagacttagcatcacttctctcgtagcgaccgcacagctctgcgtgactgtatgtgtcaatcgtagcgcactaggcgctctactgaatcn

SEQ ID NO: 1961 - DNA, 667 bp, Glycine max
  misc_feature (402)..(402): n is a, c, g, or t
  misc_feature (412)..(412): n is a, c, g, or t
  misc_feature (416)..(416): n is a, c, g, or t
  misc_feature (427)..(427): n is a, c, g, or t
  misc_feature (601)..(667): n is a, c, g, or t
  Peptide Sequence Number=SeqID_9530
  Probeset Number=SeqID_11740
gcctacttctacttccctttgttctcaaaccttatcccttatcctcccaaaaccaaaccatgtctacctccgcagcttctctcgcactcccaaccctcactctccgaactcgacaacctctctgttctccccaatgcttctcctcgtccctctccctcacccctaactccaaacccatttccatttccgccgttttcctcaaaacaacgctgtcgtcgtcgtcgccgttgtcgctgtcgtctcgcttcgttccccgtgtctctgtgttggagcaggaggaggacaccttcggcgacggagacggccccagcttctcccgcgaccttaagctctttgtcgggaatctccccttcagtgtcgacagtgcgcggctcgcggagctcttcgagagtgcggggaatngtgaggtggntgangggtctagctnaattctatcatactgcaaaggaaggccatgtccctgtggctttcagatactctataggcccttgaactttaactgatgacgcgactatgactacttcttatacatgaagagtctcgctgcatcgttggtggactgatatctccttggtaccctattatgatgtcaggtgtccannnnnnnnnnnnnnnnnnnnnnnnnnnnnnnnnnnnnnnnnnnnnnnnnnnnnnnnnnnnnnnnnnn

SEQ ID NO: 1962 - DNA, 421 bp, Glycine max
  misc_feature (23)..(23): n is a, c, g, or t
  misc_feature (41)..(41): n is a, c, g, or t
  misc_feature (135)..(135): n is a, c, g, or t
  misc_feature (137)..(137): n is a, c, g, or t
  misc_feature (251)..(251): n is a, c, g, or t
  misc_feature (341)..(341): n is a, c, g, or t
  Peptide Sequence Number=SeqID_9531
  Probeset Number=SeqID_11741
ttttttttttttttttttctttngcagcaccgactttttcnacttctttcaattttctttcaacttctctgagctgtctttcaagttgatcaacatttttttgtaactcatctctctccatctccaaatcttctngngctctttctgcattatcgacatcctccttcaactcatcaataacagatctgagttcttgaatctccttttgattcaactccaaatcctctccaaacttcactctttcttcttgngactttaagctcaaatcctcatatgcctttcttgctttttccaatgcctttgacttgccatccaattcgctcttcaattctccaagttgnccttccaattccttaatctcctgctcgtgttcttcgtttttcgcttcattctgagccgaagccgctaattctttctcctt

SEQ ID NO: 1963 - DNA, 1375 bp, Glycine max
  misc_feature (22)..(22): n is a, c, g, or t
  misc_feature (201)..(201): n is a, c, g, or t
  misc_feature (587)..(587): n is a, c, g, or t
  misc_feature (727)..(727): n is a, c, g, or t
  misc_feature (1179)..(1179): n is a, c, g, or t
  misc_feature (1324)..(1324): n is a, c, g, or t
  misc_feature (1356)..(1356): n is a, c, g, or t
  misc_feature (1375)..(1375): n is a, c, g, or t
  Peptide Sequence Number=SeqID_9532
  Probeset Number=SeqID_11742
gtggtgtgttggctggccggtnccggcgcggtcgaggcgtggagccccgcacgccgcgcggccgcggcaggaagcagtctggtgtagttaggttagggggggcatctcacctctaaaacacaacgtataagaagaggggggaggagagggccgcctcctactaagaaaagaacaaaaaacagagtatctcacctctactcntccgtttgggttgtctagcagagacatccaggctgtcaggcctccccctcgttccctattcattatcattagttaactattgttgaaaagaatcatttacgccatgtagcggtaggtgttttgccaagcctcacgaactcttgaagaaaagaatatattaatagagcctgatagtgtattaattacataatattatctacacaatctgtagttttcccacacgagtcgccgccactccttgtgtttgcatgtgacagatttttatgtcgcgccgcgcgcagtgagaccggcgggtaaggcggggagaagcagcaccatcacacgcatccacatatattatatcatccgacaatctacataaacctctcgccgacgggctcacaganaaggcggggtggagatagatggaaggatgaggagtggaatgacgcaacgtcaggacgacgtaatccgaggcgtgtcctgcgctaagacgagggttgagggagctcgtccagcgatgctcaccccgctcccggccgtaggnatacgagggaggagagttatagagatgcgcactgagatgatgcaccgaggtggtagcgagtgtacaatatgttgtcaaagacactctctcgttacgcgacgccactggtatatattgatcgcgacgggcggagcggtatgaggagcgtgcatcacgccacacgctccgctgtgctgatgtgtattgtgtgcgcgctgaggaggctacgcagcacggtgtgttgcgacggcagcacacgcgcgcgctgcgttttccgcgtgtggcgcgcggattacgcggagtgatgtgtcgcgcagctctgagtacacgagctctttaactcacctacaacacgatcatcgagataagacgcgacgtgatgaatacgagcacactgcgtagctaatatgagaggccggttgcgataggcgacgatgtgcatatagctaatcgctgcacaatcagtcatcctntcacacacgacatactagatattaaaataggtatataggagatacacacattgtatgaacgaccgacacagaataatatggatgacgtgctgcacaccgtaagtacgcttgatccgtcggagtggacatacctgtgatgtgcacncacagtattagtgtatgcactggtcgatgagncgcgcatatgtaataatan

SEQ ID NO: 1964 - DNA, 537 bp, Glycine max
  Probeset Number=SeqID_11743
gttaaaaagtcttctaaatagcccatttgccaatatccattgtatacaagatttttgagagtgccacgagcactaggagctaaagtagttagcaaaccagacactccagcaactactcctgcaggtgtactagttacaaataccaacccaagtacagttgcacttgttcctagtgcatcttttagcttactgtaatcttttttattaaagcccttatcataaatattacgctgagcagatgtcatttttctaacctggcttaaattgagagtaacccttgcagcatattctgaagaattaatattacctaaagcatgaacttgtccaacctgattagcagtcttaaatgattgaatttgtgctgataaatcagtttttgcttcgactacttgtttctttggtactttttgttcagctgctgatgcaacttcactaaacccagaaataattaatgttgttgcagcaatcaagatgacattcttaaataaactttttttactcttcatattcaatcctcctgtttttttgataccccgc

SEQ ID NO: 1965 - DNA, 2053 bp, Glycine max
  misc_feature (88)..(88): n is a, c, g, or t
  misc_feature (271)..(271): n is a, c, g, or t
  misc_feature (285)..(285): n is a, c, g, or t
  misc_feature (300)..(300): n is a, c, g, or t
  misc_feature (328)..(328): n is a, c, g, or t
  misc_feature (379)..(379): n is a, c, g, or t
  misc_feature (547)..(547): n is a, c, g, or t
  misc_feature (588)..(588): n is a, c, g, or t
  misc_feature (622)..(622): n is a, c, g, or t
  misc_feature (1059)..(1059): n is a, c, g, or t
  misc_feature (1342)..(1342): n is a, c, g, or t
  misc_feature (1454)..(1454): n is a, c, g, or t
  misc_feature (1512)..(1512): n is a, c, g, or t
  misc_feature (1707)..(1707): n is a, c, g, or t
  misc_feature (1791)..(1791): n is a, c, g, or t
  Peptide Sequence Number=SeqID_9533
  Probeset Number=SeqID_11744
gtatgccatcagtcgtcgagaatcgcagtttggtatcagtcaactctaccgtaaaccctaacaatattacctacgaaccatcgtcacnccactcataacctgctacatcgtcacctgagtatgagtagatagtgagagtcattcaacgtatgtgttagcctatcacgcgaaccaatcactacccaccacgtgactgaggcatcacgtcctactcgacctgcatagtcgtcgatatatgcagagtacagtacccccgatatactcgtagacncagcatgacaaatnactcttcgctaccanacctacttactccggcagaccacgacancagcactactatgatcacgtgtataatacatgacatgcacacaggtaacancctctgcttatcaatatcaacagtcgccgctgctctcgctattaccggagtcaggcccggtccatagtctcgtatcacacatcacgcagcgccactagcattcgctgtagtctactcgatacataacgctcatacactctccactacggcatgcatcatatcatcgcngtaagatgcactactgttatcgcgataccagcatcgtccgncattactgcggcttcacgccctatacttaatacncacactagtgtcaaatagtcgactcattccgtccatcagcgccataacactctcgcgactcccaacaagatcactctatcgctaagcgtgagtaggggactcgtacgctcacgcccacgtcgcatccagtaatcctgtcccatattcacaaccgagatgagtgtcactaagatatccgaggacacaataacattcagcaattaagcatgatgcaaccgcgcgatgaagatcacgtcacgcacctactattaccggtatacgatagtaccgcaccgcatgacgagatcgcaagcgtcgctacaccgctcatcactcactatgatcgcgccgagtggaacctaacggactgtttacgtcgatgtacacagacatatagatacgtacgcataccaccagagcatgtatagacgccacacacgcatcccgtcagacactanattaccacacctacgtcaagtcatgatctctgcgcgcactaggcgactacgacgacagcgccgggagcaatcatcgaacaggaacatatagctgaggagaggatagaaacgttacgcagacgagaggttacatatactgatgaatatccacttcacacgtggttattagctccatgatatcagagacgtagtacgtataaatgtccacatgagtatcgatattagtgaagtataaacgagacggacgtcccatacagtatcatagccacgaagagtgacaagngactatacgaattatatagagacatgaagtgatcgcgccaatgaccacatcgagggcgtcagcgctcgagttactaatatataactcaactgcattttgtctcacaacgtanccgaatgtagactatggactgcaaccatggagttaaatttccagacaactagcacgcnatcttactcgcagcatggcaagtatatgaagagcagaaccgcccatatcagacacgcatagagcacgcacacgataacacatacgcgaacacgacactgtattcgcgatcacccactatacaatcgagagtagataaggagacaagaaagtaactgtggtcagatggtgactgagtaagcaaatcagggcgagcnaaaaaactgaaatcactatacgccgtacatcacacctccatattgaggatgggtgtgttgtcggctgtccgccacagccgcgcncactcaacagcggctatctctatcgcgagatccttcatctctcacgtcggcaccggcgcgttactcctacacctcgtcttcacctccgccaccacgacgcaagcaccgacgcacacaccacatccgcctcgcccgaacacacaacaataaaaatactacactatagttctcctatcggtgtatcgatacgagagagaagtgaacatcacacgaagacagccgaagcgaagtagacggtgtaaagtatagtaggatcagtaga

SEQ ID NO: 1966 - DNA, 1554 bp, Glycine max
  misc_feature (142)..(142): n is a, c, g, or t
  misc_feature (175)..(175): n is a, c, g, or t
  misc_feature (212)..(212): n is a, c, g, or t
  misc_feature (335)..(335): n is a, c, g, or t
  misc_feature (354)..(354): n is a, c, g, or t
  misc_feature (501)..(501): n is a, c, g, or t
  misc_feature (540)..(540): n is a, c, g, or t
  misc_feature (550)..(550): n is a, c, g, or t
  misc_feature (973)..(973): n is a, c, g, or t
  misc_feature (1000)..(1000): n is a, c, g, or t
  misc_feature (1016)..(1016): n is a, c, g, or t
  misc_feature (1041)..(1041): n is a, c, g, or t
  misc_feature (1068)..(1068): n is a, c, g, or t
  misc_feature (1319)..(1319): n is a, c, g, or t
  misc_feature (1321)..(1321): n is a, c, g, or t
  misc_feature (1332)..(1332): n is a, c, g, or t
  misc_feature (1383)..(1383): n is a, c, g, or t
  misc_feature (1424)..(1424): n is a, c, g, or t
  misc_feature (1428)..(1428): n is a, c, g, or t
  misc_feature (1456)..(1456): n is a, c, g, or t
  misc_feature (1489)..(1490): n is a, c, g, or t
  misc_feature (1523)..(1526): n is a, c, g, or t
  misc_feature (1529)..(1529): n is a, c, g, or t
  misc_feature (1532)..(1536): n is a, c, g, or t
  Probeset Number=SeqID_11745
cggtgatcgtgtgttgtgtgtgctgcgcgactgtgctctgagtctgtggtgtcgacgatctgtcgcggatagcgttgtatcattagcgcgtgacgcgcgctgtatatcgcgtagagcgagccgtcacaggctgtatatcgancggcgagtcagcactcgtgtgttcgtcgtatgntgacagccgtgtaagcgtggagactagagcgagtgcntgcagaactgactctctagtcgttcgatgttatgctatattactgctgtgtatctgctgcgagctagtgtggcgtggcagtgagattcgtgggtcggtagttcgagcgtccgtcattcagtgntttgagtgctactagtgcngctctggctgtgtctcacgtacactatagaggtcttcaagatgatagatgtgtcgcgagggtgtgtgtggtgtaatcttatgtatttattcttgtcggacgtgttaattccttctatatggtcgtgcgtcatacgctgtcttctatntcatttcgggctatatcagatagtgaggtcgcagacgtngatgcggctnctctgccgccgtattgtcgattctgccgtttactgtgcgcgtggggagatacgtcctgcggcggcgcgctctctgcgaggctgcgcggtgcgacgaccagctatcttctctcgagatggtctgagtcatagtacatgctacacgatatgtatgggtgtttctctcatcatcctacagtctctgctacgtgttcgggatgtggctgcgcgcgcgctgccggctcctgtgtccgtgatgtgtcgagcccctcctgcccttttatgtctgtgtcggcggtttatactgttattatattgagtatgttgtgtatagtcttctgtggtgtaggaggtggctagaattacgtcatacccaggcgacctgtgcagccgatgcgagtccgcgagagagcgagggcgagcacgcggcgcgtgtcgtgatgtntgtccatctcttcttacgtgtagtgtnatattgtcaatctatnatacttgggtgtctgtatcatcatntctctctctcttacttgtctgtcactncttgtactacatcttagtcgagcgctgtatttgtctctattatatcttgtttcgcctatcattctcttcgtggtatgttgatgtgcgtgtgtgtttttactatatgtgcgcgtatagttactactcctacttactccccacctctcctgcgtgtgtgtatatcgcttacgctgtgctagtgtcggggcgtggcttcgtatcgagacgcggtagcgagatgcagcgttacgtgcgtagggagggaggcgggngngatcttcatgnttcatatatatatataatatatgagagactgttatgaccttgctgcttatnatatctcggcgcctactcgtgtccgttgagggctggagtanatantgatagtctattgttgtcgagagagggnggaagcggtgggagagggcacgctggaaaacanncgaagccagaaatagacacaaaacacacacacnnnngcnaannnnngggggggcaccacacacc

SEQ ID NO: 1967 - DNA, 1709 bp, Glycine max
  misc_feature (1)..(1): n is a, c, g, or t
  misc_feature (291)..(291): n is a, c, g, or t
  misc_feature (370)..(370): n is a, c, g, or t
  misc_feature (387)..(387): n is a, c, g, or t
  misc_feature (444)..(444): n is a, c, g, or t
  misc_feature (486)..(486): n is a, c, g, or t
  misc_feature (816)..(816): n is a, c, g, or t
  misc_feature (865)..(865): n is a, c, g, or t
  misc_feature (1070)..(1070): n is a, c, g, or t
  Peptide Sequence Number=SeqID_9534
  Probeset Number=SeqID_11746
ncctcacacgtgcatgcaaacgtcggcgtcgcacatcatgcctcctcactatatacttatcgtgtgtggcgtgtgtcttgcagcaacctctctctcgtgtcaccagtagctgtgtgtgcgcgtgacagcataagacgatatcgcgtgtggcgcgacattattcgagtcttcgtcagccgctctctaatatacttgggtcctccataaaaccccctgtccgtacaagatactcgcttcgctcctaaaatctacaactattgttacgatagtgtggtgtggagtcacttatancacgctcactcgcgttttcgactctcatctacagagctcttccacatattcaaacatcttctgtcgtacaaaatgcctntcatcgcgcaatctcanatctagacttgactgtttctaacagctttcctgtacaccagtagcgctcgacacggncttgcgaataatgattaactctagctctgttcatccctccanatgatttcatatctcatactagggctattgtatgtcgctttccaactatgttgtgcagatatttatcatcgcgtcctctacactttctcgttacgtaatacacccgcttccatcccgtcttcattacatacctgtctcgtctaaaagcgtcgcttcattataaatacgtcgctgtccattacgtgttgtcatcaccgctgcgttatgtattaacaactacagtcggcgcggccaaaatacaatatacatggtctcacgtggtcgcattcaatcggctcgcatcgcgtccgttacgccatccaggcaatcacgtgtgtggtgtcgccatanacgctgtttcgcacactccttgttactgctctcacggtatctccctacnatctgctgttggctgacttctcgtctctgaaagctgttttcgtgtccaaataccataacattctatcatacttttttgttcttcaaccttatttcccatagcgtctccacacactccttgcacacgtcctctccaacctctctcctgctcgccttcgccaccctctctctcacaatgatggttcctcttcaattgcctgtgaaantttgtttttctcatctttcttactctatctattctatcgtcctcttctattccgccactctcctctaatcccttctccacctgtatcttcattctccatgtccactctgcgtctctgcctctctattacatcttctgccactcctgttcgccacttttatttgacttcacaacctcttccttccctcctactctcctccctcctctcttaccctcttctcctctctacgtggtgtgtaatacttatacattatattttctattcaatgggatttattactcactcgctcatggctcatcatctctcttcaactcgggcgttaatttggcggggcacacataaagacaaataaaaacaaaacacatgtggcgaaacggtgtgaataacaagtgtgaaccacatgtgtggggtgggtggggggtataacatatcggtgttgtcaagacaccctccacactctgccctcagtccttcataatctttgcttgaattattaacactcatatgttccttctattctgttctcataactgtcaacaactactccacatctcgcaccgtgcacttgttttcatctgcgccaacactcgtgtcccacatgggtggttaacgaatcatgtactaacgttgtgtttttta

SEQ ID NO: 1968 - DNA, 1741 bp, Glycine max
  Probeset Number=SeqID_11747
taattgtttttctcctctgtgaagaggagcccaacctgataagtatcaaatgtaataatatcttccacttggaattcaggcagaggtaagcctactatgacatttatgttactaaaaacacataattgagcgctttaactctaatatgatttttttgggtctatgtgccatatgccacctgcaggatctatccacaccatggcacaaagctgagttgaagcatataacatatgatgttcttcttctagatcatcctgccaaggatgacgacaaataagatactgcaccaccaggagctacatggcgatcaatccatctctgatgtttcaggcatagtggatgagaccttgggaaagagtcccttggataggcagggtacactgaaatacagggtgtttgctagtacttggaatatcggtggtgtagcaccaacagatgatctggacttggaggattggttggatacaagagctaactcctacgacatctatgttctagggttccaagaaatagtgccactgaatgcagtaaatgtgcttggtcctagcaagaggtgtatctctacaaagtggaactcactaattgggaaggcactaaacaaaaagaagacacgggatggagcacagttgcagcatacaactacaaatagtagtgcaatggaaagctttgcacaagaggggtgctttatatgcatcaggagcaagcagatggtgggcatctttacctcagtctgggtgagaagcaatcttaggtcatacattcaccatctggatgtgtcatgtgttggttcaggtatcatgggctatctagggaacaagggttcagtatcagttcgatttctgctgcatgagacgagcttttgtgttgtttgttgtcacctggcttcaggtggcaaacaaggggatgtgctgctaaggaactttgatgcagcggatatacttgcaaggacgagattccatggtggtggacataaaaaactgccaaagaaaatcctcgatcacgaccaagtagttttgctcggcgacttgaattataggatatcactggaagagcctgagacaaggttgctggtgaaagctaagaactggtccaccttgttagagaacgatcagctagtgtctgaattctcaacgggtcggctttttgagggctttcaggaagggccggtcaccttctctcccacctacaagtaccagccaaactctgatcagtactactggtgctttgaagcagcgcgaggggagaagaagcgtgctcccgcatggtgtgatcgcattctttggcgcggcaagggcctgaaacaaatccaatatgggacctgcgactacaagttgtcagaccaccggccggtgagagcgggtttcattgccgagtgcaggatcaggggagatgcggaggactctattggtggcttcatgcgctgaactctgcagccgatggtcgagatggaagttatgcaccatccaaccagaggctctgccgtccgatctaaaatatggaacaatcacggacatagcgaaaccatgatgaattttgacgagatyttgagtgttcgttgacgaccagtgcgcaattgggaagtagactagtctgatgttcttatcagtgacgctgtataaattttttgttctcatcctcatctctaaaacgtcttatattttgtttacagagggagtattttacctagcaagtattttgtacacactatggctaaaagaaattaggagttttccagttgaac

SEQ ID NO: 1969 - DNA, 1991 bp, Glycine max
  misc_feature (1963)..(1991): n is a, c, g, or t
  Peptide Sequence Number=SeqID_9535
  Probeset Number=SeqID_11748
aaatacacaaggttatttgaaattgaacatataaaccaaatgagtactaaaaagaacacatggaagtctgtgatcttgatcctaagttgttacaaggttaagtgttccttggaggaatcagagaaacaggttttgaaacaaggttctttccagaggttatgtctatcagatgtgagcaattcaagctccactcaggccattgaagacatttcaatttcatttgctggctcaaagctctatgcattcacacttgaggagctaagggaagcaacaaacagtttctcatggagtaacatgctaggtgaaggagggtttggacctgtctacaagggttttgttgatgacaaacttaggtctggtttgaaggctcagactgtagctgtgaaaaggttggacttggatggcttgcaaggtcacagggagtggctggcagagattatatttcttggacaactaaggcatccgcatcttgtcaagttaattgggtactgttatgaggatgaacataggcttttgatgtatgaatacatgccaagaggcagcttggagaatcaactattcagaaaatactctgccgccatgccatggtcaactaggatgaaaattgcattaggagctgccaagggtctgaccttcctacacgaagcagataagcctgtaatatatcgcgatttcaaagcttcaaacattttactagactcagatttcacagctaaactctctgattttgggctagctaaggatggccctgaaggggaagacacacacgtaacaacacgcataatgggaacacaaggttatgctgctcctgagtacatcatgacaggtcaccttacaaccaagagtgatgtgtatagctatggagtggtgctgttggaattgcttacaggaagacgagtagtggataaatctcagtcaaatggaaggaagagcttggtggaatgggcaaggcctttgttgagagatcagaaaaaggtgtacagcatcatagatcgtagactagaagggcaatttcccatgaaaggagccatgaaagttgctatgttggcttttaaatgcttgagtcatcacccaaatgcaaggccctctatgagtgatgtggtgaaggtattggagccacttcaggactatgatgatgttttcattggaccatttgtgtatgttgccgtaagtgaaaatggtgacaaacataaaatatagaagcaacactccccagcaacgtagataatatatatatatatatatatcagatagcaaaaggttaaaaaaaaaatgtggtgttattttataaggtacggcatggcttggtggtcttctgtcttcacaatcatggaaggggattcaagtagttctatgatcacatctgaactgaggccagaaatagagagatcagctgcagcaaaatgatgtttagggtggaagaaggtctatcacattggaacatatggtgttagaagtggtattgagttttctatagttggatgatatacacaacaatgtacaagcactagagactctagttcagaatacacaaactaaaatttaatcacatgtaatgtatttggaaaaattatagttgggctgtgtttggacatgattttggatttcaagttagtttagagaaagtggaaaaaattaaccattgaatcagtaaactgtaatctgcacatattaatatattattagtatgattcttgaagctaaaaaaaaaaaaaaaaaaaaaaaaaaaaaaaaaaaaaaaaaaaaaaaaaaaaaaaaaaaaaaaaaaaaaaaaaaaaaaaaaaaaaaaaaaaaaaaaaaaaaaaaaaaaaaaaaaaagggggggcccgccctcttgggggtcttttttccccggggatttaatttccggaccgggcccctggaggggcacaccctcttccctttttgggggtcgtttttaagagctgggcggaaatctgggcccaaaggttttgccttgggnnnnnnnnnnnnnnnnnnnnnnnnnnnnn

SEQ ID NO: 1970 - DNA, 441 bp, Glycine max
  misc_feature (34)..(34): n is a, c, g, or t
  misc_feature (312)..(312): n is a, c, g, or t
  Peptide Sequence Number=SeqID_9536
  Probeset Number=SeqID_11749
accctcgcccattccccccctcgatcccccttcnccccctcctctctggttcgaattcgagcctgcgagctcgcgcgatcatcgttgccccgccctcgttgacgcgtccaccggcctcctcggcgtgcgggggcacgtcctggaggttcgtcgtgttcgtccatgtccgttcagagcatcggagcaaggccggaagctgcgtggacggcgtcgtcgacctcttcttcctccgcccgtcgtccaccttgtcgtcgccgaccaagcacgcgagctgggacggccccgctgcgctgcatcgccttcgtccgcctnggtcgccgaccaccatcgtcccagcctcccccgcagctactaagcccctcgctggcctccttgagccgctcgatcccgagaccgatgctgccctcgtgatcgactacgtcgacgacaacccccctcctt

SEQ ID NO: 1971 - DNA, 328 bp, Glycine max
  Probeset Number=SeqID_11750
ggagatccttcacgcgcagggggggcggtgcgggaaccggatcgggtccaagctccgagaactggggtgcaacgagcacggaatacatccgacggggaagtacgtctgaaactcacatctgcaactcaagggcgtgaacgtctactacaatgaagcctcgtgcgggcccttcgtgacactcgcggggctgatggacctgaaacccgaaacattttttcccctacccaccgggggggaggggcagaccttccgcaccgacaacgtctaattgggacagtaaggagccgaccccaactagggtaacgggcactacccctagggagcggac

SEQ ID NO: 1972 - DNA, 693 bp, Glycine max
  Peptide Sequence Number=SeqID_9537
  Probeset Number=SeqID_11751
aaaaaaaagcaatacattttaaatatataacgtccctaaatcaataaacaaactcatcaactttatttatcactaaagctcaatacaatgcaagacagaccaatcaaagcagctcataactatcgcaatgaagaagaagataactacgatgattatgatagagaagtagaagaagaaaaaggagatgatgaagaaaaaggtccatcattaaatttccaagaagatgaaggtgttgttggtggtcaagaaccagaattagaaaaggaagttgagaattatatgcatagaggagaatatcaagatgcttataactctttaaaaagattggagaaattagataatacgagaccagaaacttattcaaatatggcaaagtgtcaaacagaattaaagttgtttattcaagctataaagagtcttcagtgtgcagtcgatttagatcctaaatattctagctcaaactcctccaaaaaacattataaagacaataaagttatcttgcaaaattcgaatgacatctagataaatgactgtcgaattcggttttatttatttcacacaaaaaattttttttaaatgatcagatgattattatttcagtgatgtatttttttcgtaccctttcaaaaaaaaatatttttgacataatgtatttatgagaataataatttatctattcacaacaatcctagt

SEQ ID NO: 1973 - DNA, 1746 bp, Glycine max
  misc_feature (24)..(24): n is a, c, g, or t
  misc_feature (111)..(111): n is a, c, g, or t
  misc_feature (117)..(118): n is a, c, g, or t
  misc_feature (130)..(130): n is a, c, g, or t
  misc_feature (159)..(159): n is a, c, g, or t
  misc_feature (321)..(321): n is a, c, g, or t
  misc_feature (340)..(340): n is a, c, g, or t
  misc_feature (371)..(371): n is a, c, g, or t
  misc_feature (386)..(386): n is a, c, g, or t
  misc_feature (389)..(389): n is a, c, g, or t
  misc_feature (397)..(397): n is a, c, g, or t
  misc_feature (400)..(401): n is a, c, g, or t
  misc_feature (403)..(403): n is a, c, g, or t
  misc_feature (450)..(450): n is a, c, g, or t
  misc_feature (630)..(630): n is a, c, g, or t
  misc_feature (869)..(869): n is a, c, g, or t
  misc_feature (874)..(874): n is a, c, g, or t
  misc_feature (889)..(889): n is a, c, g, or t
  misc_feature (911)..(911): n is a, c, g, or t
  misc_feature (988)..(988): n is a, c, g, or t
  misc_feature (1065)..(1065): n is a, c, g, or t
  misc_feature (1156)..(1156): n is a, c, g, or t
  misc_feature (1167)..(1167): n is a, c, g, or t
  misc_feature (1305)..(1305): n is a, c, g, or t
  misc_feature (1309)..(1309): n is a, c, g, or t
  misc_feature (1392)..(1392): n is a, c, g, or t
  misc_feature (1503)..(1503): n is a, c, g, or t
  misc_feature (1524)..(1524): n is a, c, g, or t
  misc_feature (1542)..(1542): n is a, c, g, or t
  misc_feature (1590)..(1590): n is a, c, g, or t
  misc_feature (1592)..(1592): n is a, c, g, or t
  misc_feature (1598)..(1598): n is a, c, g, or t
  misc_feature (1615)..(1615): n is a, c, g, or t
  misc_feature (1617)..(1617): n is a, c, g, or t
  misc_feature (1622)..(1622): n is a, c, g, or t
  misc_feature (1640)..(1640): n is a, c, g, or t
  misc_feature (1655)..(1655): n is a, c, g, or t
  misc_feature (1659)..(1659): n is a, c, g, or t
  misc_feature (1661)..(1661): n is a, c, g, or t
  misc_feature (1675)..(1675): n is a, c, g, or t
  misc_feature (1680)..(1680): n is a, c, g, or t
  misc_feature (1691)..(1691): n is a, c, g, or t
  misc_feature (1705)..(1705): n is a, c, g, or t
  misc_feature (1716)..(1716): n is a, c, g, or t
  misc_feature (1735)..(1735): n is a, c, g, or t
  Probeset Number=SeqID_11752
gtagtggcgtttgtcttgtggtgngtgagtggcgcagtgagtgctaacgcgcggcacgcggcgcgtaggagacgtgctcatcgctctctccattctccactaggaagaggngtaaannacagccgtctangagagagagagaggagcgggtcgtcagtngtatatcacagatacgagtgtaggagtgatactactcactctaccgacgcgccgcccagacggagcgacacgctgactgatggtggttgcgtgctcacttctctacctctcggtgcgtgtcgtgcgttcggccgctctcggcggtgtcctgcgacgtcggcncgcggcccgcgcgcacccnatgtcaaggcgcggaggcgcgcggaaggacngtaacccgcagaggnaanaggtgtgngcnntntcgtttttggctgtgtcagcagtgcatctcgcatcactctctcctcnttcacatatatattacgcacactgactatcatatagtatgtgacgattcgtcgcgtgcgccgaacgactgcactccctgagcagtgggccgaacagaatcgctcactctagtgcactctgtccgcgctatctctacgtgctgcgcctgcgccgtgtcgctgactccgctgtgtgtcgtcnctctgcggtcgcgcttcgcggcgcgcgcattgccgtaccgcgtcaccgtcagagctggcgactggcagagaggcgcgcctgtgtctcactcaagattgacatatgtcgtcgtatatcgatactgctgtatctccatactatcgttatacacatattctactacttcactactatatgtatgcgacgacgcggtgcggagtgagtgcgcagtgaaggtggaggagggatagtgtgatganggaanagacagcgtgcgtgngacaccccgtttaaaaaaatcncatctaactatatcatctcataccggactattagggagatgcagagactgatcatatgatgctgagctacaccaccntatcctctctcatatctatagtcgatgcgtctctatatcaccttgtcagtatcgtgatcacaccccactcacacacncgattctcgtctctcctctctgctcgtcggtctcgttcacgtgtcgtgactgatcgatcacctcaacatgaccagcagcgactcttactgnctcctactccnatcatgcgttgcgtgtatgcgtcgtccttcaacaatatacatgctaatcactccgtctgtcatattatacatcaccgcacgcaccgatctgacgcctacgcgctggcagtatcatgtgcgtagtgcttcctcgcgagnacanacagcgtatacgctcgcgtaggcgtacgatcagttatggaacacactactcgctcgctacgtcgacggcggctaactatctcncgtccatcgtcgctgtcatactttgtcatgttttcatctggcgcgcgtgatgacgcgatgacggcatacggcgtgcgctgcagctctactacagcattcagttcgtatacngtcgagctgacggccgactgntgtgagtatatctatagntgacgactcgtgtctgtgctgcgtcgtccgcgtcacgcctacacactncntcgtcngtacgagcgcaacgctncnagtgnactgtacgcagggtgtantctacttcgtgaagncgtncntactcacgccgcanacgcnatcactctcantcgcttacacgacncagttatcatncccacatcgagatgcatcngatatgagcta

SEQ ID NO: 1974 - DNA, 1780 bp, Glycine max
  misc_feature (5)..(6): n is a, c, g, or t
  misc_feature (18)..(20): n is a, c, g, or t
  misc_feature (34)..(34): n is a, c, g, or t
  misc_feature (43)..(43): n is a, c, g, or t
  misc_feature (50)..(50): n is a, c, g, or t
  misc_feature (52)..(54): n is a, c, g, or t
  misc_feature (85)..(85): n is a, c, g, or t
  misc_feature (130)..(131): n is a, c, g, or t
  misc_feature (150)..(150): n is a, c, g, or t
  misc_feature (152)..(152): n is a, c, g, or t
  misc_feature (154)..(154): n is a, c, g, or t
  misc_feature (158)..(158): n is a, c, g, or t
  misc_feature (162)..(162): n is a, c, g, or t
  misc_feature (164)..(165): n is a, c, g, or t
  misc_feature (194)..(194): n is a, c, g, or t
  misc_feature (256)..(256): n is a, c, g, or t
  misc_feature (311)..(311): n is a, c, g, or t
  misc_feature (319)..(319): n is a, c, g, or t
  misc_feature (330)..(331): n is a, c, g, or t
  misc_feature (382)..(382): n is a, c, g, or t
  misc_feature (400)..(400): n is a, c, g, or t
  misc_feature (625)..(625): n is a, c, g, or t
  misc_feature (652)..(652): n is a, c, g, or t
  misc_feature (669)..(669): n is a, c, g, or t
  misc_feature (677)..(677): n is a, c, g, or t
  misc_feature (681)..(681): n is a, c, g, or t
  misc_feature (683)..(683): n is a, c, g, or t
  misc_feature (696)..(696): n is a, c, g, or t
  misc_feature (705)..(705): n is a, c, g, or t
  misc_feature (730)..(730): n is a, c, g, or t
  misc_feature (739)..(739): n is a, c, g, or t
  misc_feature (769)..(770): n is a, c, g, or t
  misc_feature (772)..(772): n is a, c, g, or t
  misc_feature (801)..(801): n is a, c, g, or t
  misc_feature (855)..(855): n is a, c, g, or t
  misc_feature (890)..(890): n is a, c, g, or t
  misc_feature (909)..(909): n is a, c, g, or t
  misc_feature (915)..(915): n is a, c, g, or t
  misc_feature (953)..(953): n is a, c, g, or t
  misc_feature (960)..(960): n is a, c, g, or t
  misc_feature (965)..(965): n is a, c, g, or t
  misc_feature (1088)..(1088): n is a, c, g, or t
  misc_feature (1108)..(1108): n is a, c, g, or t
  misc_feature (1111)..(1111): n is a, c, g, or t
  misc_feature (1120)..(1120): n is a, c, g, or t
  misc_feature (1133)..(1133): n is a, c, g, or t
  misc_feature (1175)..(1175): n is a, c, g, or t
  misc_feature (1179)..(1179): n is a, c, g, or t
  misc_feature (1182)..(1182): n is a, c, g, or t
  misc_feature (1187)..(1187): n is a, c, g, or t
  misc_feature (1207)..(1207): n is a, c, g, or t
  misc_feature (1214)..(1214): n is a, c, g, or t
  misc_feature (1264)..(1264): n is a, c, g, or t
  misc_feature (1300)..(1300): n is a, c, g, or t
  misc_feature (1324)..(1324): n is a, c, g, or t
  misc_feature (1339)..(1339): n is a, c, g, or t
  misc_feature (1366)..(1366): n is a, c, g, or t
  misc_feature (1374)..(1374): n is a, c, g, or t
  misc_feature (1416)..(1416): n is a, c, g, or t
  misc_feature (1437)..(1437): n is a, c, g, or t
  misc_feature (1441)..(1441): n is a, c, g, or t
  misc_feature (1473)..(1474): n is a, c, g, or t
  misc_feature (1498)..(1498): n is a, c, g, or t
  misc_feature (1503)..(1503): n is a, c, g, or t
  misc_feature (1511)..(1511): n is a, c, g, or t
  misc_feature (1537)..(1537): n is a, c, g, or t
  misc_feature (1540)..(1540): n is a, c, g, or t
  misc_feature (1545)..(1545): n is a, c, g, or t
  misc_feature (1553)..(1553): n is a, c, g, or t
  misc_feature (1601)..(1601): n is a, c, g, or t
  misc_feature (1630)..(1630): n is a, c, g, or t
  misc_feature (1677)..(1677): n is a, c, g, or t
  misc_feature (1695)..(1695): n is a, c, g, or t
  misc_feature (1702)..(1702): n is a, c, g, or t
  misc_feature (1720)..(1720): n is a, c, g, or t
  misc_feature (1733)..(1733): n is a, c, g, or t
  misc_feature (1740)..(1740): n is a, c, g, or t
  misc_feature (1751)..(1751): n is a, c, g, or t
  misc_feature (1753)..(1753): n is a, c, g, or t
  misc_feature (1780)..(1780): n is a, c, g, or t
  Peptide Sequence Number=SeqID_9538
  Probeset Number=SeqID_11753
ttttnnccaaattaaacnnnacagagtgcgcccncagacacanaatatangnnngacgatacatacaccagacacagtgtaggcncggcgacgagtgtggtatgtatggagagtagtgagtgcatcgagnnatctattcatgtggcgcanananacangccnanncaaacatatagggttatacaaggcaatcnatagcctgccgcgtggttgttccgacatgcagtacgtgcgtcctgcgcgcgccgctgcgctnctgatgacgatcgcctcgagtatctctaccgctagcgccgcttccactcttgtcntcgctgcncctgcttctcnncgcgcacgtgctcgtcacgctgtgatgtacagctgcgcctaacgtcacgcntatgtgcgctgtgtgcangcgcgcgcacgatgacagcactcaccgcacactctgcccagtacttatgacactgtgcgtcctgcctgcgtcctgacggcccgacgctatgcgatctgtgagtcaggagttgagtagagtgagtcgtctgatgtgaaatgatgtagtgtgcattgatgtagagtggataagtggatgggagcgatgcgcggagtgatgagatcgacgtcacgtcacgtcggcgtncagtctgatctgcgacgtcgcgctagncgagctacacaccgctngcatcgcnctcngngcgtgctcctgcnttgctctcnctacgacacgcacatcgctgctgcncgctgcgcntgcaccgacttcgtgctgcctcgacgtccnncngtgtgtcctgctcatgactgtcgctgacnctgctcgacgctgctcatgcgcgctagcagcagtcactgtctgtcaaactcgantcgcatgtgtcgtctgctgtatctcgctgctatangctgctatacactcacacntcatcncgcaggcgacagtacaacgcggccgagcgtcatcagtnagtaatncgcgncacagagcatcccagatctcgtcactgcacaccacgcaacagccgacctcagatacatagacaccgattgactgtgatatagtatcgtctgaccacgataatatatgtctctatgctactgangtgatctgatactttagcanagntgtgtatantacacgcagggantgctgaggtgcatgcgtctagtagtagttatagatagagagnagtngangactnacacactcctcatctgatancatgacntacagtgtgacgctacacactacttcggagatcacgtgacgtcttgcgancgatgcgcgtcgagagtagatgttacgtcgacgtcngtgagacgactcatcgatcgtctnatgctagatatgctngtcgtctgtgtacaccgcgtatccatnaatcacancgacactggcgacacgcgtatgtcaacggcagatgtgtgaantgtcgctacggtccgatgtangcgngcatcactatgagcgctactgcgtctagcagnntcgtcgcgcgtcgtgacgacgtcngacgngctgtcgntgcagacgatctgcttgtgctcatgnagntgtantagtgtangtcgtgagcatgagtagcatgatatatgccatcgtggacgcagacgcnggatggctgatggtgctcacgcatgcccngcatgtgacgactgtagtacgcactgagtacgatcgcgcagccacgnacattcatatgatatctnatcgctngacatcgagtacggcacngccttcacatgantgatggnactcatcaccntnatcacttactcatgactctacactatn

SEQ ID NO: 1975 - DNA, 886 bp, Glycine max
  misc_feature (677)..(886): n is a, c, g, or t
  Probeset Number=SeqID_11754
atagtttctagaagcaagtgcacgccgcgccagcgaagaatctagaacagaacacatagcctcacgaaggagaggagcgagggataaaatcctttctctccgacgcaaagccagccagcgagccagcgagggggagagagagagagagagaggaagaggcgagcgtcgaccggtcgttcggtgtgaggaggaagaggaagagatcgccggagaagaggaggcggacgagaagagatgtttctggtggattggttctacggggtgctggcgtcgctggggctgtggcagaaggaggccaagatcctcttcctcggcctggacaacgccggcaagaccaccctcctccacatgctcaaggacgagcggctggtgcagcaccagccgacgcagtacccgacgtcggaggagctgagcatcggccagatcaagttcaagaccgtcgacctcggcggtcacgagatcgctcgacgggtctggccggactactaggcaagggtggatgctgtactatacttggtagagtgctatgacaaggagcggtttactgaatcaaaaaaggagcttgatggtctcctttctgatgagtccttgggcaatgccccatttctcatacttggcaataagagtgggcttccatatggcctatctgacgaagagctgcggcatcgcctatggcnnnnnnnnnnnnnnnnnnnnnnnnnnnnnnnnnnnnnnnnnnnnnnnnnnnnnnnnnnnnnnnnnnnnnnnnnnnnnnnnnnnnnnnnnnnnnnnnnnnnnnnnnnnnnnnnnnnnnnnnnnnnnnnnnnnnnnnnnnnnnnnnnnnnnnnnnnnnnnnnnnnnnnnnnnnnnnnnnnnnnnnnnnnnnnnnnnnnnnnnnnnnnnnnnn

SEQ ID NO: 1976 - DNA, 1629 bp, Glycine max
  misc_feature (1)..(1): n is a, c, g, or t
  misc_feature (8)..(8): n is a, c, g, or t
  misc_feature (50)..(50): n is a, c, g, or t
  misc_feature (98)..(98): n is a, c, g, or t
  misc_feature (101)..(101): n is a, c, g, or t
  misc_feature (110)..(110): n is a, c, g, or t
  misc_feature (114)..(114): n is a, c, g, or t
  misc_feature (120)..(120): n is a, c, g, or t
  misc_feature (127)..(127): n is a, c, g, or t
  misc_feature (129)..(129): n is a, c, g, or t
  misc_feature (131)..(131): n is a, c, g, or t
  misc_feature (145)..(145): n is a, c, g, or t
  misc_feature (189)..(189): n is a, c, g, or t
  misc_feature (290)..(290): n is a, c, g, or t
  misc_feature (315)..(315): n is a, c, g, or t
  misc_feature (329)..(329): n is a, c, g, or t
  misc_feature (334)..(334): n is a, c, g, or t
  misc_feature (342)..(342): n is a, c, g, or t
  misc_feature (381)..(381): n is a, c, g, or t
  misc_feature (407)..(407): n is a, c, g, or t
  misc_feature (426)..(426): n is a, c, g, or t
  misc_feature (460)..(460): n is a, c, g, or t
  misc_feature (509)..(509): n is a, c, g, or t
  misc_feature (594)..(594): n is a, c, g, or t
  misc_feature (611)..(611): n is a, c, g, or t
  misc_feature (628)..(628): n is a, c, g, or t
  misc_feature (1450)..(1450): n is a, c, g, or t
  Peptide Sequence Number=SeqID_9539
  Probeset Number=SeqID_11755
ntatagtnaaatgcgatgctacgccgacattcatgatgcgtgctgtatantgtatgcggtggtcgactagctgtcagacgtacagtatgcatctatcntgnctatcgcgnactnctactntctacgnangncacgcgcctgctgncgtcgcgtgtacatcattgtcatattattcacacacgcgccgcngcaccgagccgtgtcaatgagatagtaccgtgctgcgtcgtgagtatattagcgcccgacgactatcacactgagccgacgtcgtatcgcgatggacgatngtgttcgtagtatctcgacatatcntgcgacgcgctcancatancgcgcacncacacattttctcatcacgccgtcgcactgctcgcacgncgcctccgccctcagcgctgctttgnttctacagcacagtctatntgtgtgtactctcactctctcgctccaccgctcncgcgtcctacgcgccgctctgtatacacatactctcttcttgttgccgnacccgcgccgtcactcttataatttttcggcccgcgacgtttagtttattctatcacactctcacacgccgcgcacgcacacacncgccgcgccgatacatntatcgccgacaggtgcnctcactgccgtattcgtgctctactttagttttctgcatcagcctccacgtctccacctcttctgtttgtcttacgtcatatcacgcgttatgcgtatggttgcatcacgtgtgtgtgtgtgaatcagagatcgttctacgacgacgcacatcaccactcgtagttgagctcgcatatctgctgagcgggctatcgcaccctaccatcttctcgcggtgtgcgctactcctacacaccacccacctagtctcctttattttactgatccacgcacatcttgtccctctccacatgaggtgtgctctcgcatatttcgcccggcgtgtattcgtcatcgcatcccccacacgggtgtattttctcccgccgtcctcacctctatttcaatattcgggcgccaatatatagaccgccgcggtaaagagagagaagcgcagcgttacgtggacaactcgatattcctacagaattctattattctttattctcggtcgccccgtatgcttggcgacgaggtgatatatagcaccgtagttgatacaccaccactatctctcgtgatgtggccgcgggcgcgcgcgccgcccgcgggggtcgcgttcaaccgagcggatctaccaccacggcgcgaataacgcgtcggcaacaataagtaacatccgcgcctgcatgtcggtatctattactacagtaggcgattgttgtagcggagagagcggtgtcaacgtattatattttcagtgcgcaagtatacatatccgtacggctagttccggtgtagagtgctggtggcgctgcgacgcctcagctgaggcgtgatntgcgcccgctgctacacctatcttctaccaccctaatggtgatctcaacctaatacactagaatcaggcgttatcgatgcgccgatcggggtaggcacacgcaggacgagagcgggcgcacgcttccgcgcgcagcatatgcgactatgttatatgatgggccgcgggtgggccaccct

SEQ ID NO: 1977 - DNA, 660 bp, Glycine max
  misc_feature (1)..(1): n is a, c, g, or t
  misc_feature (41)..(41): n is a, c, g, or t
  misc_feature (488)..(489): n is a, c, g, or t
  Probeset Number=SeqID_11756
nggtgtgtgtgtgagcgcgtggtcagggcacaaaacctganaagggtaagaggaccgagagatagcatattggtcgacacattatatttgggatcaatcttataagtgttggttacactcgcgcccgcgccgcacacggaaagaaggaagggtgtgttttttttttttttttttgtttaaaaacaaaaaaaacaaccaccccgctcgtggggggggggtggggagaaagaaaaggtttgggtgtgtgggggggggggggggggtccgtcctctctttcctatttggttcaccaacgcgcccggggtttttttttttttttttttccgccgcgcgcgcttttctttttttataaaaaaaaaaaaaaaaaagacaagtggggggggggttatttttttttttttttgggggggggggttcttctctcccggaaggggggtgggggttccccccccccccggggggggcgctgtgttaaaaaacaaacacnnacggcaaaaggaactccgaaaggactctctctctctctctgtgttgagaaaacgaaaagggtaacggagatcaaagaagagaagagagggatccaaaaggcttttgctttgtttctctctctctctaaactgtgtcaccagtttccgttactttatagatctcccactatt

SEQ ID NO: 1978 - DNA, 425 bp, Glycine max
  Peptide Sequence Number=SeqID_9540
  Probeset Number=SeqID_11757
aaaactccaatcattctgcgactcttcaaaccaactctttgtgactcacattcatccaactctctctagctatgtcaacatccgagaacaaagtggagatagtcgacagaggccacaaggaggaggaagaaaaagaagaaggcaaaggaggcttcctcgacaaggtcaaagacttcatccacgacatcggcgaaaagatcgaaggaaccatcggcttcggcaaaccaaccgccgacgtctccgccatccacatccccaagatcaacctcgagagagccgacatcgtggtcgacgtcctcgtcaagaaccccaaccctgtccccatccctctcatcgacatcgactacctcgtcgagagcgacgggcgaaagctcgtctccggcctcatccccgacgcaggaaccatcaaggcgcacggggaagag

SEQ ID NO: 1979 - DNA, 568 bp, Glycine max
  Peptide Sequence Number=SeqID_9541
  Probeset Number=SeqID_11758
acagcgcgcgagaaacccacccccgtcgccgtcgtcggcatccgccgccgcaggagaagcaccaccaccgcgggccatggacttcttccccgaccgggcgttcgtgcggctgcggaaccgcgcgtacggcacgtacctctacgccgacgacgacggcgcgcgcgtcatcctgaagccgcagcgcggctccctgcaaacggcgtggcaggtgcaccgggtatggcgccacgaccgcatctacatcctcctccacagcgccgcctacggccggtacctcgccgtctcgcgtgtcacgattgagggtcgacacccgtcaccatgcgaacctcacgggtccagggcgtcctacgacaccccgaaagcaggacggacatacctcctggggcgggcttggcctatggtgagacaaacgcaccaccgcccgtcaaggcttccaaaagccttctcccacggtctttcacccgccgcccagccaaccccaaaaaaaaccacaccatttcctattagaaagaacgagcattctcgagccggaaacccccgcgcggggcgccatttatattaacacgcc

SEQ ID NO: 1980 - DNA, 691 bp, Glycine max
  misc_feature (601)..(691): n is a, c, g, or t
  Peptide Sequence Number=SeqID_9542
  Probeset Number=SeqID_11759
atcagtcacaaagccacaagccaagaaccaatacttgatctgttgtttcctttagctcccggaagacttttcgctgcaccgaccgatctcgatcatggaggatgagaggagcacccagtcgtaccagggaggtgaggccgccgagcaggtggaggtgacggacaggggcctcctcggcaacctcctcggcaagaagaaggcggagggaggacaaaggagaagaaggaggaggagctggtcaccggcatgggagaaggtctccgtgggaacagcccgaggccaagaaggaggacctcgccgatctccattaacacgccctcacctcccactcccccataccttccgtcacacaccctctcccctccgctctcgccgtggatgaccccatctttggaacctacccgcccacttaattaaggacccggtgggcccccaaaccgtaaaaggagagaataaaaccgatcctatccagggccgatgtcctatataacttgtacccatacacccctaatcaacgtttttttttagcgtccgtggtgctctttacaacactttaaactctgtaatccctaaaggtgaaccccccgaattcaatagtttnnnnnnnnnnnnnnnnnnnnnnnnnnnnnnnnnnnnnnnnnnnnnnnnnnnnnnnnnnnnnnnnnnnnnnnnnnnnnnnnnnnnnnnnnnn

SEQ ID NO: 1981 - DNA, 1370 bp, Glycine max
  misc_feature (16)..(19): n is a, c, g, or t
  misc_feature (28)..(31): n is a, c, g, or t
  misc_feature (33)..(33): n is a, c, g, or t
  misc_feature (36)..(36): n is a, c, g, or t
  misc_feature (53)..(53): n is a, c, g, or t
  misc_feature (62)..(62): n is a, c, g, or t
  misc_feature (64)..(64): n is a, c, g, or t
  misc_feature (67)..(68): n is a, c, g, or t
  misc_feature (76)..(76): n is a, c, g, or t
  misc_feature (90)..(91): n is a, c, g, or t
  misc_feature (101)..(101): n is a, c, g, or t
  misc_feature (111)..(111): n is a, c, g, or t
  misc_feature (114)..(116): n is a, c, g, or t
  misc_feature (211)..(211): n is a, c, g, or t
  misc_feature (388)..(388): n is a, c, g, or t
  misc_feature (674)..(674): n is a, c, g, or t
  misc_feature (709)..(709): n is a, c, g, or t
  misc_feature (712)..(712): n is a, c, g, or t
  misc_feature (714)..(714): n is a, c, g, or t
  misc_feature (718)..(719): n is a, c, g, or t
  misc_feature (721)..(721): n is a, c, g, or t
  misc_feature (907)..(907): n is a, c, g, or t
  misc_feature (1126)..(1126): n is a, c, g, or t
  misc_feature (1170)..(1170): n is a, c, g, or t
  misc_feature (1247)..(1247): n is a, c, g, or t
  misc_feature (1280)..(1280): n is a, c, g, or t
  misc_feature (1352)..(1352): n is a, c, g, or t
  Peptide Sequence Number=SeqID_9543
  Probeset Number=SeqID_11760
gggtttttgtagtggnnnntttgtttgnnnntntcncgtggggcgcggggganatatattananaannaaacaaanataagactgccgcnngtaatgggcnacctggcggnaannnccctctagagggaagagtaagtctatgggtgtggtcctccccccccggccactcaccacaccatatggacatcaccccggtcgcttgtgtgaacnataatatattagacaagagaagagtaatgatacgagagtgaacgcaggcagccaaagacgtagttctgattgtaaaaatagaaataaggaccacacactactatacccgtttatctactgtggtgtatgtgcactttctactactctctctaagcattcagagtcgtacacgcaacntgaccctcagcacaacatcaaaacacagatcgcgttgggctaggaaggaggaccagctgtgagtgtgctttatagtgtaatatgataccctcctcattctctcccatattcgctatggagaaattttgtcgtggagtgctgactacttggagtacagttgtatcttgacgaggatagtaggttggaaagataaaatcgctaatccatactactcataaccagaagattaatagcacacaccacatagagaacggacattataacgacgataactacagttagtgtngatttatacgataggtatagtgagcaccccagaanaananaaanntnataaccacaaacacacaacatccactacgcatgatgatatataacgtcagggacaccccaccacccttcttatgtttgatcttaacagtcaatgctaagttactagctgtgtatcgtattgttcttgtgaggtgctcgataatgcgcgcgccgcacgccagccgacgccgagccaagccccagccnaatactaaacagatctcgtgcagtgcactctcacttgaccgagtatgatatctgaatgtgaagccgccactgaccctatgagtcgagcttcgtctttgtagctgtgttggtcttatctctaatctcatttcgcccacactacatgttctactgtcatcgcctgtggcgtttattgtggatctcatacttgtaaaggagatggtgtgatgatgctagtgnacagtgtatagtatcatgtgtgccgttgcgcgcggcactggcgngactgcctagcgcgcccgtgcacgactccttgtgattctgtctctatctgctctttcccactgtccacgatgcgagngtggcgcatgtcgcggagcactttgctctgtgnactcgtgtcatgtcatctctctgctctagtctattctgcatatgatcgcatgcgtcgtgtctcatactcccntctgtcgactctcgcgcg

SEQ ID NO: 1982 - DNA, 1536 bp, Glycine max
  misc_feature (73)..(73): n is a, c, g, or t
  misc_feature (1072)..(1072): n is a, c, g, or t
  misc_feature (1180)..(1180): n is a, c, g, or t
  misc_feature (1261)..(1261): n is a, c, g, or t
  misc_feature (1283)..(1283): n is a, c, g, or t
  misc_feature (1428)..(1428): n is a, c, g, or t
  misc_feature (1480)..(1480): n is a, c, g, or t
  misc_feature (1484)..(1484): n is a, c, g, or t
  Probeset Number=SeqID_11761
gtaactcactcctcttcccttcgatgtattcttctagagcgcgtcaacataaacatctcatacctacattgtntgtgataggtaatttgtgcggctgagtgtgcgcgcggtgctcactcgtgagcgcgtctcagattttcatcaacgcgctcgagtatgttcctccgctcacactcttgaggtgaaagggcgttacgttgatccagccatcctatcaaccgacagcagcgccttcgacgttcatgagtgattgcgggtttcgggtttgtggatgcctactctactaccttgtctcatctccgcaggtccgcgttctattgaagtatacacatcgtgattacccgtcgacagtctacgtcactcttatactatcgatattgcgatatctgctctccgcgtcgtgtgactactgtctccgcgcgccgccctttataccatcttcttgcagctagctgaatactcataactatactagtattagtgtgttctattgtcgtgatatactttcgtcagatgctatattgcatgttccgcgctctcatatgccttctcgcacgtttctccgcatcatcatttgatattcatatatgcggacaagcatatatgattgatgcttaatagcgatattgagtatactttgtaatctagcttcttatctgtgcagcacagcgtgcgtataagagatatagtcgacccgctcagacaaatagtcgctatctcgctctgttcattacgtgtcttattgccgccttgaagtcacgaccgcgcatactgtcgcgtcgcactttgtctttactctgtatgagcgcgactcagagtgatggcacggtcgcgtatacgtagttatatcacctatgtatctctgtactatacctgcacatatatctagctgctgcagcgctaagtactgactcatggtgttcgtcgctatgtgatctatgtgcatccccgacgatcattacgtgcgtgcgccgtcctagacgccacctaatcttgtgtccagatgtgtgtgtgcggtgcacatgttgcatcttccgcttctactctattatcatttcacatcacatttacnctgccgctgctgtccgccctcttctatgtgctcatgccgcctcgtgatgcaccgagcagtacatagttagatttctgatagcactgcgtccctgctgactactgccgncttactgacatgcctcgacgttgattcaccttattactatcggcacttgctgtccgctcgtcttcgcatgacgcgagatgnatgatctgtgtctgcgctctcncgtcgatttgcctattcatcgcacgacctatcagcttaagataggttaggtgtaggcacgaagacgtctcacacacgctcatgtgcacatcacgactaacgctctcaccatccgtcgttcatcctgcctgcttctatctatcggntaggttgatcactatatcctattcgcacttcgcatgtgtgactccgttacanatancatatagatacacgtgatgcgacatgacacgctattacttctatgcattatg

SEQ ID NO: 1983 - DNA, 1471 bp, Glycine max
  misc_feature (1)..(20): n is a, c, g, or t
  misc_feature (25)..(42): n is a, c, g, or t
  misc_feature (57)..(59): n is a, c, g, or t
  misc_feature (63)..(65): n is a, c, g, or t
  misc_feature (67)..(67): n is a, c, g, or t
  misc_feature (71)..(71): n is a, c, g, or t
  misc_feature (78)..(78): n is a, c, g, or t
  misc_feature (349)..(349): n is a, c, g, or t
  misc_feature (650)..(650): n is a, c, g, or t
  misc_feature (743)..(743): n is a, c, g, or t
  misc_feature (974)..(974): n is a, c, g, or t
  misc_feature (1196)..(1196): n is a, c, g, or t
  misc_feature (1264)..(1264): n is a, c, g, or t
  misc_feature (1463)..(1463): n is a, c, g, or t
  Peptide Sequence Number=SeqID_9544
  Probeset Number=SeqID_11762
nnnnnnnnnnnnnnnnnnnnccccnnnnnnnnnnnnnnnnnncccccccctgccctnnncccnnntntccncgggtgngtattttctgtgtgtggcaaggcgcttttaagggagtgcatacggttttagtgtttaggtattgtctgtgtagaatatgttaattgttgtgttaatcagcttgttgaagtgttaaccgattgtcatgttaattatagtatattgttttgagaggcgtggctgtattctaggacaaaatacatatctattatttatttgttctaggtagcgtactagcacaaaaggatcgatgctacatttattattcgccatccgaccacgtaactaacgntacagtacccaccccgacgcccagcgcctcccactctaccgccactccagatcgatactactttctactatgatatcatgtttatggtattgtctgtgtgtctattctcgtcttctctctgtccttcgctctctgactacggcttctgcgcctgtatagatcattcatttataattcctacacgcggtatcacatgatcacttctcttcctctctctcccctctcatcccaaatattacgccgcaccacgccagtgagggaatataattatagatagaaattctgacactatatagttgcnacggggaaaccattgtagcgtacaatgcgccaagcgcagacagacacacataacgcgtgtgcagacacatcgcgcgtatttctcccacaaganaatacacagcctgcataacctactgttatcatttacgtgtgtgatggatacgacgcactctagcgtggtttataatagataggagcactatctcgtctgtgcgcagcactactccgtagagccaagaacgtagccaccgtcacttctggatgtgaatagtatgcgcgcgtgggcgcgcgaggagagtatgaagtgcgactatacacactgagtcgagaactacttacacgntcatgcgcgctcgccagcgtgtgcgcgcagctctatgccacgtacgacgctcgacaaagtcagcgcgtgtagtctggtggaggagagacgtgcgcagagtgggcgggcgcatgccgctacaacacctcctctcgtacaagactcactcacactagagtctatgagtacatagtgagaatatgtgctcgacgtcctttacagcgtgatgcccgctaataccanaaacatcgcagcaccaagttaaatcattaacgcggctggtggtcgtgaacacagcactgacaaaccgngatagacgcggtagctgcgtcagaagcgaagtagcaagaagaacgaagaacgaagtgaacccgaagaggatggtaggatgtcggatgacagtacaagacgtcacgatcggtccgtggagcgattgcaagctgctgcgagattgtttcgttcagcttcgagtgaacgccgaaggagaactcgttgagagacgagcaccgngcgagagc

SEQ ID NO: 1984 - DNA, 1898 bp, Glycine max
  misc_feature (1)..(1): n is a, c, g, or t
  misc_feature (22)..(22): n is a, c, g, or t
  misc_feature (30)..(30): n is a, c, g, or t
  misc_feature (45)..(45): n is a, c, g, or t
  misc_feature (76)..(76): n is a, c, g, or t
  misc_feature (96)..(96): n is a, c, g, or t
  misc_feature (128)..(128): n is a, c, g, or t
  misc_feature (134)..(134): n is a, c, g, or t
  misc_feature (139)..(139): n is a, c, g, or t
  misc_feature (199)..(199): n is a, c, g, or t
  misc_feature (207)..(207): n is a, c, g, or t
  misc_feature (221)..(221): n is a, c, g, or t
  misc_feature (236)..(236): n is a, c, g, or t
  misc_feature (240)..(240): n is a, c, g, or t
  misc_feature (266)..(266): n is a, c, g, or t
  misc_feature (289)..(289): n is a, c, g, or t
  misc_feature (318)..(318): n is a, c, g, or t
  misc_feature (337)..(337): n is a, c, g, or t
  misc_feature (344)..(344): n is a, c, g, or t
  misc_feature (346)..(346): n is a, c, g, or t
  misc_feature (350)..(350): n is a, c, g, or t
  misc_feature (394)..(394): n is a, c, g, or t
  misc_feature (450)..(450): n is a, c, g, or t
  misc_feature (485)..(485): n is a, c, g, or t
  misc_feature (536)..(536): n is a, c, g, or t
  misc_feature (538)..(538): n is a, c, g, or t
  misc_feature (607)..(607): n is a, c, g, or t
  misc_feature (612)..(612): n is a, c, g, or t
  misc_feature (662)..(662): n is a, c, g, or t
  misc_feature (695)..(695): n is a, c, g, or t
  misc_feature (791)..(791): n is a, c, g, or t
  misc_feature (897)..(897): n is a, c, g, or t
  misc_feature (904)..(904): n is a, c, g, or t
  misc_feature (971)..(971): n is a, c, g, or t
  misc_feature (1088)..(1088): n is a, c, g, or t
  misc_feature (1105)..(1105): n is a, c, g, or t
  misc_feature (1452)..(1452): n is a, c, g, or t
  misc_feature (1485)..(1485): n is a, c, g, or t
  misc_feature (1519)..(1519): n is a, c, g, or t
  misc_feature (1543)..(1543): n is a, c, g, or t
  misc_feature (1569)..(1569): n is a, c, g, or t
  misc_feature (1606)..(1606): n is a, c, g, or t
  misc_feature (1618)..(1618): n is a, c, g, or t
  misc_feature (1667)..(1667): n is a, c, g, or t
  misc_feature (1669)..(1669): n is a, c, g, or t
  misc_feature (1779)..(1779): n is a, c, g, or t
  Probeset Number=SeqID_11763
ncacccagtatcccatatgatngtctactnctcatcatataacgngactcatatcatcatgtctaatcatgagtcntgatagtcgtgagctatgcncgtgggagatcgatacagcatatcgctgagantgagtntcatngatatcgtaacgtgatacacatcgtgcactcgtacgcatatgttagcaacgatatcactntgagacangatagtgatatgcnacgtacgctgcgatncgcngattcgtctatcgtgcacgctactancgctgtacctgtcatgctactgnagtatagtcgatgccgacacatatacgangcgatatagcactgagtanaactgcncnatgntatcgcatatcattcacacatgtgcagtgttgtcatatatgaancagcagagtagaagaggtcggcgaataagattatatactgagaatcgccgcgtcgncccatgtacactagtgacacgactgtcgattgatnagtagtgatgagccatgctgacagtcgaataattatacatgtataacagtnanaagtgtatatgtatcatagtcgtagcaacatctaaaatgatgagtagtatagcgggccgtatgcaacgnagctngcgtacgtgacagatgatatacaggatgtaacagaattatgcagcacagntgtagcagtgatgcgcagcgtcagcgtgacaanatacgtcaacacggtctcgagcacgtagagagatgacagcagtgcgtcatcagtagcgtgatgcatatacctgctagagacgtcaacgaagactcnatatacatcatatacgttagagagtgacatgactgcgcagacgcttatatgtgctcgtacgtactcaaagttatcacatcatgccatatcaacatctcgtagctcnctctacnttactaatagtacatatacgacgaagagtggcagtgatggatgtacgccaacaagtacacgtagtanttgatacacaaatagtatagctgtgagagtgactgaggatggttgtttgatggcgtcgaggctgtctatgtgtgatcgtatacttcgacataatccagcatatagcttcagatcgtncgtctacagtgatcgtntcgcacgcacagatatgataccgctcgtcacagacagcgcacatggacgcatcgaacgacgagagcaaagataacatatatgaggcgacagagctgtgcgacgacacgcagtcgatactacgcgagccgactacaagagacgagtaacagaggagcgcgatactaaaacgacaacgtagctagatagcgcgtctagaatacagtagtgagcatgatgcagatgagcgtgagtcgtcgtgctagtgtcgacagtagttgcgcggttcgcgtcgctcttgtcctcatctcactactgctcccatacgagctgactatgacgtcgacgccgggatgggtgcgagcacagncacgaagaagatagtataaacatatatatagtnaccacgtgcgcgcgaccctgtcgagcgcatcacncaagggtgacgcgaagctcactantagacagaagcacgagaagacacacngtgatctagatataagatggagtcgtcgtacaatcancagctagagagngcatgcatgagtagcgccgagagacagcatcacttgagtagcgcgcgcnanatgagtgacacttactacactcatatacatcaatacatatgacggcgagacagagattacatatacactaatatatatagtactctatgcctgcgagcgctcacctacgnctcttcatctcgtgcaaacatcagagtacttcaggcgactatatgatatagacagtatagcgtcgatgatataatagagtgggagtggagaagggagtgcgggggagggcgaggtcgtg

SEQ ID NO: 1985 - DNA, 1368 bp, Glycine max
  misc_feature (1)..(12): n is a, c, g, or t
  misc_feature (17)..(31): n is a, c, g, or t
  misc_feature (38)..(38): n is a, c, g, or t
  misc_feature (44)..(44): n is a, c, g, or t
  misc_feature (52)..(52): n is a, c, g, or t
  misc_feature (82)..(82): n is a, c, g, or t
  misc_feature (1139)..(1139): n is a, c, g, or t
  misc_feature (1249)..(1249): n is a, c, g, or t
  misc_feature (1296)..(1296): n is a, c, g, or t
  Peptide Sequence Number=SeqID_9545
  Probeset Number=SeqID_11764
nnnnnnnnnnnnaaaannnnnnnnnnnnnnnggtgcgnggccangatagaanaagaatgtgcaaaccaagagaaactaacanccgccccggggccactgaacactatttacatgatactccacccacaatcttaattgttgatcaaaacattatcggtttctcgcaatacatatgcaatagaccatcgtccttagtcactaacatccttatattatcttgtacagtacattcttttgtcaatctctgaagacatctcactgctctgttagcgcccctctctttcactatctctcctttcacctacttacacgcatactatgcgcgtgtcgtgtgggttacactaccagtatatactgttacactcattattctttagccttattctttgtacatctatccatacagagatctaagcttacatcgttcatctgacctcattgtcacgggcaattacatacatatctagacaaatatcgcacagttctccctcaacgtgcagacctccaactaagatccataaataacatccaccacgaactcgctctaatcaccacagtctctctcaccccgaagtcgcttcacaacaaacatcgcctccaacgatacgccgcaaaccctatatcgccctctcatccacctgatcgtcccaccactactctatacaaataccccaagcatcaccttcgcacccaaaggctagacatctcgacacgtactaccactccaccctgcactcttattccacactctccaaaccctacttctgcacgaaattgcaccccatattgcgcctctgcgaataatcataaggcccctcccttggtccccgacaccacggtgagcaaccacccccatctctaagttggacagcacaatcataccgaacattgtgcacccacaacctcactcacgaattccacctcatctcctcgcctgcgaaggccacaatgccacctatctaatcgcaacggacctctctggcgcactacaaacttcttctcgcaacacactcggccaacggactcactcatctgggccaaactactccccatatcactctaatatacgagcagacacagtacataatataacaacaggcgaatatcaaatttcgccctcacaacaacccgggcactanacggctcctccaacaataaagactcttccttcataaacatacactctctccccattcgcgaccacactccctctctccacactaccaacgcgtcccacatctgcgatcanacagacgccatgcgaaacaatactctacaaaataatctatcgtgccnacgaagacaaaagaatctctaccctccacctcgagaataaaccagaaatcactctcaacagccacacactca

SEQ ID NO: 1986 - DNA, 1370 bp, Glycine max
  misc_feature (135)..(135): n is a, c, g, or t
  misc_feature (434)..(434): n is a, c, g, or t
  misc_feature (795)..(795): n is a, c, g, or t
  misc_feature (840)..(840): n is a, c, g, or t
  misc_feature (960)..(960): n is a, c, g, or t
  misc_feature (1206)..(1206): n is a, c, g, or t
  Probeset Number=SeqID_11765
acagatagtgcgagagatatggatgataacaggtttgagcatcgcactgtggggcggaaggcgctggtgctgaaccaggcgccgcgcgccgcgcccacgacgtgcgcaacaaaaatgcgacttctaacaaacaangttgtttgtgtaataaacagaaaagagaagagagagaggagataggagagaagcaaaagtaaccgagaggaggcaataagtcgttgagaagactcgcggatctattcctggagagacgtaagactggcgactttttcatctcgcattaaataaattctaatatcttgtgtcgttttcagttggcttgcttttgtttagctatgctcgcgaggcttcgcggcgtggctcatccgaaccgatctgccggcatcgcatgtggtgctcacccgcggtaatctcgctgtacacacgacacccancctattacacctctctcccacaaacacactacactcaacctccacatctcttctcgctctacctccctgcgcgcgtcgcactcccccgccgcctccgatcctaccaccttgcgcagcgaccagtgtctctctacccgcgccgcccgtccctgtcgggtctcttgttctccgcgccacgacggcgcgtcgcccggactcagaacgacctcgtctctgtgtattgtctctcattctctgccttataattgggtgccgctgccgcgcgaccccgccaccggcccgataccgcgcgcgatcacctcgcttgagctatgtgtactgcttactcattgctggtctgatattgatttctcactctggngtgggcgtgcgtgtcgcacccgtcgtcgtggtattaccacctcgncgccgtgataggaaacgtcacaaagcaatcactctaggatatttattgtgactaccctgcctgtccttcacacgtcgccgctcgtgtgtcggtgtgcgtagtgtggcgagctcgcggganaccacactcttcccgtacgaccccgcgagagaccgctcgcgctctactcctcgcacactcacatatagcgcgcctaacacagctcaagctgagctcgagtgtcggcccactcattatctctcacactcgtatccacgtcccaaccgcctctacgtacacacacaactcgcgcgtcgcagatgatctatatctatcgcgcgtcgccgcgcgttctcctctcttctaattcgcgcgcggctcctgggngcgttgcgcgtcgcgcgcgcgcgcgcggtgtccgttatagatagacatatccactcagactgtcgactgacgcctactaagttgacgctctacatagtgctgttccgagtctatatatactgctgtgtgtctatactcatcatctcgtgtgcgctccaattccg

SEQ ID NO: 1987 - DNA, 607 bp, Glycine max
  misc_feature (599)..(599): n is a, c, g, or t
  misc_feature (601)..(601): n is a, c, g, or t
  misc_feature (607)..(607): n is a, c, g, or t
  Peptide Sequence Number=SeqID_9546
  Probeset Number=SeqID_11766
ttttttttttttttttttgaattaagctaagagtgtttttagtatatatggaatatatctccttaaattaagtcatatatcagcaaaaataaactaaaataaaggttctgaggcagcaacaaaaaaaaagctctttaatatagaaatatttatattattacaatatcaactgctaaactatgcctttttacttcttcttcttacccttcttctttttcttctttccttgttgaatccttgggaatggcactctcaattcattatcagctggattactaggcgcaattattgtgcggacaaacttcacatcaggataagtctgacgaagctcaactaggtaaggatctgatatcttatccgtaaagtttatcaagcagatcttaagcttagataatgatttgcagatcatatttattccagtctctcctacaggcacaaaaccattcatgtccaagatctccaagtttggacaagcattgcagaattttatcacagcgccttcagaattgatcttggttgaactcattctaaactcaactaagtgcttgaacccttcatctttcttcaccaatgaatcatctgcttccttatatcctganancaagtn

SEQ ID NO: 1988 - DNA, 498 bp, Glycine max
  misc_feature (1)..(2): n is a, c, g, or t
  misc_feature (9)..(9): n is a, c, g, or t
  misc_feature (11)..(11): n is a, c, g, or t
  misc_feature (13)..(13): n is a, c, g, or t
  misc_feature (17)..(17): n is a, c, g, or t
  misc_feature (47)..(47): n is a, c, g, or t
  misc_feature (50)..(50): n is a, c, g, or t
  misc_feature (54)..(54): n is a, c, g, or t
  misc_feature (61)..(61): n is a, c, g, or t
  misc_feature (67)..(67): n is a, c, g, or t
  misc_feature (72)..(72): n is a, c, g, or t
  misc_feature (77)..(79): n is a, c, g, or t
  misc_feature (96)..(96): n is a, c, g, or t
  misc_feature (106)..(106): n is a, c, g, or t
  misc_feature (126)..(126): n is a, c, g, or t
  misc_feature (143)..(143): n is a, c, g, or t
  misc_feature (159)..(159): n is a, c, g, or t
  misc_feature (165)..(166): n is a, c, g, or t
  misc_feature (170)..(170): n is a, c, g, or t
  misc_feature (173)..(174): n is a, c, g, or t
  misc_feature (177)..(177): n is a, c, g, or t
  misc_feature (181)..(181): n is a, c, g, or t
  misc_feature (184)..(184): n is a, c, g, or t
  misc_feature (187)..(188): n is a, c, g, or t
  misc_feature (190)..(190): n is a, c, g, or t
  misc_feature (199)..(200): n is a, c, g, or t
  misc_feature (207)..(207): n is a, c, g, or t
  misc_feature (210)..(210): n is a, c, g, or t
  misc_feature (215)..(215): n is a, c, g, or t
  misc_feature (217)..(217): n is a, c, g, or t
  misc_feature (219)..(219): n is a, c, g, or t
  misc_feature (225)..(225): n is a, c, g, or t
  misc_feature (228)..(228): n is a, c, g, or t
  misc_feature (238)..(238): n is a, c, g, or t
  misc_feature (244)..(244): n is a, c, g, or t
  misc_feature (248)..(248): n is a, c, g, or t
  misc_feature (252)..(252): n is a, c, g, or t
  misc_feature (327)..(328): n is a, c, g, or t
  misc_feature (356)..(356): n is a, c, g, or t
  misc_feature (399)..(399): n is a, c, g, or t
  misc_feature (412)..(412): n is a, c, g, or t
  misc_feature (419)..(419): n is a, c, g, or t
  misc_feature (457)..(457): n is a, c, g, or t
  misc_feature (478)..(478): n is a, c, g, or t
  misc_feature (482)..(482): n is a, c, g, or t
  misc_feature (491)..(491): n is a, c, g, or t
  Peptide Sequence Number=SeqID_9547
  Probeset Number=SeqID_11767
nntctctcncntntgtncgcaccagtttcaccgcacgaatatcttgntgnttgnagcgatncgaganaaacnctgtnnncatgatggcttaccagnacctccttanaggaggaggagcttctctcngactccttccgtatacnaggaaaatgagaatgngatgcnnggtnaanntgngggnaantgnnangaataaagnnttacttnatntaganantnttgtgnccnctatctgcanacgtcntacnaganaatgattgagtcttttacgtttgattggctaaacatatcatgaaacaaacaagcacccagtagaaatggttttcnnccagtgaaagactggaaagtccattttnaggcacatggaatcccaaaacatggatagagtaaatatccccngggccagctccgnaaataanatcttattctggaatactctggggggccaatagccacnggcccaccttctatttttgtnaaantagccttcnagcttaa

SEQ ID NO: 1989 - DNA, 1507 bp, Glycine max
  misc_feature (303)..(303): n is a, c, g, or t
  misc_feature (541)..(541): n is a, c, g, or t
  misc_feature (560)..(560): n is a, c, g, or t
  misc_feature (677)..(677): n is a, c, g, or t
  misc_feature (694)..(694): n is a, c, g, or t
  misc_feature (1247)..(1247): n is a, c, g, or t
  misc_feature (1441)..(1443): n is a, c, g, or t
  misc_feature (1456)..(1457): n is a, c, g, or t
  misc_feature (1460)..(1463): n is a, c, g, or t
  misc_feature (1468)..(1469): n is a, c, g, or t
  Probeset Number=SeqID_11768
cggtggacgagagagtggtacttagtgtagcgcagcgatacagcgtgcgacgagtatgctgccggctcgcactcgcaggcactgtgcactcacagcacgcgtcgctcgcgagactgccactcatccagcgtcgagatcccacacacgactcccacgcagcacacgcgcacgcgcctgacatccggacagccgcgcgcgctcgggacgcccgcgtgcataataacgggcccgtgcagggcgacagaatcgagcgcgcagttgcagtcggtatgaggcctagcaatagtcatgcagtatagtcgnagtgaacaatcgtagtccagctgcctcctacgctccacgtccagacacgacgccagcgcacgcagcagtgttgcgtatcaacgctgcgccagctctccagacagtcacaacgcatgcgaggggcaggaaggatcgatgtgcgcagtccaattatcagcagtcaatcgacgacaacatcaggcgatgaaagacggctagcacctcgatattcagtttgcagtacgttctgcgccgagangacgtgggacagtggttgngggcagcgtgtgggaggtgggtggcaagcatgtctaacatagtgcgacacatatgcacattatcactcacgccatagagacggacgcgcgggttgctgcgtgttttcaacaccactnctcttctatcaatcttntactattatttatatatctaagttaataaataaaatataacttcagaattaactcgactcccacatcgcatcacgaataggtttaagctaacatatatatcttgtctcgtccttatctctgcctgcgccggttcccgcattggtgagtgcgcaacatcgcgacgtgaggagtattggtgtgtcacgggtgaggccgcgcgagacgcggtccgtggcgcggcgggcatagagacagtatatagacagatgaagcgacgtgctgcgccagcacgatgcgcaccgacgcctttgccgggagagcggctctagagcagagcactcgcggatgttctctgcggagatggtgtgctacggtactccgacattggccgccatgcgagggcaagagtatggggtgggttctataaagaggaagggtaccccgcgctgctcgttgcgggtctagacaacaacacaaaagcactaaaatgtcagacacagagggatagagagcggtcgcctcactgatcacagagtgcttctgtgacatcctctcctcgctctagtttggtancacgtctatcgacagaggttgctgagcccgaggcgtcgcgcagcaggggcgcgcacgaaggagaagagagatagaagaggagccgaggaagtaatcacaaggcggggtgtggcgagaacgcagaataagacggcggggagttgcctccctgggcgcgtatttcttggggtgagatgggtagatcaagtaatgtnnntacgcccatcgcnnccnnnncaccnnaaggaggaagggcagcagcccggagacaaagaaaaacc

SEQ ID NO: 1990 - DNA, 1478 bp, Glycine max
  misc_feature (1)..(572): n is a, c, g, or t
  misc_feature (1381)..(1478): n is a, c, g, or t
  Peptide Sequence Number=SeqID_9548
  Probeset Number=SeqID_11769
nnnnnnnnnnnnnnnnnnnnnnnnnnnnnnnnnnnnnnnnnnnnnnnnnnnnnnnnnnnnnnnnnnnnnnnnnnnnnnnnnnnnnnnnnnnnnnnnnnnnnnnnnnnnnnnnnnnnnnnnnnnnnnnnnnnnnnnnnnnnnnnnnnnnnnnnnnnnnnnnnnnnnnnnnnnnnnnnnnnnnnnnnnnnnnnnnnnnnnnnnnnnnnnnnnnnnnnnnnnnnnnnnnnnnnnnnnnnnnnnnnnnnnnnnnnnnnnnnnnnnnnnnnnnnnnnnnnnnnnnnnnnnnnnnnnnnnnnnnnnnnnnnnnnnnnnnnnnnnnnnnnnnnnnnnnnnnnnnnnnnnnnnnnnnnnnnnnnnnnnnnnnnnnnnnnnnnnnnnnnnnnnnnnnnnnnnnnnnnnnnnnnnnnnnnnnnnnnnnnnnnnnnnnnnnnnnnnnnnnnnnnnnnnnnnnnnnnnnnnnnnnnnnnnnnnnnnnnnnnnnnnnnnnnnnnnnnnnnnnnnnnnnnnnnnnnnnnnnnnnnnnnnnnnnnnnnnnnnnnnnnnnnnnnnnnnnnnnnnnnnnnnnnnnnnnncactatcaggttcatctgcacagagaaatgactcgggcaatgcttcagcagcagctgcccatgcaaggatgtctgttggggcaggagggtttaaacaaggacccaacaattctagttcacccaaaaataatatatctgcagattctttgtacaactcagcaagagaattgcatcagcatatttcaagaattcggggggagtttccctctggtggaatgcctttccaaccatttcaagcagttgctcctcaacctattcacacaggcgctgtttcacagtttcccaaccggcctatggttttccctcagttagcatctgctgaccaatctagatttcaaatgcagcccccttgaggaggtcttagtcctcatagccagtcaaggcagaaacaggaaacccttccacctgacttgaatattgattttgaatcaccagggtcacctgttaaacaatctcctggtgtccttgttgactcacagcaaccagacctagctttgcaactatgatgacggtattgttgtcatggtatggatatttccacttgaattggactgctcatgaaatttggagctcctgaaatcgaatgttgaattctgatccgttgaaggtgtgcataataaatgtgaaaatgccaaagtctaacacggattggaatttagcacaaggtagtcctgagtctaaatgacagtgctgctagacttcggtgtacttaacaagaataacttcaggacttaccatagtttccctgatgaggattactgaatcatggcacccgtctgttaaccttagggttgaaattagtaaaaaannnnnnnnnnnnnnnnnnnnnnnnnnnnnnnnnnnnnnnnnnnnnnnnnnnnnnnnnnnnnnnnnnnnnnnnnnnnnnnnnnnnnnnnnnnnnnnnnn

SEQ ID NO: 1991 - DNA, 443 bp, Glycine max
  Peptide Sequence Number=SeqID_9549
  Probeset Number=SeqID_11770
cgagaggatcacggacaggaggaaggggtacgaggaggagatcgactacgaggtggacccgaggaggcccgtgagggggagcgacacgttctacaggtacacgggctccttcaccacgccgccgtgcaccgagggcatcgcctgggcggtggccaccaaggtgcggcatgtgtcgcgtcaccaggtggagctgctcaaagacgccgtccacgaccatgccaggaggaacgctcggccgctccaggaggccaacggcaggggcatcgccctgtacgacagctggcctcgttccggccccgggaattaagacggccggaagcactgaatctgttgcgttaacctctgttgcactgaacgttgtaaccgtagttgatcttggatgcactgaatctgcgttcatgctgtggctgaatatataggtcatagtttacatgttttttctg

SEQ ID NO: 1992 - DNA, 588 bp, Glycine max
  misc_feature (203)..(203): n is a, c, g, or t
  misc_feature (237)..(237): n is a, c, g, or t
  misc_feature (255)..(256): n is a, c, g, or t
  misc_feature (261)..(261): n is a, c, g, or t
  misc_feature (266)..(267): n is a, c, g, or t
  misc_feature (270)..(270): n is a, c, g, or t
  misc_feature (278)..(278): n is a, c, g, or t
  misc_feature (284)..(284): n is a, c, g, or t
  misc_feature (298)..(298): n is a, c, g, or t
  misc_feature (341)..(341): n is a, c, g, or t
  misc_feature (410)..(410): n is a, c, g, or t
  Peptide Sequence Number=SeqID_9550
  Probeset Number=SeqID_11771
aatattggtggtggcagagtagaatagcagatggcgatggtttccatggcattctgtgtcagcactgcgacttttccgaatctaaacaggtgtcgtggagtggcatatgcaagtttgagcaacaaagcaagtactacatctttgggagtgcgagttacagagggagaggggaatttgccgaagcttgttctcacttccccggncggtagtgaggctgagatatacctgtttggaggntgcattacttcttggaanngtccnagtgnntangacctccntcttgntcgccctgacgctngtttcatggggaacaaccccataagtggagtgttccccattgnttttccacagtttggcctggtccaattcgcagcacgggttttgcacgaaaatgaattggactggtgtcnattctgaaaacccgaaggaaatcctggtggaactttggagctgaaggatgtccctaatagcgggaaggggggattcccccttccgggtttatccagggcacccttaagggaaaaactttgggcctgggcctacggtaaaaaaccaaaaaaaaacttccctttttaaccggccctgccc

SEQ ID NO: 1993 - DNA, 1557 bp, Glycine max
  misc_feature (1)..(1): n is a, c, g, or t
  misc_feature (12)..(12): n is a, c, g, or t
  misc_feature (34)..(34): n is a, c, g, or t
  misc_feature (48)..(48): n is a, c, g, or t
  misc_feature (234)..(234): n is a, c, g, or t
  misc_feature (332)..(332): n is a, c, g, or t
  misc_feature (458)..(458): n is a, c, g, or t
  misc_feature (626)..(626): n is a, c, g, or t
  misc_feature (754)..(754): n is a, c, g, or t
  misc_feature (787)..(787): n is a, c, g, or t
  misc_feature (792)..(792): n is a, c, g, or t
  misc_feature (794)..(794): n is a, c, g, or t
  misc_feature (904)..(904): n is a, c, g, or t
  misc_feature (921)..(921): n is a, c, g, or t
  misc_feature (945)..(945): n is a, c, g, or t
  misc_feature (965)..(965): n is a, c, g, or t
  misc_feature (973)..(973): n is a, c, g, or t
  misc_feature (1100)..(1100): n is a, c, g, or t
  misc_feature (1104)..(1104): n is a, c, g, or t
  misc_feature (1157)..(1157): n is a, c, g, or t
  misc_feature (1246)..(1246): n is a, c, g, or t
  misc_feature (1343)..(1343): n is a, c, g, or t
  misc_feature (1345)..(1345): n is a, c, g, or t
  misc_feature (1356)..(1356): n is a, c, g, or t
  misc_feature (1365)..(1366): n is a, c, g, or t
  misc_feature (1376)..(1376): n is a, c, g, or t
  misc_feature (1396)..(1397): n is a, c, g, or t
  misc_feature (1408)..(1408): n is a, c, g, or t
  misc_feature (1410)..(1410): n is a, c, g, or t
  misc_feature (1417)..(1417): n is a, c, g, or t
  misc_feature (1423)..(1423): n is a, c, g, or t
  misc_feature (1474)..(1474): n is a, c, g, or t
  misc_feature (1480)..(1480): n is a, c, g, or t
  misc_feature (1496)..(1496): n is a, c, g, or t
  misc_feature (1503)..(1503): n is a, c, g, or t
  misc_feature (1506)..(1506): n is a, c, g, or t
  misc_feature (1523)..(1523): n is a, c, g, or t
  misc_feature (1532)..(1551): n is a, c, g, or t
  misc_feature (1556)..(1557): n is a, c, g, or t
  Peptide Sequence Number=SeqID_9551
  Probeset Number=SeqID_11772
nggtgttgtgtngcgagcgagtgtgtcggtgtgngacggtagcgcagntgcaatggagtgctgtggttggcgtagagcagagagatatttgtggtgttgtgtcgttatatctcgcgccgggagcgcattggcacttcgcacgcggcttgcggggagtctgaaacgcatatctgggagagatgaaggtgtacgcaggatgtgtagtagatgtttgagcgaagtgaggtggtgtgntgtgcagaggtatgagtcgggtcgagaaggtcggtgtgtgcacggtggacggtatgcagcgcgggagtgcttcgtaacatatcatatcgaatgccacngattgagactgactggactgtgttggtgatgctcatgttgagagcgagaggtcatcacgatcgtcttgtgttcttctttggagtatgtatgggtgtggatatcgtatttatgataggtatgagcgntcgcacttggtacaacggtaggcaagtacatttgctgatatcagaatgatgagatgtagtgtgcggcggcgttgagcagctcgcgagccgaagatgcacgccgacatcgccgagcgctcgtggtgtatcttgtcatatagttctggtatcgatcaggcggcgacatgntgtgcgagagagaggcagacgagcagtatgattatagtaggtgatgcaggtaagtaagcgaggtgtgtgagtgatgtgtgcgctggtcacacataggacataggagcagcagtgttgtatttctcctnatatactgacgaacagcgtgccatcgtagccgnacctntncgcgacacatcgcacccagagatcacgctagagtgctgtcacgcgctggctcggcgcagcgcggtagcgagtgcgcgtggtcaggcgagtggtgtggtcggtgtcgtgtngcggaatgtggaggggnggtatgtgatcgtgtgtgtgtagngggtgtagagatacgctggnctatctgnactctcacgaggcgcgcagcgcacagagcgcgcaggcgagagcgacggagtggggagagtggcggcagacagccgagagagcgagagaagaggaggcgagagagaggaggagggaggaggcgggcgngagnaaggaggaggtgcagtgagatgagatagaggtgagaatggagagagagtcatnagagtgtgacagcgaggtatggagagtaggcggcagtacgcacagtgcagagagagatcgcacgacaggtccagcagagcagggcgacngcgcgcaggcgaggacatgtgatgcacacgcgcacgagacggagagacaagcgagagagttgtagttggtaagatgcatacgccctccgtcataccnantgcctcccgcngtcccggcnnctccgctctntcatcacgcgctacagtttnncgcgtgctctntntgtcgcngtcctntcgcaacatactaaacatactcacccaccatcaacgactatacaacacacntcacanaaacaccaccccgcancaagacngcncacgcaccaaaaacccnccccccccnnnnnnnnnnnnnnnnnnnnccccnn

SEQ ID NO: 1994 - DNA, 1592 bp, Glycine max
  misc_feature (105)..(105): n is a, c, g, or t
  misc_feature (134)..(134): n is a, c, g, or t
  misc_feature (137)..(137): n is a, c, g, or t
  misc_feature (139)..(139): n is a, c, g, or t
  misc_feature (145)..(145): n is a, c, g, or t
  misc_feature (189)..(189): n is a, c, g, or t
  misc_feature (446)..(446): n is a, c, g, or t
  misc_feature (454)..(454): n is a, c, g, or t
  misc_feature (994)..(994): n is a, c, g, or t
  misc_feature (1033)..(1033): n is a, c, g, or t
  misc_feature (1177)..(1177): n is a, c, g, or t
  misc_feature (1216)..(1216): n is a, c, g, or t
  misc_feature (1218)..(1218): n is a, c, g, or t
  misc_feature (1220)..(1220): n is a, c, g, or t
  misc_feature (1397)..(1397): n is a, c, g, or t
  misc_feature (1495)..(1495): n is a, c, g, or t
  misc_feature (1517)..(1517): n is a, c, g, or t
  misc_feature (1530)..(1530): n is a, c, g, or t
  misc_feature (1555)..(1555): n is a, c, g, or t
  Probeset Number=SeqID_11773
gtggggtgtttgtggcccctcgggtgtttggctgtgctgtcttatctccccacccttctctcactctcgttctgactcataagttcagagttataatcctctctntgcacctgtcacgatcaggtgccatatanctntntatttntcccccgctcggactttgtaccctgaaacgcgcatctatcaacncttacgtgaggtacagcatgtctctcacgcgactcaccgcacctcctaccgctcgtttggtgattgagtgtattcgcctatgtaaatagacaggaaccacgcgatcacgcgataggccatatcgcgagactatatattgcgagacgaattcgccacacaccagaacccgcacccgatcgaacagcacacatcaacgagcaggcgtcttccgcatcgcgaacacgtgttttcgcgaatgtactccgtccatatattcntgcacgtnatcatatagtcaatcgcaatccattcctctcgatgtctatacttcccttgtatacacaactccagacgtaaacgcgacctccatcacctcgctcctcatcatgttactcgttattgtatagcaccaatcatcgtgctaaggtcgcaccgaagtaacatgcgctatcgtgatgcacactatcatacatatttgtactgcttcctcctcccgcacgcggcaccggattacgttgtagcaactgactccgtatatgtagaacgcgcgcattattttacacgcacacacaagtgacacgtgtatctctatgacggcgagcgcgccgcgcgtgtgcgtatcgcgaactttatatatctatatcgcgcccgcttatgctatcatactatcttacgcttcagctatacgccaacgtcttctatctatgccgcacacgattatccacgcgacatgtataattataacgcaccgccgatctctacatcgatctaaacacacgagatcacatagacgcagccccagagccacgctgcgaatatatactcnagtcacgcttcgatactgtgctggcgcgccgtagagtgntagtaatgctcacgatactatatattataatcgtcgccgcgctatccaccaccgctcatctccacactcttacaacgtaattagtggtacgtcacactaacaaactgcacaccttatcgatatatcgccactcacccaacatantctctaatgtacactcacaccgctcaagcacgcataggnanantatatgtgtgctccacaacaattacactggccacgagcctaccaccgtaacagcacttaagtattgagtaatctattctgatatgatacggctccgctcgtgcactcgcgcacacagcatcttctctctcaacacatatactctgagttacatctgtccgtatatcgacaactcatntatcatatcacagatcgcaacgatactctcgaacactctgcacatagatatatctctatatcgagacatcacctctccacgatctatacacgtcccancagacacacgacatatacctcngctattcttatcncgcatgtctatcacacacacactancaacacactctctcgacgactatcatatcatatatcg

SEQ ID NO: 1995 - DNA, 1657 bp, Glycine max
  misc_feature (1)..(1): n is a, c, g, or t
  misc_feature (7)..(7): n is a, c, g, or t
  misc_feature (34)..(34): n is a, c, g, or t
  misc_feature (77)..(77): n is a, c, g, or t
  misc_feature (85)..(85): n is a, c, g, or t
  misc_feature (97)..(97): n is a, c, g, or t
  misc_feature (129)..(129): n is a, c, g, or t
  misc_feature (139)..(139): n is a, c, g, or t
  misc_feature (170)..(170): n is a, c, g, or t
  misc_feature (177)..(177): n is a, c, g, or t
  misc_feature (289)..(289): n is a, c, g, or t
  misc_feature (298)..(298): n is a, c, g, or t
  misc_feature (358)..(358): n is a, c, g, or t
  misc_feature (369)..(369): n is a, c, g, or t
  misc_feature (467)..(467): n is a, c, g, or t
  misc_feature (532)..(532): n is a, c, g, or t
  misc_feature (539)..(539): n is a, c, g, or t
  misc_feature (563)..(563): n is a, c, g, or t
  misc_feature (616)..(616): n is a, c, g, or t
  misc_feature (814)..(814): n is a, c, g, or t
  misc_feature (1009)..(1009): n is a, c, g, or t
  misc_feature (1176)..(1176): n is a, c, g, or t
  misc_feature (1263)..(1263): n is a, c, g, or t
  misc_feature (1466)..(1466): n is a, c, g, or t
  misc_feature (1553)..(1553): n is a, c, g, or t
  misc_feature (1632)..(1632): n is a, c, g, or t
  Peptide Sequence Number=SeqID_9552
  Probeset Number=SeqID_11774
ncgtatnactctacgtgctcagcgcatcgactcnatatacacactattcagacgcatcagacgtagtctaagcagtncgatatgnacgcatgcgcanatcgattagagtagctatcatgatagtgtcgnaagacgactngcatcgcacataagccacagtgagcaggcgncacgagntgcacgcgcagcgtcaagcgagccatcatcgtagctgcaagtcgtgacagcagagcatacgtgcgtgacagacaccgcacgttctcgtatcgtgcgtctgtcaatgcagtgnaactacagngatgcatctactgcgacgtcgctccgcgcgcatcatacaacatcagactagcggtagcgncagcactgtgntcaggccacgcgacatatatcagctacattatatcaccctagagcgcgctatgctcatacagctgacgctctgcacccgtaccgtgatgctcatgagnagatgtgatgtagtccgcgcgattgtgtgcggttgtagcatagatatatatctacatcacacacncgttcgncgtcgtgcgattgcagtctcctcngtactgacatctctatcaggcgcacccagacacacatgagcgaccggctgcgnttgccataataactgaaagtatatatatccatacaaatacatagcgatgacgccatcacacgcatacgctacgcgttcaagcactcttcgcagtccgtgctcatacactctatgttgcgcgctgcagcgtgcaccgttgcacatgttactcacacctagagtattgatgtatctcactacgtggacggtcgcatctancacgccatacagtgatgccattgcgctaagatctagcctagttacaggcgctgtcgcacttcgtcaaggatcgatgagctctgtcttgttggtgttatagggcgtcagatagagcattgatgcgtcatctacaattatatctccatcttctaatattcggatgcacagtgtccactcgaacaacgtttagacgtngtggctacgatccgtgccatctatgaaaccgttacagatctactacgcagctggatgcggactctcgacagatcaacaactaaacacaagatcacatcagcgctaaggtaataatatcaaagctcgcagtcacgcgcgtccgagagagtccagtctaccgtccgaangtgtttgtaagtggtggtgtgtatatgtatgttgctgtatagatgtattatgtacgagttccttgtgcagctccgctcacacgtatnagcagaccatcgattgagcgaaataacatagagtataacgcttcttcgcagtatcatactacagcatctattgtcctctcactgctcctccgtgtcacctcaaatcaatctgccactgcgtgctgcagtgagccaatatcctgtaatatggcgcaccgaccacgacacagacgcgcgtgtgtagtatacggcagaacacacgngaacactcgaggtgtgcgcggaagttgagagagggtgtgatcagcattattatctatacgatatgatctgtcgacagagaagagtangtgcgcgcagcgtctctcaagtctcatatatcgatggtcgtttgtgtgctctaacacacgcatcacacagagagctacncacgcgggcggtgcggcagagagag

SEQ ID NO: 1996 - DNA, 831 bp, Glycine max
  misc_feature (831)..(831): n is a, c, g, or t
  Probeset Number=SeqID_11775
gcacgagaccattacctagaacatcctaatcgaaaagtggttgcatctggatgcggcggccgcgtacaggaggaggatgctgaggccgatgctggcgtgctgcaagctctacgtctccgagggccggagcgcggcggccctgcgcgccgtcgagcaggcggcagcgccggcaccaaccggccgtagtcctcctcaacaccttcgccgacgacacctacaaccgcggtcggctaacgagctgcgggtaccccgcctcctgggctcccgtccgagacccgccgtgcacgcatgcatgcggagccgatgattccggcaagaatccaaggacccacgcatcggaggcccatagaacactccgggcccccaaacggcacggacgacgcaaccacgatgggatatgagggggcgggacgaaaaaatagatgcggacttttccgacgcccacatcataataagcgaggagcagcgacacttcctcgatggaacgggatcgaataagacgggtctcacagacctagacgcgacacaggtggggcctacgacattggagaaaataacatggcgagaacagaaggacatagcaccgaaaggaggaccttataccagtaaagcacttcgaaacggggcgagccgcgacccgatacccaccagaaaggagggacccacagcaaaagaatgggcggcagggcacgatcacgcggcagcgatagaaggtagaagcccaaccgcgccagagaggacacgacagaagccggtgcgccaggagagggagccagaagaggacccgatcatacccaggaagagacggggacataaagccgctgacgtgan

SEQ ID NO: 1997 - DNA, 511 bp, Glycine max
  Peptide Sequence Number=SeqID_9553
  Probeset Number=SeqID_11776
ggaacagggtctaatggtccgcggtatcatgcgcgcgcactccgacttctatacggtgattgccactcccatcgacaactccgacatgatcgtgacggagtggtgcgacaaatccatcattctgtggcacctcaacaaggaggacaagaactacggtgtccaccgccgtcgcctcaccggacattctcactttgtccatgacgtcgtcctctcattctacggacatgtcgtcctatcctgcttctgggacggcgagctgcgcctctgggacctcatggctggcacctctgtgcgccgcttcgttggccacaccatggacgtgatctgcgtggggtgctgcattgacaaccgtatgatcgtgtaggcatatagtgaacgctctatctatgtgcggaacactctgtgtgattgcaagtgcacgattcaagatggtgatgccgattcagattggtgtagttgagtgcgaatgagccctagcactctatgaccaacaattgggtcttgcttatgg

SEQ ID NO: 1998 - DNA, 880 bp, Glycine max
  Peptide Sequence Number=SeqID_9554
  Probeset Number=SeqID_11777
aaaccctaggcccgagctcgctgtcgctgctctgccgtccctctccccgacccgacccgccaccctcctctacaccttcgccacggctatgtccgcccccaccggccatccgctcccacgggagagacctagctgcctcctcccgccctcgtgcgatcccagcgcccatccctaacctagctcctcctcccactcacgccgcctcctccccacccgcgcctccctctcctccttccccgccgccgcccggcctcctccacacccgggcctccctctcctccttccctaccgcagcctggcatcctccacacccgggcctcccactcctcctttcccgccgccgcgcggcctcctccccacccacgcctccctytccttcttccccgctgccacccggcctcctcccctcacggcctcctccttccacccctctgatctgagaaaaggagaagaaggggttggatgagcaagaagcagaaggactagaagaagaagaagaagaagggaagggaggtggggccatatgcatgtccatggaggtactcctctttggcgtaatgggccaccagacaagccagttctytggaatgcatgtggttcgagatggaggataaagggtacattggtgaattacacaccggcgcatcgtcgggaagatactgacgttggcgaagctggacctgacaagctgaagctcaatggacattattgttgctgattactggtgatatgctcaactaagtgtagatcagtcttttacgttagatgcgtttgcatggaccagttgacatgttttctgtttgcaagttcttgcacaattagaaacmccgtaatgtatttcaaatataagaaacgctgtattattagcttttgcccacct

SEQ ID NO: 1999 - DNA, 550 bp, Glycine max
  Peptide Sequence Number=SeqID_9555
  Probeset Number=SeqID_11778
aaattggaaattgatgaatcatggtcctgttgcagcatatgattcttatgttctggctgcccattgtgcccttgcctgtgagcttcagttgttccctttgattatcacgggggaatacttatttaccttacaataatgagcacagatatatgcctatcctgttagactatatggatcctctcattacttgctgactggcttacattcaccattacgtgatactcacacatttttaccaatcctagaggctctatcatcattgaagccatcttctgttgtaacccattgtagtgacagctcatatgagatatttgtaactgctatcgttgctgtccatgtttctgatctatttagaatgtgataagcttacatacatgctctgtctgttctgatttcttgtatattggacaatgaaattctctccactgcatcatcatcgtataatctgctcgctattcacagtatacctgttgcctctatatggttcaatgcacagcccttagaagcaaccttaattcatgcacctattcggaagattccttgtgtgtgt

SEQ ID NO: 2000 - DNA, 956 bp, Glycine max
  Peptide Sequence Number=SeqID_9556
  Probeset Number=SeqID_11779
atatattaaataacttcttgactaaacatgaaatcattcttagcaacaactcttcttgtcctcttccttgctcattccactcttgctcaatgggaagatatcactgaggaatcatcagaaacaactgatcgttgggtcttggactctctccaagacctcggagcttcctatgtcttacaaaagggagtctttgaaagcactagagcccctttccctgctgattactatttcatggatcaagtcgaaaagatcgagagaagaaacacctccacagtttcttattacagatttgttggtcgttttattgagccaactgaaaccgatggtggaagaggcccttcagcagtgagagtgaactttacagtcagctacagatcttcaaaccataactttattgtcacttcctacaactatagaacctactctaatggttatgaaactgagcaagatgaagctgaagaagaatacgaatcagatttgggcagtgttttgaactatactgtatctgacttgagaactttgaacaatggtaccagtgaattcactcctcttttaaacaatgctactgattatattatcgctgaagctatcaaagaaggtgatcttcctgattccgaatacaatatcacctatgtttatggagctgaatcttcagaagacgcaatgtataatgatcctgaaatccaccctaatatgaagttccttgtgaagtttgtcaacagtgaaggaaactatttcttgatcgaaatcagagcaaactatagcactgatgaagaaggcaatcatcaagttaccagaaatcctgagtatcaagtcctaatcaacagaattgtgacacctggcgcattgtaaagtgcaatataataatgcmcaatacatattgagaaattgtgagactcgtatctttatgatgaaagtataaaattgtttctttacctttataaagacaatattac

SEQ ID NO: 2001 - DNA, 1772 bp, Glycine max
  misc_feature (85)..(85): n is a, c, g, or t
  misc_feature (87)..(87): n is a, c, g, or t
  misc_feature (186)..(186): n is a, c, g, or t
  misc_feature (200)..(200): n is a, c, g, or t
  misc_feature (204)..(204): n is a, c, g, or t
  misc_feature (247)..(247): n is a, c, g, or t
  misc_feature (417)..(417): n is a, c, g, or t
  misc_feature (590)..(590): n is a, c, g, or t
  misc_feature (776)..(776): n is a, c, g, or t
  misc_feature (999)..(999): n is a, c, g, or t
  misc_feature (1029)..(1029): n is a, c, g, or t
  misc_feature (1115)..(1115): n is a, c, g, or t
  misc_feature (1128)..(1128): n is a, c, g, or t
  misc_feature (1355)..(1355): n is a, c, g, or t
  misc_feature (1362)..(1362): n is a, c, g, or t
  misc_feature (1406)..(1406): n is a, c, g, or t
  misc_feature (1444)..(1444): n is a, c, g, or t
  misc_feature (1446)..(1446): n is a, c, g, or t
  misc_feature (1569)..(1569): n is a, c, g, or t
  misc_feature (1627)..(1627): n is a, c, g, or t
  misc_feature (1631)..(1633): n is a, c, g, or t
  misc_feature (1636)..(1637): n is a, c, g, or t
  misc_feature (1671)..(1671): n is a, c, g, or t
  misc_feature (1721)..(1721): n is a, c, g, or t
  misc_feature (1723)..(1723): n is a, c, g, or t
  misc_feature (1730)..(1730): n is a, c, g, or t
  misc_feature (1736)..(1736): n is a, c, g, or t
  misc_feature (1738)..(1738): n is a, c, g, or t
  misc_feature (1749)..(1749): n is a, c, g, or t
  misc_feature (1756)..(1756): n is a, c, g, or t
  Probeset Number=SeqID_11780
tgcgctggtgtatagttagtatgtatgtgttagcacgtggcatgggcgtgagacgatgtgctattatattgagcgtggtaggcgnanagatgtttgtggcgagagcagacaatgagcgtacgtacgcgtgagctggagggtgagtgctgaagtgcaatagcgtggtaagagtgtgtgttgactaantgatagtcgagagntgtnttcgttcaggatgtgtggatgtatagtcatgcgtaatgtatanccaatatcagatagggtatcatgagagagattaggtaaatgagacatacacgcacgatgtcacacgctagtagcacaatggatgatatcgcgagtgtgtcgctgatcgaccacgacgcacacaacgacagatagactaatatatgagatgcgctgaggtgtcgtcatagnggaatatgagatcgtgcagagtgtggtcgtgagtgtgtgttaacacatagagagagatatcgatacagagagtgatgcataatatattacgaacataaagagatagatagggtatgcgtaggttaggagcgatagcgagaagagtgtgatggagggttgacgcattatatatntggggatgatcatactcgaatcgcgaatgagcgtatggcgcgaggacaagtggagtgggtctggagacacgactcagaacatgagtaagtgctgatatgatgtgtagcacgctacaatgatggtgtgtgagagagagaatagtacatgttatatgctatgttcatctgtcagacggcgagcgcganacagcggtgagtgtgtacgactagagatggagcgcgtgcaagtgtagagtatatgatatcggtgagtggtcgtggtgtgcgtgtgaatatcgatcagttgatgtcatagtgcttagctgtgattaatgttcatgttgtttgtgtgtgtagtggttgtttactcgtgagatgagtactaatatgttgtgtcgatgttatcgcatttactatcctgcgcatcgangactcgcaacagacagcatcgcggtgcgangagagacgcatactcatcttatcagcaagacggacgtagacgcggcagtgttgatgatgtgacagagtgagataatacacgagagncattgccatatangaatagaggccgagagacgagtagacggcagtataatataatgtagagaaatatggtataagaacgtgataagctatggtgatatgcatagatatacgatagatggcgcgagatggagggatagtgtagtaaagacataccgatcattattagtagtgctgtgcttgtgacatgtatgttgcatatattgattaatatgtgatataatatatgtatgatgtattatntattgangagagatgcagattatgtagcgtgtatataacagtagtgtgaangtgtcgtgtataatataagtatcatgtagtattgttgntntggctggctgtacgtctgtagattgtccttatatgtatgatatagcggtgtaagtttataagacgaggtgcgaggtagtgtggatctgataataacgccgcattgtaaattagtgtatgtgtntgtagcctgttggttgtgtaatagagaggtgtggtagagggagtgtgggatgagagtngtannnatnntgagggatgatattaggtatgtgtgtattctatnagtgattgatgttgtgtattgtctgtgttgtctcttttctttctgtctgnantagaaanacaaananatacaccacanactattntatacaaaaaacataa

SEQ ID NO: 2002 - DNA, 1364 bp, Glycine max
  misc_feature (105)..(105): n is a, c, g, or t
  misc_feature (152)..(152): n is a, c, g, or t
  misc_feature (318)..(318): n is a, c, g, or t
  misc_feature (590)..(590): n is a, c, g, or t
  misc_feature (700)..(700): n is a, c, g, or t
  misc_feature (862)..(862): n is a, c, g, or t
  misc_feature (995)..(995): n is a, c, g, or t
  misc_feature (1064)..(1064): n is a, c, g, or t
  misc_feature (1288)..(1289): n is a, c, g, or t
  misc_feature (1291)..(1291): n is a, c, g, or t
  misc_feature (1302)..(1302): n is a, c, g, or t
  misc_feature (1308)..(1308): n is a, c, g, or t
  misc_feature (1331)..(1331): n is a, c, g, or t
  misc_feature (1334)..(1337): n is a, c, g, or t
  misc_feature (1339)..(1347): n is a, c, g, or t
  Peptide Sequence Number=SeqID_9557
  Probeset Number=SeqID_11781
cgtatgtcgtatctcctgtatgcgcgcggatcatttgctctctagaatttctgtatgatagtgtagcattgcctcgcgcacactctgcgtcacagcagcgcgagntcgtgcgcggacactccccatgatgtcacttcgcacgcactaacgcnccaggcggctccgcggagataactgcgcctgggcgcacgccgtgtagcaacgtctcgaccgcagagcacgcgcaactccgcttgtcacagacgagtcgtgcgtgcccgcaccagtgcgcgtccacgccctcgtgacggcgtcacgcacgccgcgcgcgcgctcagncgtatcctctctgttatgtctcatggcttgattctgcggtatcacactatcagtttcgtgtgggccgtgctatgagcatgccacgtataggacgtagttccccaccggcccttgtcctcaataccgggtgaaggtgaggacactttataggtttgtggcataagactagctctgtgaatcccttcagtagctggcagtgctgagaagtcgtgtcgatgctgttatcgtatcttcatactgagctcgggtgtagccggcgcgcccatccacantgtgtagagcggagaagtctactcttagcgcttacggtactatcactccctcctttgctgtacagaaatggccgcggccgagccatttcttgtcaacgccattatccgcnagccatgcgcgccagccaaagccgcaaacctcatagaacgagaacatgcgtggggctgttgagctttctgtatgtgatcgtctttctgtccccacacctcacactacgctagtgtcctcccttctgatggagcgcggggtgatggattggccgctgacgagnccgcgcacgcccaggcaccacacctcgcccccactcccaccttcacacagcaccgcatcgctccgcacgaggtacccgctacacttggcctcatcatcccacgtacatcccaacttaaacttgattaggctgngagtatgtgcgtgtgcatcatttgtatgacaggtaagtaacatatattcctcggcgggcacagacacgncaccgcgccgcggatacctacgaatcatctaaccccacacacctacaccactctctcttcttctaccgaatggaaggctatcgttaggtgagagtgacatccctgcctgcgctaacctaatcctaccatgacagcgcggcggagtagactccctagcctacctagtaagcatgcctcctccccctccgcgcggtgtgtgcactccccaccacatgagggttcgnntnttatcacaaanctatancaccccgcacacacccgcgcganagnnnnannnnnnnnnaggcgcgcacaacaaac

SEQ ID NO: 2003 - DNA, 757 bp, Glycine max
  misc_feature (578)..(578): n is a, c, g, or t
  misc_feature (650)..(650): n is a, c, g, or t
  Probeset Number=SeqID_11782
ccaatcgtgtgcggcaatgcctcaccgtaacaaccctgcacctctccccctcgtcgtgaccctaaactgcgtcgaggactgctccctcgaattcgaatccctagctggcgtcgccaccgtccagcatgttcccctcagctgcctatccgatggcaagatcgattccgacgccgccgtgctcctccactccctcacctacctccctcgcgccagcccagaggccggattcggactctacaacctaatcctgtgcctgggttccgctgaccgagccgtctagctacgcctagtcgccgacctcagtctccgcctcgtccacgttgacacctcgcgcgccgaggagatcgcagactctgtcatggcgctcttcctctgactcctccaccgcacgcaccttctctcccggcacccgctctcctgctgcggctggctctgctccgtccagccgatctgcctgggcatgcgccgctgtcgcagactcgttctcggcatcgacagaatctccgcttcgctacgtgtatgccacttcgatctaggtctccaaatgagcgtgctctatgtcgatgctcgctcggganaatgcaaagataagttccctactgcagcgacaataatggatactcttaatgatgataagctggcagcgcacnatatcactggactgtacttataacgagcatctatacgcactatcaatcttgatgtgcctgactgtgaagccggagccttatcgcaatacggcactacgcaactattg

SEQ ID NO: 2004 - DNA, 562 bp, Glycine max
  Peptide Sequence Number=SeqID_9558
  Probeset Number=SeqID_11783
gcaagtcgccgttggaggcaatttttcggcaacaacgtttcatttattttttctttctttctcttcatcctctcccttcctcccttgatctattcctcatttgttgtgatctcctccttcctctccagcggkgccacaccaggtctgcaccaaatccatccgtcatcaacttcaccgaagccgcaccagattcacgacaatagatctgcaccaacttcatgacttccacgatttgaataaccgttacgagagattcatgtctaacactttggaacccatgttctgcttgcaccagatccacgatgtcgtcgagtttgtcggagcccaaattcatggcaccgcatctcgatttgagcaaccactgtgagggattagcatctgacacatcgaaatccatggttcatggtgcacacccaccagatctatgatgttgtcaagttcgttggagagcaaatccacgataccaaatytacattcatttcagttcttgttaataatggaatttctctttatttgtttatgtatttattttcattggtgaaactttgtgtttgcgttgttt

SEQ ID NO: 2005 - DNA, 1391 bp, Glycine max
  misc_feature (19)..(19): n is a, c, g, or t
  misc_feature (21)..(22): n is a, c, g, or t
  misc_feature (24)..(25): n is a, c, g, or t
  misc_feature (27)..(29): n is a, c, g, or t
  misc_feature (31)..(31): n is a, c, g, or t
  misc_feature (33)..(33): n is a, c, g, or t
  misc_feature (55)..(56): n is a, c, g, or t
  misc_feature (61)..(62): n is a, c, g, or t
  misc_feature (79)..(81): n is a, c, g, or t
  misc_feature (84)..(85): n is a, c, g, or t
  misc_feature (87)..(88): n is a, c, g, or t
  misc_feature (203)..(203): n is a, c, g, or t
  misc_feature (209)..(209): n is a, c, g, or t
  misc_feature (220)..(220): n is a, c, g, or t
  misc_feature (275)..(275): n is a, c, g, or t
  misc_feature (317)..(317): n is a, c, g, or t
  misc_feature (826)..(826): n is a, c, g, or t
  misc_feature (955)..(955): n is a, c, g, or t
  misc_feature (1045)..(1045): n is a, c, g, or t
  misc_feature (1183)..(1183): n is a, c, g, or t
  misc_feature (1391)..(1391): n is a, c, g, or t
  Peptide Sequence Number=SeqID_9559
  Probeset Number=SeqID_11784
ttgtgttttggctctcccntnntnntnnntntncttcctccttctccctcccctnntactnncctccctccgcctcccnnnaannanntagataacacacctcatcgtctactctggaataatagagttaatcctggatggtacgcgaggatgtcctctcgcataatgcactaactcacacatgacggtattattcgtggttntatatnctctcatctgntgttatcatacattagccgatctcacatacctcctcctacacaaccaattatatnaaggagatagaaagccctcgcgcagtcatacaaacacacgtngattgctaggctctataccaatcgcacgtagcaccatgctgactgtggtgttgtctgcgtctgtctctcgccactattctctccgctatcttatattgtgtgatttaaagcttctgtcataactataatttatgtgagaaatagagaactgatgaacagagaggagagaaaaaagttaaagatcatcaataacacagaagccaatccaacacaacccacggacgagtagatgtgagagtagtagcaggtagaattgctccctcctaggcgttctgttgctattcctgtctcgtgttttcttcttgttgtttgcctcatccttatgttatctacagctatattggaagcctcatgccacgttgcagggcatatgagataacgaattgggtgtccggaatacgtaccagttgtgccatgcagagacaccacgctaagtgaaggcgctcaacaaagtaagcgcgaggattagtagtgtattacactgtttcggctctatccgggtgcaaagncactgcttcgtcgttgtctacttgttcattatatatcatcgcggactaccgactaagacgatctagaggcgtgtgcgtgtgccttgtctcctcaactcgtcccgtgagatctgacttcctccacactcngctgccagagcgcaatgtcacagagatcctcctctcgtgttgtgtttgcccccacccctaccacccttcaccgtctctgatgaattgatnctgctcgcatataccgcgcacatatacagtctaactgaatagcgacaactcatcccactaccgtgtgggcagtccgcctacatgtatcacgactacaaacgccactgatcatgccgctgacgagtacatgtcgcgcgnctctggcgacacagcgcgcctactactcttatctctcttacactatccaacgacccacctcttataagagataagtatatctcggcctcgcatggtctcatgtgagtatgtcctctagtattacatatattctctactcctctcactatctatgtgtatattctctttctatcctcacttccctctacttctctctctcgctctctcn

SEQ ID NO: 2006 - DNA, 528 bp, Glycine max
  misc_feature (472)..(472): n is a, c, g, or t
  misc_feature (523)..(523): n is a, c, g, or t
  Probeset Number=SeqID_11785
atcactcaaaaagataaaacaaacccaagaatctcctgtccggacctcctcgaatctgaggtagccatgtcttgcacttccaacgtcttgctatccccaaacggctgcgttttggcatctcctaagcctcttggcagattcctcagcgccaggtcggtaggacggaagcttttcgtatcagtcgttagagcttcttccgacgatcctgattgtaatgccgaggaatgtgctcccgacaaagaggttgggacagtgagtatggaatggttggctggagagaagaccaaagtggtgggaacgtttccacctcggaagcgtggttggactggctatgtgagaaagatactgctggtcagactaatgtttactctattgagcctgcagtatatgttgcagagagtaccataagctcaggcactgcagggtcatcttctgatggagctgagaacacagcagcaatcgtaggaggccnttgcccttatcgcaatcgccgcagcttcctctatactcctccaagtcggtnaagat

SEQ ID NO: 2007 - DNA, 1394 bp, Glycine max
  misc_feature (21)..(21): n is a, c, g, or t
  misc_feature (28)..(28): n is a, c, g, or t
  misc_feature (31)..(31): n is a, c, g, or t
  misc_feature (109)..(109): n is a, c, g, or t
  misc_feature (141)..(141): n is a, c, g, or t
  misc_feature (522)..(522): n is a, c, g, or t
  misc_feature (711)..(711): n is a, c, g, or t
  misc_feature (1023)..(1023): n is a, c, g, or t
  misc_feature (1051)..(1051): n is a, c, g, or t
  misc_feature (1084)..(1084): n is a, c, g, or t
  misc_feature (1180)..(1180): n is a, c, g, or t
  misc_feature (1297)..(1297): n is a, c, g, or t
  misc_feature (1387)..(1387): n is a, c, g, or t
  misc_feature (1394)..(1394): n is a, c, g, or t
  Peptide Sequence Number=SeqID_9560
  Probeset Number=SeqID_11786
tattgtttttttttattgggngagaggntanagaggtggggagggagggacaagggaggcgggagcgagatcagtgcggtggtggggggggaggagggaggcgcccccncctccccgccgcgggcagcaccaacgacgcgncaaacccaatatcgcctcccacgggcccccgtgttagtgtggccaacacgccagtgcaggaagaggtgtgtggctcatgagttttttgtataaatggttgcttcatattttggttatgaggatgtaggggtggcaaacaaaatatacagcgaccatacagaatgaatcgtagttgagtatgtcatcgttgtccttacttatttacacacagccgcgtgcgatgatgggtgagcagaatgtagtcttccgcagacaatcaataatatcacacataatatattacattaccatcaacattactcaataaacgctactactcatgtctgtcgcttgtcgtcggtgtattcgacgtgattgtgagaacgaccacgccgaccttgnggcgacaacaaggcgcatctcaggaaaatcgatagaacagcagctagagagtgtgagacaagcgggacgcaatagagagaagaattcatctcactactgaaatgtagcattctcggcctcgtcataatgctttgcgtgatcatgagggtacgacctcacaccttacatatgcaataatattatcagagntcactgaagcagcggatctgtgtgtagctgacgctaaatgcgtctgctgtaatgtatgtgcccgtccgtcctcccctccgtctactagatgaggttgacatgatacaataatcaagcaggaagcgacgctcatgcgaagaaccgcatgcagtaatgtaatgagacacaatcaatgacaccacacgcgagacgcgaatgacgtgtggcgtgcgtagtcactctcctggtcgcctgattgcgaacgcacccacacacgagttagagtgagtcggtgcgcacgcaccaacccacgctcagccaccgtcgcgtatntatgcgttctcgtatgcgacggccacgncacgatatctagactaatgcactcgagggagcnacagataagaagtaccgctgtggagagcggcggagcgccactgctatcgatggacacagagtggcgagccacagcgtgcggttcgctgtaacaccntccactcaacaacactaggatagaacgaaggcatgtagacgtacgtgaacacttctagcgtctccgcgcgcgctacgcccacgcccgaccgcacgcatatatgtcgtcgttctagtntctgagcgtgcgtgcatatagcgaccgcgagtgtatagtgttgtgaagttagcagtatagtacgctgacgttctcggacatctcctctcncgccggn

SEQ ID NO: 2008 - DNA, 505 bp, Glycine max
  Probeset Number=SeqID_11787
attgacataggttctggaccttaatccatctaatctacaagatatcaattgtgctctatgactttgaattcagggtcattactatccaccttgcacttaacctgcattaactttaggcacgttcaagcacacctctagatcctatcttacaatactactactgggcagactgtgtggccttcaaaggactcatgaaatactatagtataatgatccacctgtgcatcgagctctcgatgagaactgttgatatcttctacagcttatatcgaatgacaatcttgtctatattcatcatagagttctatctactcattgatgtccaatactatcaataacatgcatctttgctaatgcacatgatccagcactaagtgcatcaatggtttatagtccaattaacgagttattatcagaagactacccagcaatatatagggacactaccatatgagagatcatggcacaccattttgctaaggagcttgatgggaactctgccttg

SEQ ID NO: 2009 - DNA, 786 bp, Glycine max
  misc_feature (1)..(1): n is a, c, g, or t
  Peptide Sequence Number=SeqID_9561
  Probeset Number=SeqID_11788
natgctctgtcgagaatgccaaggcaattgccgcactcgttcaagaccttaatattccagaggccaattttggactcgcctctggtgtttccgcctttctctggctgtactcttccattcaagggtcccaaatctctatccattttttcttctatttcagaattcaaatccttttctctctctgtgttttattcatgtattctgtttggctctttgtgtagctttaagcctgctactgtgcttgtcacttctgaacttcctctgggttcaggattgggttcgtcggcgtcgttttgcgtggcgctggcggcagccttgttggcttatactgactctgtctctttccatgtcaaccatcaaggatggctctcatttggggagaaagatcttgagttggtaaatcaatgggcttttgaaggagagaagatcattcatggaaagccctttggtatctacaacacatctagcgcatttggtaacattatcagcttaaataccggtgactatattcatatgaacttatatgggccgctttatatgctcatttctatcactaactttgggatgaacaccacagcattggtggcttgtgtaggataaaggtaacttttgcctccagatattattggtttagtttctagtgctgttgtatctgattacgaataattgactttcattaccgaggtacatacctgcagatagcatttagttactgatattgatgatcaaaatgatcgtctaatgagtatgatttcgtgtatgttactgacttgtcgtggtatctcg

SEQ ID NO: 2010 - DNA, 771 bp, Glycine max
  misc_feature (229)..(229): n is a, c, g, or t
  misc_feature (240)..(240): n is a, c, g, or t
  misc_feature (246)..(246): n is a, c, g, or t
  misc_feature (250)..(250): n is a, c, g, or t
  misc_feature (252)..(252): n is a, c, g, or t
  misc_feature (255)..(255): n is a, c, g, or t
  misc_feature (257)..(257): n is a, c, g, or t
  misc_feature (262)..(262): n is a, c, g, or t
  misc_feature (264)..(266): n is a, c, g, or t
  misc_feature (271)..(271): n is a, c, g, or t
  misc_feature (601)..(771): n is a, c, g, or t
  Peptide Sequence Number=SeqID_9562
  Probeset Number=SeqID_11789
gactagttcaagatcgcgagcggccgcccttttttttttttcctcagataggtcccctggtgctcgtgatcaatccagaattggcacaaactgaggctgaaattctccatgatcctgtcaaagagaagaagggtagctatgaagagaccattagggtcttgaccacaaggtgcaggacccaacttgttgcaactttcaaccgctacagagagatccatggcacttccantctcttaaagnaaaaanaccntnggngnttggngnnnaattngaaggatctgatgagttcaaagggcattgtacactgccattcgtggcatcaggctccctattaagcactccgaaaaggtggtgcggcaacgcaatcaaaaaggttgcacctgacccggatgccctcccccgggcggtcgtgagccgggctgagaagcccttcaagataatctcacaggtttcctccaagagaaacagtgttcttcttgagcatgctattgccaaggaaacctctggggactacaagaagttccttctccccctgttgggaaaagaagactaaaaacttttcttcgagggcggttgtgattatcaccccaggccagttagnnnnnnnnnnnnnnnnnnnnnnnnnnnnnnnnnnnnnnnnnnnnnnnnnnnnnnnnnnnnnnnnnnnnnnnnnnnnnnnnnnnnnnnnnnnnnnnnnnnnnnnnnnnnnnnnnnnnnnnnnnnnnnnnnnnnnnnnnnnnnnnnnnnnnnnnnnnnnnnnnnnnnnnnnnn

SEQ ID NO: 2011 - DNA, 1391 bp, Glycine max
  misc_feature (32)..(32): n is a, c, g, or t
  misc_feature (370)..(370): n is a, c, g, or t
  misc_feature (466)..(466): n is a, c, g, or t
  misc_feature (504)..(504): n is a, c, g, or t
  misc_feature (793)..(793): n is a, c, g, or t
  misc_feature (1326)..(1326): n is a, c, g, or t
  misc_feature (1391)..(1391): n is a, c, g, or t
  Peptide Sequence Number=SeqID_9563
  Probeset Number=SeqID_11790
ttgtggaacacagcgacactctagatccgttncttgtgcccaatcgatactagccctcacgtacgctccagcctcgcagctgctccgcgataatcagcaatctccccatcaatataaatctggattcactactattcacgcacacgcacctagaagctactgtagaaggagaggctcaatcgagactgagagcaaatcctcacaaatacaagacaatcgcgtaccctcacgtgcctctgtggctgaccaggtaactgtgtaaagtggagtccgcagacatgacgaccgacgcgccggccgcagcgtcgcgaggtctcgacgtgggtgaatggtgtcacacacgactcttcatatcacatactattcgttntgcacataattcgtcgaatgtcgctcagatagcactgggcgtgattgtgagtgtaagatcaacctctaattctgtcacaacactatcagtctgtgnattcaagtcttgactcattgtatcacacactcgagcgnctctttgctcatttgtgtcgtactcgtgttgcccttcctgtttatgctgctagcgatgttgttgtgcattcctgcctgttgcgtacaacaatctacaatgacatctgtggcgctacacggctcgcagcacgaacttcgagcgagtctgtgttgatagaacttctgctcgcgtgatttctctcgctggctcgatcgtaagtgagtgtattcttactatatccattgcataaagacagtggatattgagattcttggtgaatattatctgagttccgctagcaggcagcantgcctagaagatgcgttatgcctaagcgtatcgcacgcagcgcttccaccacactcgatacctactatctaatctatgtgtgtattcgatcgatctctgatatgcacgacgctcgctgtatcttacagatctcctgtgcgatagtcgcctggcgcatcgtagcgctgttgaccccgttcttgtcgatgcgctatgatgtctcatcatatagtactacgctatatgcgatcatagataattacacacgacagtcagatcctgatgcgctatgatgatacacgtatactcagttgatactactgtaactgtatccgcagtgcgatcgcttgtcatgtcctttgcgttggtctattagtctgcggtgcgtctctacgtgatatggcttatgacgtaccattcactatcactactcatatgtgatagtggtgtatctcaccggtgcatctgtatacgatttatatcactactattcaaatgcgtatctatgtatacatgagcagacgagtcatgatacggctgccgctaatcatatnttcgagtaccatctgtgttgtatattacttagctttatcaatggagtgcgtctgtgttgcgtatn

SEQ ID NO: 2012 - DNA, 1726 bp, Glycine max
  misc_feature (8)..(8): n is a, c, g, or t
  misc_feature (12)..(13): n is a, c, g, or t
  misc_feature (15)..(18): n is a, c, g, or t
  misc_feature (21)..(22): n is a, c, g, or t
  misc_feature (27)..(27): n is a, c, g, or t
  misc_feature (30)..(30): n is a, c, g, or t
  misc_feature (34)..(34): n is a, c, g, or t
  misc_feature (37)..(41): n is a, c, g, or t
  misc_feature (60)..(60): n is a, c, g, or t
  misc_feature (64)..(65): n is a, c, g, or t
  misc_feature (69)..(69): n is a, c, g, or t
  misc_feature (111)..(112): n is a, c, g, or t
  misc_feature (139)..(139): n is a, c, g, or t
  misc_feature (161)..(161): n is a, c, g, or t
  misc_feature (183)..(184): n is a, c, g, or t
  misc_feature (189)..(190): n is a, c, g, or t
  misc_feature (202)..(203): n is a, c, g, or t
  misc_feature (206)..(206): n is a, c, g, or t
  misc_feature (209)..(209): n is a, c, g, or t
  misc_feature (211)..(211): n is a, c, g, or t
  misc_feature (214)..(214): n is a, c, g, or t
  misc_feature (218)..(218): n is a, c, g, or t
  misc_feature (250)..(250): n is a, c, g, or t
  misc_feature (271)..(271): n is a, c, g, or t
  misc_feature (388)..(388): n is a, c, g, or t
  misc_feature (452)..(452): n is a, c, g, or t
  misc_feature (471)..(471): n is a, c, g, or t
  misc_feature (526)..(526): n is a, c, g, or t
  misc_feature (529)..(529): n is a, c, g, or t
  misc_feature (679)..(679): n is a, c, g, or t
  misc_feature (976)..(976): n is a, c, g, or t
  misc_feature (1043)..(1043): n is a, c, g, or t
  misc_feature (1119)..(1119): n is a, c, g, or t
  misc_feature (1193)..(1193): n is a, c, g, or t
  misc_feature (1199)..(1199): n is a, c, g, or t
  misc_feature (1444)..(1444): n is a, c, g, or t
  misc_feature (1477)..(1477): n is a, c, g, or t
  misc_feature (1484)..(1484): n is a, c, g, or t
  misc_feature (1656)..(1656): n is a, c, g, or t
  misc_feature (1726)..(1726): n is a, c, g, or t
  Probeset Number=SeqID_11791
tttttttnttcnntnnnnttnnttccntcnctcnccnnnnnccctccccctctccctatnctcnnttcncttctccctctctctcctaagccaacccactcctcccccctnncacccatatactcccccctcacactanaatcacacatcatatctttcanaaaatccctcccatctccctcnnatctnnacacccataaannttnacncnttnaganaagatccgagatgtaaaccaccaccaacgatntaccacacaatataccactcnacaacccacccgtgctaactctactaccatcatatactcttacagctgagtattctcacactcttcactctcttccttcgcctctctgcgtgcgttgctccttctatcctcactctncccgcttccccctctgctcatctctgcgtatctctgttcgcgtgcctagtccctccatcatctnccctcacctctctcctcgngccccctctctctcatctctgtcccgccacacgctacggcgcgcgagcactaganacnaatagtggaatgttgtgtgttcatacgcttttgtgatattctatcgtgttttatatgtcgttattttgattgtatttatcgttgtctatgtgtttcactctttagtatttggtgatgtgtactcctcatattatagtatgataaagagtnacatcagagtcgtacctggagcgtactcgcttttggtgctacgcatcattcactactttaccttcttactcacattcctatgctctcgtgtttatattgggtgcgaagcatgtacctgcgatgagtgctcaccggttactttatatgggcacagcatgacagttacacactcttactgctcctatagcgcgttatgctgattttgtatgttcctctacgctgacgaccgatagtcatattattatctatctctactccccgtagccctctctcctccattaccctaaactctcactnctatatccctctcacctcactctctatactccattcctatctcctctctcatatatataatattatnaattggttaccgtgcacgttccgtatctctagttacacacgcatcgtgtgtgtcttatgtatcgtatatcgacccnctactccctccgtcgtcatctcagtgtcatttcctctcattatgtgtattatctatcttatctactatcactanagcacncatcctgacacatgagacaccagtgtttacggcggatgatgcataggttgtgatgtatgtgtcgcgtcgtgatatcactctgatcagcatcggatacactccgctcctgtgcataatctgtgtgtgccctctctagcgcacctcactgtgcttctactctactattcgtccacgtcaatcattactcatatatatcgaaatctcaccacttgctctatactctctgtctctcatgttaatcgttnttatacatcctcaatattatcatctcacctcgncgtgtanagccactcgtcactattatatgtcacactatctcgacgaaacacacctcgccacctcacagcacacactagctctactgctaatatcgccgcactccgactctactaactctccgacactgtcaagatatgtgtcacacttgtataatatagaatatataaaactatcagtntgtatctatactgcgactatcgaagtatctcaatcataacactaatcattattaatctatctaacatccn

SEQ ID NO: 2013 - DNA, 583 bp, Glycine max
  Peptide Sequence Number=SeqID_9564
  Probeset Number=SeqID_11792
tgctgctgcaccaaaaaagacatggatccccgctgtctaatgtggtgggagtctcatatacccaaaatggcttgatggctcgctaccagaggactatggttttgacccactttgactaggaaaggacccggtattcctgaaaaggtatagacaatctgaactcattcatgggaggcgggcaatggctgcattagtaggcatcttcattgggcaagcatggagtggagtaccatggcttgacgctggagcatatcctaatgcaattgctcctatctcattaggctctctcttatgtactcatctgctcctaatgtggtgggttgagagcaagacatgggtggacttcttcaacccagattctcagtcagtggattgtgccactccatggtcaagaactgctcatatctttggcaacactactgtcgaacaaggattccctggcagaaaattctccgaccctttgagatttgctggagctatcatcgatggcgttatcatgttgcatgctcactagctatacagactgacatcgtctgacagcatccatctaagattgctatgatgtgttatgcttagttactat

SEQ ID NO: 2014 - DNA, 1711 bp, Glycine max
  misc_feature (1)..(59): n is a, c, g, or t
  misc_feature (71)..(71): n is a, c, g, or t
  misc_feature (77)..(77): n is a, c, g, or t
  misc_feature (91)..(91): n is a, c, g, or t
  misc_feature (95)..(96): n is a, c, g, or t
  misc_feature (132)..(132): n is a, c, g, or t
  misc_feature (167)..(167): n is a, c, g, or t
  misc_feature (221)..(221): n is a, c, g, or t
  misc_feature (226)..(226): n is a, c, g, or t
  misc_feature (230)..(230): n is a, c, g, or t
  misc_feature (232)..(232): n is a, c, g, or t
  misc_feature (267)..(267): n is a, c, g, or t
  misc_feature (271)..(271): n is a, c, g, or t
  misc_feature (345)..(345): n is a, c, g, or t
  misc_feature (356)..(356): n is a, c, g, or t
  misc_feature (375)..(375): n is a, c, g, or t
  misc_feature (434)..(434): n is a, c, g, or t
  misc_feature (437)..(437): n is a, c, g, or t
  misc_feature (474)..(474): n is a, c, g, or t
  misc_feature (492)..(492): n is a, c, g, or t
  misc_feature (688)..(688): n is a, c, g, or t
  misc_feature (693)..(693): n is a, c, g, or t
  misc_feature (735)..(735): n is a, c, g, or t
  misc_feature (737)..(737): n is a, c, g, or t
  misc_feature (746)..(746): n is a, c, g, or t
  misc_feature (810)..(810): n is a, c, g, or t
  misc_feature (906)..(906): n is a, c, g, or t
  misc_feature (919)..(919): n is a, c, g, or t
  misc_feature (935)..(935): n is a, c, g, or t
  misc_feature (942)..(942): n is a, c, g, or t
  misc_feature (951)..(951): n is a, c, g, or t
  misc_feature (955)..(955): n is a, c, g, or t
  misc_feature (958)..(958): n is a, c, g, or t
  misc_feature (976)..(977): n is a, c, g, or t
  misc_feature (990)..(990): n is a, c, g, or t
  misc_feature (1056)..(1056): n is a, c, g, or t
  misc_feature (1079)..(1079): n is a, c, g, or t
  misc_feature (1092)..(1092): n is a, c, g, or t
  misc_feature (1137)..(1137): n is a, c, g, or t
  misc_feature (1161)..(1161): n is a, c, g, or t
  misc_feature (1163)..(1164): n is a, c, g, or t
  misc_feature (1168)..(1168): n is a, c, g, or t
  misc_feature (1255)..(1255): n is a, c, g, or t
  misc_feature (1454)..(1455): n is a, c, g, or t
  misc_feature (1469)..(1469): n is a, c, g, or t
  misc_feature (1480)..(1480): n is a, c, g, or t
  misc_feature (1482)..(1482): n is a, c, g, or t
  misc_feature (1491)..(1491): n is a, c, g, or t
  misc_feature (1493)..(1493): n is a, c, g, or t
  misc_feature (1641)..(1641): n is a, c, g, or t
  misc_feature (1690)..(1690): n is a, c, g, or t
  Peptide Sequence Number=SeqID_9565
  Probeset Number=SeqID_11793
nnnnnnnnnnnnnnnnnnnnnnnnnnnnnnnnnnnnnnnnnnnnnnnnnnnnnnnnnnncccccaaattancacacnaacctcaccctccncagnnagaagagaggaagagagaggctccactccaccaccngcgcagaggaggaggacaggcctcttctgacaaangcagaggtgagggagcgcccatccgcggcgcgcgtgcgcgtgggaagaggtgcntatantgtntntatatgtatatatttgtgtgtatctctcaccacgnacgnatgaaatgagattacgatgcagagcacggagcgatagaccagacggctagcgcgacgagtacggctcgacactnctcgacccaanatagcccgcctcgaccgcnccgacatggtgagtgctatcttagtgagtagttgtatcagctcatgagtagcgaagacnatnagagagactacttagtactttgcagtgtcgaagcgcntctcccccagtagctggnatggtagcgtcattagagtgcatgcgctgcgtgtcgcccgaggcgatgtaaagtagagatagaacaataggtcctacgcactcactgcagaagcgagagcgcgcgactaggaagaggacctacccgcgacgcactctcacacaaccacacaataaccaataaactctccgtctcacacgagagaatcacatcactncacgntgactgtcgtcagaatcgtctcctctcctctctgcctagagngncgctatagnttgcgcgttaggaggagccttatctctcatggccggaccacatgtgggatgtggtatgtatgtnttgtaggaggatgttgttggtgggcccgacgacgagcacgctcccacctcacacctcacacctagtataggacacaggccttccgtgtcgcacgcngcggacggcaaanagcaggaagaagcggngaacgcncaaggaccnaccnctntggtgaatttctgatgannctatcacgtactnctagaccatctagtgtaggctatgagtgaggtgtgatgagtgagagacggacagcacgcagcggtncgactcgaggcataagatccaangcatataccgacncgagttcacggaatcaactcatgatctcttattagcgagagatcnttcatccgtacacgcccacgctcncnngtgnggactacgcacacagcgctgaaggtgccacaatgtgcgtctcgtggggactcactggaggccgtgcgactccaaccgtccattaatncgaacgtcgcccgccacccactcctcacgccgaaggacctaccgtcagagaagagtagggagaaggacaagtgtcacgtccttctagacgccgaggaagacccttgttagtgctttgcggctccgcacctcgcttctcttccgcgtgatctgtctagcctcactggtcaggttacacaccatagcgcgacgggcagagnnacaccatccagagnggaggtgcgtnanacatttgcncncgcgagacagatgcccatgcgtcctggtgaagagaggcccccttcacactcactactacgaagtgcagcgcgccatggtgtgcgaatgccgagccatcacaacatacgttagagccacccgacaatgtgacgagcacaacacctagantacagcgcgacgacgatgcgatatacgcggtgagtgatgtgtgacgcgncgactaagtagctacgtcatt

SEQ ID NO: 2015 - DNA, 1729 bp, Glycine max
  misc_feature (50)..(50): n is a, c, g, or t
  misc_feature (62)..(62): n is a, c, g, or t
  misc_feature (150)..(150): n is a, c, g, or t
  misc_feature (156)..(156): n is a, c, g, or t
  misc_feature (222)..(222): n is a, c, g, or t
  misc_feature (396)..(396): n is a, c, g, or t
  misc_feature (465)..(465): n is a, c, g, or t
  misc_feature (521)..(521): n is a, c, g, or t
  misc_feature (548)..(548): n is a, c, g, or t
  misc_feature (593)..(593): n is a, c, g, or t
  misc_feature (655)..(655): n is a, c, g, or t
  misc_feature (879)..(879): n is a, c, g, or t
  misc_feature (901)..(901): n is a, c, g, or t
  misc_feature (913)..(913): n is a, c, g, or t
  misc_feature (993)..(993): n is a, c, g, or t
  misc_feature (1170)..(1170): n is a, c, g, or t
  misc_feature (1173)..(1173): n is a, c, g, or t
  misc_feature (1176)..(1176): n is a, c, g, or t
  misc_feature (1210)..(1210): n is a, c, g, or t
  misc_feature (1240)..(1240): n is a, c, g, or t
  misc_feature (1311)..(1311): n is a, c, g, or t
  misc_feature (1327)..(1327): n is a, c, g, or t
  misc_feature (1335)..(1335): n is a, c, g, or t
  misc_feature (1356)..(1356): n is a, c, g, or t
  misc_feature (1448)..(1448): n is a, c, g, or t
  misc_feature (1468)..(1468): n is a, c, g, or t
  misc_feature (1478)..(1478): n is a, c, g, or t
  misc_feature (1497)..(1497): n is a, c, g, or t
  misc_feature (1519)..(1519): n is a, c, g, or t
  misc_feature (1539)..(1539): n is a, c, g, or t
  misc_feature (1550)..(1550): n is a, c, g, or t
  misc_feature (1566)..(1566): n is a, c, g, or t
  misc_feature (1575)..(1575): n is a, c, g, or t
  misc_feature (1583)..(1584): n is a, c, g, or t
  misc_feature (1588)..(1588): n is a, c, g, or t
  misc_feature (1610)..(1610): n is a, c, g, or t
  misc_feature (1638)..(1638): n is a, c, g, or t
  misc_feature (1649)..(1649): n is a, c, g, or t
  misc_feature (1693)..(1694): n is a, c, g, or t
  misc_feature (1697)..(1699): n is a, c, g, or t
  misc_feature (1708)..(1708): n is a, c, g, or t
  misc_feature (1714)..(1714): n is a, c, g, or t
  Probeset Number=SeqID_11794
agtgcgtgcgcgactgcatagcgacttcacgctgtcttaggatgcagagncatactgctcgngccccacgacgtagatctatatgctacgtgacgtgacggtgtcgctctgcgtacgtatcgtatgtctcttatgaccacacatgtactntgacancaccatctcatcttagcatctgagatacacacgatgtgcagtatgcgggcaacataagctctgatntacagcacgtgagatcgagtctagctcggcatacgtcgtgaatatatatcgatgttgctgatctacatagaggacgtgtaggcgacacatagctcctatatagcgactcgtatgtagaggttgtgtggatgtgtaatatgtatacatgatgcatcaaacgtgtcaagagtggtntagtgtagtgtgtgtagagagagtacagaggcggggagagtagagcgtgctctcacacactgttcaagnacgtcgtgcagcgctaacagatcgcgctgcacgttgcagcgtggcatcagataggncgcgacgtgtctgcagtctgatgctgnactctcggtcgcgctccactcatcgcaggtctgctaggacgtggnagcgcgatacatcaatcgtatcacgaggtgattcagcacggtgcgacagagcgtgtgtatanaccgctacacgctttcaccatatcgctgtgcgtgtgcctagtgcacgtgatacactaataattagacgtatagaacgaatgcgagacgtgcagaactaaatcatatcgtgcgtctgacgacagtgtgtacgtgtctcgacagtgtgaccatcacacgagatagatgtaatcactatgcacagtgcggtcgcgtgtggtcgacggcaggcagcgctggtagcacnatatatagttataatatgagtntgcttgtgatgncgcatgagtcggggtgcggtagtgtcgtatctctcttcttatctactccatgttatgtatgatgtgtatatatccatgtntagccgcgtagatatatctgcacgttacgctatcaatagagaagtcatatgcacgcagtctgtgcgggccacaataccacaccacgtagcgcagacggcacgagcaacagaagctgcgtgggggtggtatgtaggtagagtagtatacggaacggggtgtgacggagaaagaatganggnctnatcagtgtacacaagcactcgcgaagtcgattcnagccagattcggagcgttctactagagtgncatgctgaggatgggtgagaggtagggagtacgtgagggttgtcgtctgtcgtcttacccggagtggtccncaagtatatactatanttcgcagngaacacgcgagctaacgcgcngtcagcaagtagagagagagacgatcataatgtactaatacatcattgtacatatactacaacacacccatgatatatgtgtagagaagggnggcacgctgtgtgccatcantcagtgagtngagtatagatgatttcgtngtctatattcgtatctatcgcngcgagccacacatctatatntgcacatggancggtagaggtaggtgnggaggaganatgtgggnngcgncccctcctcctacatttaatangtgataagtgtacatattttatatactntcttatgttanatatagttatagtatcgttctagtggtgcgaggcaggggtgagnnacnnncgcaaatgnttaaanacacaaccaaaaaac

SEQ ID NO: 2016 - DNA, 1394 bp, Glycine max
  misc_feature (89)..(89): n is a, c, g, or t
  misc_feature (153)..(153): n is a, c, g, or t
  misc_feature (181)..(181): n is a, c, g, or t
  misc_feature (319)..(319): n is a, c, g, or t
  misc_feature (329)..(329): n is a, c, g, or t
  misc_feature (347)..(347): n is a, c, g, or t
  misc_feature (390)..(390): n is a, c, g, or t
  misc_feature (569)..(569): n is a, c, g, or t
  misc_feature (615)..(615): n is a, c, g, or t
  misc_feature (627)..(627): n is a, c, g, or t
  misc_feature (697)..(697): n is a, c, g, or t
  misc_feature (749)..(749): n is a, c, g, or t
  misc_feature (809)..(809): n is a, c, g, or t
  misc_feature (914)..(914): n is a, c, g, or t
  misc_feature (928)..(928): n is a, c, g, or t
  misc_feature (1156)..(1156): n is a, c, g, or t
  misc_feature (1158)..(1158): n is a, c, g, or t
  misc_feature (1206)..(1206): n is a, c, g, or t
  misc_feature (1249)..(1249): n is a, c, g, or t
  misc_feature (1301)..(1301): n is a, c, g, or t
  misc_feature (1340)..(1340): n is a, c, g, or t
  misc_feature (1365)..(1365): n is a, c, g, or t
  misc_feature (1373)..(1373): n is a, c, g, or t
  Peptide Sequence Number=SeqID_9566
  Probeset Number=SeqID_11795
cagtagctgatatactgctgtgtagttgagtgtataaactcaggagtctatgagatgatacgcgtcaagtatagtacgatgatgatcgnatattgagacgtacgctgagctagacggcgacaagcatccgtctgagtaggtgagtgttatgtnggtgatgatgaagaatatatagtagtgnatgcaggagagagagtagcgtgagcgagtgtggaggtgcgagagtagtctagataatatacatgtagcgattatatagacgatgtgagtcacctgcacagatctaatgatgtgtcagtgaagagctagaagaagatgntgagtcgagnaacgaagagatataagtntagaaccatacgctcattctcagatgcaatacgatgcagtgtncgatatcagattgtatcttactcattatatatataatagtataagagagaatgagcaggagaggcgataaataaccaaggggtaagatagatgagaagtctgatgtgtagcgtagagaagcgtatatatcagtcgactagcatgcatgactgcgctgagcgtgattctaggtgggacgnagagtgggggggagtgagagataaacacacagcatctcacaaatanagaatcttcgtngaattatgatatatggatggtgtgtgacattaccatcgatgtctcgtgtctgtattcttatatctatttntttttatatcttattttgtaataatactactttatatatctcaatagtatangacatagataaaagcgcgtcatgatacaacagagcgaccacagcatgagtagaggtgtgngagaagagacagagatgcagaggtgccagtatagcgagatgtattcacgagagacagtaggtggatcgacgactgttgcagtatgcgatgagatgatgcagatgnaatcagacgaaccntctagagtaattacgtctcgacacaatgcaggaagagagtgagtaggcgagtggtgtgagagtgcatgaatagagtcgtgtaagttatagcgttgtatatattaatgttcatactttgtattagtattatctacttaataatgtttgtttataggtgttagatggtgagagtgtgtgaaatagagtgtatgatggtagtattcgctgctatatggtgtgtcagcacgngngtttcacattcgtcgtactatctctatcatcagtcaagtcgtctaccncgagatagattactctgtgtgatagtgcgttgtgtggtgtggnttgcagtatacagatgcagtgtgtacgtgatggtgtatgcatatcagatagnatttatatatttatatatgttttattagtacataatagngaagatgacgaagaggtgtattggngggtgtgntagcaagagactcgctcagac

SEQ ID NO: 2017 - DNA, 1473 bp, Glycine max
  misc_feature (1)..(1): n is a, c, g, or t
  misc_feature (65)..(65): n is a, c, g, or t
  misc_feature (141)..(141): n is a, c, g, or t
  misc_feature (434)..(434): n is a, c, g, or t
  misc_feature (468)..(468): n is a, c, g, or t
  misc_feature (544)..(544): n is a, c, g, or t
  misc_feature (554)..(554): n is a, c, g, or t
  misc_feature (578)..(578): n is a, c, g, or t
  misc_feature (581)..(581): n is a, c, g, or t
  misc_feature (898)..(898): n is a, c, g, or t
  misc_feature (932)..(932): n is a, c, g, or t
  misc_feature (950)..(950): n is a, c, g, or t
  misc_feature (1038)..(1038): n is a, c, g, or t
  misc_feature (1103)..(1103): n is a, c, g, or t
  misc_feature (1254)..(1254): n is a, c, g, or t
  misc_feature (1371)..(1371): n is a, c, g, or t
  misc_feature (1377)..(1377): n is a, c, g, or t
  Peptide Sequence Number=SeqID_9567
  Probeset Number=SeqID_11796
nttatatcacgagatattattgtatgaagctacatacgcatgaagactctgtcgtgtagtagacngtgtgtgagagatcgcgtcgagacgcagtattcatagtagtgtatgagatttattgagtatctatatagtggtagnactttgtgtgtcactcgctagtatttgtgattatacgtgtatggtagcttatagtagtaccgtgacacggtcatcattcataagtactatatatcttatgcggtggtctacggtatcgatgtgctagctcgcgtggataggtacacatgagtccacttatgttgcgattagtcacgtgcgtcttgtctcagcgatcgtcgtaacgctctagtatcaggaggcagagatacattgtgtagtcgtactcatcagccgcagacctcatacctctggatgacaccctcgcgcgatgnagaagagagtagtacaacatcaacagcacgtgcncacagaacgtcggcgcaatctatgtgtgcgtgtgtagtccgcagaagcggcgcggaaaggagttagagagagcggntgcagcgcgncagcatgtgagcggtggaggtgtngtntatatctcaatccacgagcaaggattcatctcaacacacgctacggcgtgtgcaacgacggcacagctgagagtgttgtgtgatagagtgacgttcgttatactcgatggttcctgaggacgcgtgcgatatactatgcgcgcgcttaatcgcgtcgcaaattgatgcattcatccacatcattcttctattaatacaatgtgtttttgctagtatgattattctgtggatagagtatcgttagttatcagcaggagccatcgcaatctatatcaatcgcgttcacacgcgtgtgttctcatctcttgctctctgantgaatacacgctgccgggtgtagcatacggagtngttataagcttgagccancactactcccttcatgtgcttggtgtactcaaatcagtcgcacaccacattattctacctccacagcagaccacctaccaggcagatntacacctcagacgcacaggactcatactcgctctctgactacacgcactctcgagccgcggcttncgagctatctatactcgtctcgtgtgtagtctagtgagggacagagagaaagggtgatttataactttgatcgtaaagcaacacccgagtggtgggagactacactataagagacgtgggcgccctactccctacactggagaatacgtancagcgccgccgctgaagaagaatgaaaataaaaaaaaacgactctctctcttatagccattccccgtcctacgtttaggacgaacccttgcccgcgacactcaatattgatacaaanaaatanaagggggcgcccaaccaccaaaatatcatgacctcttctcgtgagtgcatgtggtgcctttatgtatgtgatatgttgtttctctctctctcttct

SEQ ID NO: 2018 - DNA, 637 bp, Glycine max
  misc_feature (637)..(637): n is a, c, g, or t
  Probeset Number=SeqID_11797
tcgattgagcgtctcaactttagacaagagctcattatgcaggtttgtgcaatgtcctgaaaccgtcgctcgcggcgtgacggccgaatggcaaagcgtcgcggacaagggatgctcaatgttcgagtacagtgcctgtgttctcgctaagagagaggagctggatttcgaagagtggccgatcgtcgtctcgaactgatcacgagtatattgcaggtcggccaaaatcgaggtgtgaagttgcgtagacgccttcactgaggcaacttgtttccgtcagctattgttgaaccaaatcttgaagtgctcaaacggacatttcagtcgacgaatagtctggtcgtcttgggtatcaacaacagagtctagggctgcaaaaaagtgactggttgacacaagctgaatcccctcgtgagcgagtcgcgatgacctaggaggtggaggacccaaacggccacgggggagagaatcgctgcggagcctggcgcggagtcccgagccatcggtcttcttttcgatcccatcggtcaagccggcttctttggtagtctgcagcatggacattccgattctccaagtgtaatctgcagggtgacaggttcaacggaaacagatgtcgagatccgctaatagtcan

SEQ ID NO: 2019 - DNA, 527 bp, Glycine max
  misc_feature (522)..(522): n is a, c, g, or t
  Peptide Sequence Number=SeqID_9568
  Probeset Number=SeqID_11798
ttttttttttttttttttatcgagccaaagcttatttctctcagtaaaatcaaacttatattgagaacattcatagtcctcattgtattgcgaactatgatgatccctttcatctgctttccttcctttactttcaaaatcgtcttgaaggatcttctcccagaaaacctccatgctccttatatcaaaaggctgatatgtgctctccaacagtttgttggttttttctttgcttgtgctgctataatctctagggttggcgttatttgaagccacagacactggtctctcagcactcttgaagaacatcatgttgggcaacacagggacactcccactttgattctgaccatttccaaaccctcttttttgtaagtcaggactttggtatctatgcgaagaagcttgagaagttgagctcacctgtttcttgctttgttcgagattgagttctgaattgacaacctttttctcattattttgcgccaattgtttgtttgtcggagtaggattgaatgaggncaact

SEQ ID NO: 2020 - DNA, 600 bp, Glycine max
  misc_feature (296)..(296): n is a, c, g, or t
  misc_feature (415)..(430): n is a, c, g, or t
  Probeset Number=SeqID_11799
ccccgtttttataggggcctttttttcaaagtggaaaaccttcaaccctaattcgggtctttttttgattttaagggattttcccgatttcggcttttggttaaaaaatgaggtgttttaccaaaaatttaaccgggaattttaccaaaattattaaacgctcacaattttccctttgcccatccaggtttggcaactttttgggaaggggcattcggttcgggacttttttcgtttattccgccagctgcggaaaggggggatttgtttccaggcgattttaatttggttaacgnccagggtttttcccagtccccgaccttgtaaaaccggcggccacgtggattgttattcggcttccctattagggcgaaatgggttacgggcccccccttcgaagtccagttacgttggnnnnnnnnnnnnnnnntaaagacgccgatgaatggcttatttttcaaagaattatagcaagagatcttagatttccagattacttttctgacgaagcaagagacctcattgaccgcctgttggatttggaccccagcaggagaccaggtgctgcacctgatggttatgctattttaaaaaggcacc

SEQ ID NO: 2021 - DNA, 448 bp, Glycine max
  Peptide Sequence Number=SeqID_9569
  Probeset Number=SeqID_11800
actatactcagcacaaagaaacttcccttcaaaaaaaaaagttaccctctctctctctctctctctcacacatttattaacctcaacgttcccaaattttgaaacaaaccagctcgcaacaatgtcccatctaaacggcgcctactacggccccgccgttcccccgccgaaatcctaccaccgtccctcccacggcggcggcggcggccgcgacggctgctgctgcggctgcctgagctgcttctgtggctgcatcttcgactgcatcctcggcctaatctgcaagatcctgaccacaatcatcataatcctggcagttctcgcttttctgttctggtttatcgtgcgccccaacgtgatcaaattccacgtcacagacgcctccctcacgcgcttcgactacaccaccaacaacactctccactatgacctcactctcaacgtgtcg

SEQ ID NO: 2022 - DNA, 1888 bp, Glycine max
  misc_feature (46)..(48): n is a, c, g, or t
  misc_feature (101)..(102): n is a, c, g, or t
  misc_feature (107)..(107): n is a, c, g, or t
  misc_feature (109)..(109): n is a, c, g, or t
  misc_feature (144)..(144): n is a, c, g, or t
  misc_feature (186)..(186): n is a, c, g, or t
  misc_feature (209)..(209): n is a, c, g, or t
  misc_feature (221)..(221): n is a, c, g, or t
  misc_feature (260)..(260): n is a, c, g, or t
  misc_feature (262)..(263): n is a, c, g, or t
  misc_feature (287)..(287): n is a, c, g, or t
  misc_feature (339)..(340): n is a, c, g, or t
  misc_feature (352)..(352): n is a, c, g, or t
  misc_feature (400)..(400): n is a, c, g, or t
  misc_feature (526)..(526): n is a, c, g, or t
  misc_feature (528)..(528): n is a, c, g, or t
  misc_feature (534)..(534): n is a, c, g, or t
  misc_feature (719)..(719): n is a, c, g, or t
  misc_feature (745)..(745): n is a, c, g, or t
  misc_feature (765)..(766): n is a, c, g, or t
  misc_feature (768)..(768): n is a, c, g, or t
  misc_feature (770)..(772): n is a, c, g, or t
  misc_feature (779)..(779): n is a, c, g, or t
  misc_feature (786)..(786): n is a, c, g, or t
  misc_feature (825)..(825): n is a, c, g, or t
  misc_feature (828)..(828): n is a, c, g, or t
  misc_feature (836)..(836): n is a, c, g, or t
  misc_feature (852)..(852): n is a, c, g, or t
  misc_feature (878)..(878): n is a, c, g, or t
  misc_feature (924)..(924): n is a, c, g, or t
  misc_feature (937)..(938): n is a, c, g, or t
  misc_feature (962)..(962): n is a, c, g, or t
  misc_feature (991)..(991): n is a, c, g, or t
  misc_feature (1057)..(1057): n is a, c, g, or t
  misc_feature (1059)..(1059): n is a, c, g, or t
  misc_feature (1068)..(1068): n is a, c, g, or t
  misc_feature (1120)..(1120): n is a, c, g, or t
  misc_feature (1125)..(1126): n is a, c, g, or t
  misc_feature (1130)..(1130): n is a, c, g, or t
  misc_feature (1234)..(1234): n is a, c, g, or t
  misc_feature (1320)..(1320): n is a, c, g, or t
  misc_feature (1354)..(1354): n is a, c, g, or t
  misc_feature (1398)..(1398): n is a, c, g, or t
  misc_feature (1462)..(1462): n is a, c, g, or t
  misc_feature (1477)..(1477): n is a, c, g, or t
  misc_feature (1518)..(1518): n is a, c, g, or t
  misc_feature (1524)..(1524): n is a, c, g, or t
  misc_feature (1691)..(1691): n is a, c, g, or t
  misc_feature (1756)..(1756): n is a, c, g, or t
  misc_feature (1782)..(1782): n is a, c, g, or t
  misc_feature (1809)..(1809): n is a, c, g, or t
  misc_feature (1855)..(1855): n is a, c, g, or t
  misc_feature (1874)..(1874): n is a, c, g, or t
  misc_feature (1882)..(1882): n is a, c, g, or t
  Probeset Number=SeqID_11801
ttaatatattcgataagatataaatatagtattttgttgagtgttnnngagaaatatagagtgtggagaatatagtaggtagatagaagagagcgcgccgnnaaacnanaacgacctcaaggagagatggcgagcgtggagacnacgacagtgagcagtgtgtgggcgagggacgtgctgatgtantatccgtaagatatactcagctnggcgcgcctgangctgtgtgcacgtccatcataatcacgctacttgttgtntnntgtatatgtagtgacgagtcgtcnatcatgcttgcaagcagctgagtatacctcagagagcaacagtaactacccnncacatacacccntcataactattatttcttcttttgcaatatggacagtcgattgtatgnatgaactcgagcgatacgactatatactcataagatatactcatacgggcgtggctgtcgcagcgaggggtaggtgatgaagtatataagtatactagtatgtagtatgttagttatgtatatatnanatatanatatacagcacaccacacttaatacacacacgtatcatcaacacaaccactgccacgcgccacatagagtcagctacatatcaatacgagatcagatgctgcgatgccgctgcgcggctcgtgctgcgttgtgttgcctctgcacaatagcagcgagtgacggcgcacgtatatgatcgaatacntagcaagatacagtcacggacatgcncgtgcggcggctcgtcgggnngngnnnggcaaangacaacntcatctgtgtgctgtattcaagcagactgccctagtganagnagtccaanagatcagctagatacnacatctctacatctactacatgctanaaactagaggagagcacgcacacactgtcatacagagcgtgcatcntaatacgataaannatgtgtactatctctcctgtaatnctatctcgttacgtcatctgcatctcgcncgttctgtctcgtgtgtctcgcgatagcatcgcgcagctaaatcgaccggctacgcgcagagtggncntactgaagngacgtatgatgttggtatagcgcgtagacacagcgcgacacaccacacaccntctcnncccnctgctgcacttcccgctatactacacagtctgtcgatgatgtgatgacgcatatctcacactctacgctcctccatctctcagatgtactattcagaccacganagagctgttgtcgtacctcactgaaagagacacacgactactcagcagtgacagagctgatatctagctacgaatagcacgatgcncgtagcacgcacgacacctactaatagatgaccncagctcatcagagcgctcatgtcacccgcatgcatgatactgangagcaatgtagcgcatcgtcgtcgacgatgactcacacactgcctcaagcactgatatgccgantagagacatgacgantttaacatactactgaactactacgcgtagcagtcacgagncgctcngtgtagcgaatgatgttccgtcgactactctgcgtcacctactctcatctcgcatcactctcgttcgactctatgctgtcactcaatcatttgcagtgatcacgtacctgcctgctcgactacgcggtgtgcctactatcgagctaatcactatgactcatgcgttnctatcacagtctcatcaaactatactcgtgactgtatctcatgtgatgagcgtagtgctacgttncgagtactaccacagtgacgtagtantgctactactgctgcatatgtcgtatnttgctgccgtctctcttgatatcttcactctgcgcactgtctgcgntccactgctgatctgcttncgacgagntgtatg

SEQ ID NO: 2023 - DNA, 427 bp, Glycine max
  misc_feature (95)..(96): n is a, c, g, or t
  misc_feature (288)..(288): n is a, c, g, or t
  misc_feature (387)..(387): n is a, c, g, or t
  Peptide Sequence Number=SeqID_9570
  Probeset Number=SeqID_11802
gtcagaccccaaacgaaccccgccgtctactcaccgcgcctcgacctcgacctcgccggcggcggagccagatggcgtcgacgacgttccggcgnngcggcgtggcggcggcggccgccgcgttcatcgcgctcgcggccttcggatccgcctcggcgtccaagacggccttcgtgaagtccaccgtcaaggcccacgacgtcgtcatcttctccaagtcctactgcccgtactgtaaaagggcaaaggctgtgtttaaggaacttgaactgaagaaggacccatatntcgtcgagcttgatcagcgagaggatggtggggatatccaggacgccttatccgacatggttggcaggcgtactgttcctcaggtttttatccgagganagcacttgggaggctctgatgatatcgttgatgcatatga

SEQ ID NO: 2024 - DNA, 508 bp, Glycine max
  misc_feature (490)..(490): n is a, c, g, or t
  Peptide Sequence Number=SeqID_9571
  Probeset Number=SeqID_11803
cttttttttttttttttttaatctggctctttctttttccttctccttttcgacctggctctctcattatcttgcttttccttctcttttaaatcttgagcactcttctcttcatgatgctgatgaactctatgatgaacacccctagattcagcctgggattaggtgaaacaagatttgactgctttgatgcacttctagtaccttgactcaaataatgatccaaatccttcattctttcattaatggcattaatagtgcctccaactttacttgaactggtatcagaatgctttctggaatgaagttgatgttcttttccgtaaatatggatgggatctttgaaagaactgctatcctcaatcaaatttctttggattttgacagtgctaggggactttatgctttctgttctgctattatttctattgtgagtactttttggttgttccataacaatgtcaaatttctcacttccatgtttattgtnatgaacagcagtaacagt

SEQ ID NO: 2025 - DNA, 429 bp, Glycine max
  Probeset Number=SeqID_11804
ctcttcagctcatagcattttatgtgaaggcgtgtgattggttttcagaaccaatatcaggagcagtattatggaatccaacagagaagaggccgtcaaggctagggaaattgctttaaaaaagttagaaagcaaagactttgttggtgctaaaaggattgcactgaaagcacaaaggatttttccagaacttgaaaacttatctcagctgttgactgtctgcgaagtgcattgtgcagcagaagcaaagatcaatgagttgttggacttctacgggattctccaagtggatgtaacggctgatgaggcaaccataaagaagcagtaccggaagcttgccttttcacttcaccctgataaaaatagttaccctggtgcagaagctgcttttaaattggtagcagaagctcactcaacattgtctgatcg

SEQ ID NO: 2026 - DNA, 1854 bp, Glycine max
  misc_feature (17)..(17): n is a, c, g, or t
  misc_feature (19)..(19): n is a, c, g, or t
  misc_feature (89)..(89): n is a, c, g, or t
  misc_feature (111)..(111): n is a, c, g, or t
  misc_feature (154)..(154): n is a, c, g, or t
  misc_feature (197)..(198): n is a, c, g, or t
  misc_feature (236)..(236): n is a, c, g, or t
  misc_feature (283)..(283): n is a, c, g, or t
  misc_feature (374)..(374): n is a, c, g, or t
  misc_feature (435)..(435): n is a, c, g, or t
  misc_feature (1171)..(1171): n is a, c, g, or t
  misc_feature (1503)..(1503): n is a, c, g, or t
  misc_feature (1564)..(1564): n is a, c, g, or t
  misc_feature (1662)..(1662): n is a, c, g, or t
  Peptide Sequence Number=SeqID_9572
  Probeset Number=SeqID_11805
cccgcgctgcctcgtcntncccgaacgatcagcgctcgctcgtacgtcgtcatgctacactcacaccggtcgcgtgcgctctctcgtgncttctgtacccgcacgtcatcntagctgcacacgctgtgcgtcctcgagcctcactgcctcgtgnaagtccctgcagtcttatatacgacgctgagcgacgtaccatnntcttgcatgtctcgtgcatctgatcgtgtcctatcgcnccatgtcctgtacctcatccgtcgcatcgatataccagctaccgcgngcgtcgcatgcagtcggtcgtgccgcggctgctcgtctcgcgcatgcttccagacgagcggccgagtatcgaggctgtgagcgcccctggnaataatcataccgctcgctcttgcgcgtagttctcgctcaccaccgtgtacagtttctcgntgagcgtcgcgcctcctgcatgtctcttgcatatcgtgcgtcacttctgcgcctgagctctacatacagtcactcctctgccgcgttcgcgcgccgcgccctgcacgtcgcgtcgtcttagcatcacgtatccaacgtcgtcgttgctggtgcgttcgcgcgcctgtcctcagcagtcgcgatgcgctgctgcgttcctgtctcgccatttcatctcctggtcgtgtccacgcccgacgccgctccgcacctcgtctgcgctgcgcggtctgtgtcaagctgtcgctcccactctggtgatttgtctacgtgcacagcgcatatgagcaacgcttcggttgtgtcgtcctcgtctcatcgtcgtacttgttatcgatatcatccctttcccgtgcctctccgtcctgcggtcgccggcctccatcgcgttccgtttatcgcgctcgcgatacatctccgtccgccgtccagtcgcgcccctccttcactctctctctcctcttctcgccgcgcgcgccacatctcgtttcgtgtccgtccctacttctgggacgttgtgtgcggtgcgcgtcgtctagtcccgcagtcccagctcacgttccgcttcgacattctacttgctactgcacgccggccgtgatatcaccttgttcttcgctattcgtgctccctctgctccctgcacagtatcgctctctcggccacgtccatcttcgccgtctgcgctcgctagtangtctctcaccacacggcgcttttctccactcatctctgattgacatacctccatcttcttcgcgcctcgctagcgttgccgcctcgtcgtcacgtgctctctgctccgctcgctcactctcccctgtaccgtctcctccgtgtctacggccccggctgtcggcgccgcgtccactccatcgtattcctcgccttcaacatcgtgtcgtctccgccgccctcgcgtcgtcacgcctatcactcttcttccgtgctccattaagtcgttctcgttgcgtgtacctatcagcctttgctttgtttgcgtctctcggttctgttctatcgtcttgngacgctcagtcgtactggcgcgcattttctctccttctctgggcgggcctgagaaaacgcntcgtttcgcgccgatgccctcgcggctcgcgttccgctcctcgactctctcctcctgctcgttatcttatctgcgtccgtctgtgctctgcggggtgncataaatccgttcgccggctgcgtcactttgcgtctagtctggctctgttgtgttatacatcgctatctctagcaggactctggactattcgtgaccttctgttccctattatcgctacggccccttttttttcgccgcttcgcctcttcacctcgtctctagttgccgccccctcgcccggcgccacccag

SEQ ID NO: 2027 - DNA, 1825 bp, Glycine max
  misc_feature (5)..(8): n is a, c, g, or t
  misc_feature (20)..(20): n is a, c, g, or t
  misc_feature (23)..(23): n is a, c, g, or t
  misc_feature (31)..(36): n is a, c, g, or t
  misc_feature (44)..(44): n is a, c, g, or t
  misc_feature (79)..(79): n is a, c, g, or t
  misc_feature (113)..(113): n is a, c, g, or t
  misc_feature (126)..(128): n is a, c, g, or t
  misc_feature (179)..(179): n is a, c, g, or t
  misc_feature (253)..(253): n is a, c, g, or t
  misc_feature (256)..(256): n is a, c, g, or t
  misc_feature (290)..(290): n is a, c, g, or t
  misc_feature (306)..(306): n is a, c, g, or t
  misc_feature (407)..(407): n is a, c, g, or t
  misc_feature (430)..(430): n is a, c, g, or t
  misc_feature (432)..(432): n is a, c, g, or t
  misc_feature (492)..(492): n is a, c, g, or t
  misc_feature (614)..(614): n is a, c, g, or t
  misc_feature (649)..(649): n is a, c, g, or t
  misc_feature (675)..(675): n is a, c, g, or t
  misc_feature (687)..(687): n is a, c, g, or t
  misc_feature (692)..(692): n is a, c, g, or t
  misc_feature (754)..(754): n is a, c, g, or t
  misc_feature (812)..(812): n is a, c, g, or t
  misc_feature (912)..(912): n is a, c, g, or t
  misc_feature (1000)..(1000): n is a, c, g, or t
  misc_feature (1030)..(1030): n is a, c, g, or t
  misc_feature (1089)..(1089): n is a, c, g, or t
  misc_feature (1228)..(1228): n is a, c, g, or t
  misc_feature (1316)..(1316): n is a, c, g, or t
  misc_feature (1338)..(1338): n is a, c, g, or t
  misc_feature (1345)..(1345): n is a, c, g, or t
  misc_feature (1461)..(1461): n is a, c, g, or t
  misc_feature (1467)..(1467): n is a, c, g, or t
  misc_feature (1515)..(1515): n is a, c, g, or t
  misc_feature (1522)..(1522): n is a, c, g, or t
  misc_feature (1595)..(1595): n is a, c, g, or t
  misc_feature (1597)..(1597): n is a, c, g, or t
  misc_feature (1635)..(1635): n is a, c, g, or t
  misc_feature (1668)..(1669): n is a, c, g, or t
  misc_feature (1731)..(1731): n is a, c, g, or t
  misc_feature (1766)..(1766): n is a, c, g, or t
  misc_feature (1769)..(1769): n is a, c, g, or t
  misc_feature (1773)..(1773): n is a, c, g, or t
  misc_feature (1776)..(1776): n is a, c, g, or t
  misc_feature (1817)..(1817): n is a, c, g, or t
  misc_feature (1822)..(1822): n is a, c, g, or t
  Probeset Number=SeqID_11806
ggggnnnnttttttttgttnttncttttttnnnnnntatttgtncaccattcatttctacttctctatcctccacaccnctatctactccctttctactatggatttttggtntgtgcctctctcnnnacctcttctcggtaactagatgattgataacttgatgaacgacgaagacgnagtgtacaacacgagtacatattaagtataatcatatatataagtattacggcctctgcctgcctctcctgttnggntgtgagtcgctggtagctgagaggggtgtctatnatgaaatacccgcgcncaccctcagccacgctgagttagattagatgtaagtaggccatcgtgacgacctcgaatagcatcaccgcatgcacctcaacaccccgccgcgccacgtantgctcgcgattactggtgctttncntcctatcctcgatttcatagttacggaaatatatataccatccaagatgagcgatatggnatgtttagtgatgccgcaatgttgtcttacgataatgtgtgttgtgggtgtgtgtattgagttgagcttatgttctgcacaacaatcagtacactaccgcacccctagtagagacgtgatgngatgtgtgaagaaccacacatacgatacacaaatntatactcatatatagtatataatacnactcatgatcantatgntatatattagtgacttggtatagtgaagacgcgtttcaacagtgtgatgtatagattgtagnacatattaatttagatataatatggaccagaacacaacagtattgcatcacgtgagangccactcaaccaccactcacagagaagaaactgacacaagatagaatgtcatgcatgctttggatggctcatatatctgcacactgggcgatacgcacantcatcaccatcctctaatgacgctcatcacgcacttctcgcatcgctctgtcgctctctggctctgaatgtacgtgacgtgtaggatngctactgagttgattagtcgacgcgtaacngtgcgtactaatcgtcagttagtgtatgtctactatctcgtatatacatagatgtgagngtaagaattagaagatacagcgatacgcatcacgctctgacgcgaaggacacagattctgtagtgatatgtgatcgatatcgttatgatattcagatgacagtgtgagatcacatatgggggatgacgagctatggtgncgtacacgacatgcggatgtgagctgagtctacgtctcacatacaagaggaggtagtacactctctactcacactgctcacctcgcgnagccctcgacacgtatcagtanacgaatngcgcgatgagtgatagcgtgtgagagtagtgagtgtaccgcagtgtgacacgtatcagtatctatatatatctgctctcatacagtgtatgtcaaaaatatatcatatgctagctnctacancatgtgcgatagtctctacgacgacgtatagagtgacgtgctacgcancaggtgnacaatgtagacgacgactacgtgtcgatctcagacgagctgcgtcgttgtatatcactcttcagtctgtgttngnagcgtccgtcgctgctatcctgatactatatatactanagtatagtaacagaccgcgatcggacgtcacannacatatacaccagctcgcccttggcgcgacagagaagaggatctactccgtcacgtaatccngtactacaatatgcatacggcgctgcttattagtngantganctngcacgtacacgactgaccatctgatgtacatgccgacttantatcnacg

SEQ ID NO: 2028 - DNA, 283 bp, Glycine max
  Peptide Sequence Number=SeqID_9573
  Probeset Number=SeqID_11807
aggtagaggaagagtgctaatgaagaggatagagaacaagatacacacgcaagtgacgcttgcgagcacgagatacgggcttcgcaagaaagcctatgagctatctgttctctgtgttgctgaggttgccctcatcatcttctccaagcgtggcaagcttgatgaagcgtgtaacagcctgagcaagcacgagacacttgaatgggaccagaaaagtagatatggcgccgtggaacttaccaaaccctgccgagagcttgagaacaattatcgtgctatcctc

SEQ ID NO: 2029 - DNA, 2079 bp, Glycine max
  misc_feature (4)..(4): n is a, c, g, or t
  misc_feature (30)..(31): n is a, c, g, or t
  misc_feature (41)..(42): n is a, c, g, or t
  misc_feature (49)..(49): n is a, c, g, or t
  misc_feature (51)..(53): n is a, c, g, or t
  misc_feature (61)..(61): n is a, c, g, or t
  misc_feature (75)..(75): n is a, c, g, or t
  misc_feature (153)..(153): n is a, c, g, or t
  misc_feature (200)..(200): n is a, c, g, or t
  misc_feature (232)..(232): n is a, c, g, or t
  misc_feature (252)..(252): n is a, c, g, or t
  misc_feature (332)..(332): n is a, c, g, or t
  misc_feature (334)..(334): n is a, c, g, or t
  misc_feature (370)..(370): n is a, c, g, or t
  misc_feature (417)..(417): n is a, c, g, or t
  misc_feature (419)..(419): n is a, c, g, or t
  misc_feature (422)..(422): n is a, c, g, or t
  misc_feature (470)..(470): n is a, c, g, or t
  misc_feature (671)..(671): n is a, c, g, or t
  misc_feature (684)..(684): n is a, c, g, or t
  misc_feature (750)..(750): n is a, c, g, or t
  misc_feature (777)..(777): n is a, c, g, or t
  misc_feature (787)..(787): n is a, c, g, or t
  misc_feature (797)..(797): n is a, c, g, or t
  misc_feature (818)..(818): n is a, c, g, or t
  misc_feature (827)..(827): n is a, c, g, or t
  misc_feature (832)..(832): n is a, c, g, or t
  misc_feature (834)..(834): n is a, c, g, or t
  misc_feature (867)..(867): n is a, c, g, or t
  misc_feature (870)..(870): n is a, c, g, or t
  misc_feature (885)..(885): n is a, c, g, or t
  misc_feature (898)..(898): n is a, c, g, or t
  misc_feature (948)..(948): n is a, c, g, or t
  misc_feature (1008)..(1008): n is a, c, g, or t
  misc_feature (1062)..(1062): n is a, c, g, or t
  misc_feature (1093)..(1093): n is a, c, g, or t
  misc_feature (1132)..(1132): n is a, c, g, or t
  misc_feature (1178)..(1178): n is a, c, g, or t
  misc_feature (1195)..(1195): n is a, c, g, or t
  misc_feature (1214)..(1214): n is a, c, g, or t
  misc_feature (1290)..(1290): n is a, c, g, or t
  misc_feature (1409)..(1409): n is a, c, g, or t
  misc_feature (1420)..(1420): n is a, c, g, or t
  misc_feature (1550)..(1550): n is a, c, g, or t
  misc_feature (1693)..(1693): n is a, c, g, or t
  misc_feature (1700)..(1700): n is a, c, g, or t
  misc_feature (1744)..(1744): n is a, c, g, or t
  misc_feature (1759)..(1759): n is a, c, g, or t
  misc_feature (1767)..(1767): n is a, c, g, or t
  misc_feature (1789)..(1789): n is a, c, g, or t
  misc_feature (1867)..(1867): n is a, c, g, or t
  misc_feature (1950)..(1950): n is a, c, g, or t
  misc_feature (1969)..(1969): n is a, c, g, or t
  misc_feature (1997)..(1997): n is a, c, g, or t
  misc_feature (2079)..(2079): n is a, c, g, or t
  Peptide Sequence Number=SeqID_9582
  Probeset Number=SeqID_11808
tctnttttcttttttcttcctttatttttnnttatattttnntcttttntnnnttatagcncgatgttacgtctncacgccctgtacaactaccaccacccgtcgctcaccacaccccacggacatcgctgctagctctcggtactgtacatnctcgcacaccgacgactcacgtagtgctgctactacttcgctcgctntctgttgcactcagatctattatacttatctnacatatcatctctatacacntcttatgtggtctcactcgtgtcataacagagagacaatagagctaacacatagttgctgtctgttgatgtgattgtggntntacgtatttctgactcggtgatctcttcgtgctcgngctgtcgtgctaatacagtctacgcttggccctcgtcggcgcgcaancncantcgcacacagacatacacatcgctgcatcgaccctcggtccctcgcanatgcgcgcgcgcgcacgcgtcttcttcctgctccggcgctgctgctccatagccgtacactctgtcacattaacacgcgcatacactacgacattgtatacactcgtctcatggtacatctagtattatatatcacgctgctcctctacttagtagtctaacatagtatactgacagagacgacagtaatagttataatgntgtatacgagacnctacacacacgacacacacagacacagacgagcacacagacagcaagtacatatcaccatcatccncctgtcgacgacgacagaccgcacccnatgcgtcatntgtgtgaaancggcgctatgtatgtgtatanagtgtattntcacncnatactcatagtcatcgtgctacgctctactggntantatctctcgtacgancgcgacgattgtntatctgatggtcgcacactatcgttcgtgcttcgactagtacggcgtccntcgccatatagctagacgaccgctacgcgtcgaccgcgcgcgggcgacgctgcggcgcangcagcgtgcgacgcgccagcagaactactatcacgcataggacaacgcgctgcngtctacgtagacttcgcacttgtcagatcangattcgtcagtctcgcatctacttatcacatactctcgnactcgccgattagcctgtcctattcatcgtccatctctcgtctcangccctcactcactctgnatagtgacgtgtaactctntcgcttgtatctctatatagcatcgatcatactctatatgatgcactctgtactcgacgacgctcgcacatggacntacgatgtacgttacagtagttagtgtcactatgtcgatgtcagatttagatacgtagagatacaagcgaagtacatgtggcgcgatcgtgattgattatatgatatattcatacacangtactatacgnatcacacagcttcagcctgtatgtccacgcgtctaattactcgaacgccgctgttagtaagtgtcattctctgaccgaccatagtcataatgcgaccacacatatgcgcgggcagatcatggtgatctgnatgatattatctagtacatcacagtgtatacagatcacgtatacgtgcgcggagtcacgtgcgatgcgcacacgatggagtcggcacgactgcatgactgtagtatagaatggaatatatatcagactctgatactggacggncgtgtantgagtcgcgctatatagacggaaatgcacgacgtgctgacgagnacgacgatatagaanacaacganactactataactatctgcgacngagagctgcgcaccacgccacgcgtgacgcacactatgcagctgagtgacgactgcgtatatcgtttacaccgacttnctcgtcctactcacaacacccacgcccctctcgactcctatcataccaaattaacgtatctactcacggcactcatatatgantactgctagctaaactggntaagctctcggcgagtgacactacgacntatatactattaacataaaatgagatatacctacgctacatctatactacacatagactggaccgatcactcgacgtcttgn

SEQ ID NO: 2030 - DNA, 448 bp, Glycine max
  Probeset Number=SeqID_11809
ctccccgcccactacctcaaaccctaccgcctcgccgccgccgccatggcctcgtcgtcgtctccggcgagtagccacccgcctggcccgtttgctctagggttggagtcctcggcgaacaagattggcatcggcgtcgtctccatctccgggcaaatcctctccaacccgcgccatacgtacatcaccccgccaggccacggtttcctgccccgggagaccgcgcagcaccacctcgtccacctactccctctactccgcgcagcactcgccgaggccgatgcctctcctgccgacctcgcctgcatttgctacaccatgggccccggcatgggcgggcctctccaggtcgccgccgcatcggcccgggctctgtcgctcctatgggggaaaccgcttgtcgccgtcaatcactgtgttgcgcacattgaaatgggccgcgcggtca

SEQ ID NO: 2031 - DNA, 345 bp, Glycine max
  misc_feature (55)..(55): n is a, c, g, or t
  misc_feature (63)..(63): n is a, c, g, or t
  misc_feature (66)..(66): n is a, c, g, or t
  Peptide Sequence Number=SeqID_9583
  Probeset Number=SeqID_11810
aaaaatcacatgtgatcaaatccgtcttctctttctctccagtttcgcggaagcngatttttnganggtattcaagaaaacatggaatccagcagtaaccatggagggatcaagctactgctagctgctgaacacgaagctcagcaaatcgtcaatgccgctaggactgcaaaaatggcaaggctgaagcaagccaaggaagaggctgagacagaggttgctgagcacaaagccagcactgagcatggtttccagaggaaactcgaagagaccagtggagattcaggtgcaaacgtgacgaggctagagcaggagactgatgccaagatcgagcagttgaagaac

SEQ ID NO: 2032 - DNA, 1778 bp, Glycine max
  misc_feature (12)..(12): n is a, c, g, or t
  misc_feature (157)..(158): n is a, c, g, or t
  misc_feature (268)..(268): n is a, c, g, or t
  misc_feature (270)..(270): n is a, c, g, or t
  misc_feature (277)..(277): n is a, c, g, or t
  misc_feature (309)..(309): n is a, c, g, or t
  misc_feature (314)..(314): n is a, c, g, or t
  misc_feature (335)..(335): n is a, c, g, or t
  misc_feature (391)..(391): n is a, c, g, or t
  misc_feature (486)..(486): n is a, c, g, or t
  misc_feature (513)..(513): n is a, c, g, or t
  misc_feature (574)..(574): n is a, c, g, or t
  misc_feature (685)..(685): n is a, c, g, or t
  misc_feature (726)..(726): n is a, c, g, or t
  misc_feature (765)..(765): n is a, c, g, or t
  misc_feature (843)..(843): n is a, c, g, or t
  misc_feature (857)..(857): n is a, c, g, or t
  misc_feature (908)..(908): n is a, c, g, or t
  misc_feature (913)..(913): n is a, c, g, or t
  misc_feature (1420)..(1420): n is a, c, g, or t
  misc_feature (1717)..(1717): n is a, c, g, or t
  Peptide Sequence Number=SeqID_9584
  Probeset Number=SeqID_11811
ttgtgagatcancgcgagctacatatttactattgactgtgcacatcgcgtccctatcctgcgatataacttgctcgctcgtgcgcacgatatccgcatctattacgtccggcagactaatctgatcgtgtacgtgacatatatacttgtgtcacanntagtgacgaattactgcgcgcggttatatgagatatctacttactactatatctgcgtgcgttaatatataaatacgttcgcgagctgtacattgatagtgtgcgcgcgntnctcaacnactactatctgcgtgttgtcgtctcgatatanaccantcgcttcactacaccgtcgtntctcatctctgcgtccgtatagatgtgcggactccttgtcatatctagcgcatatnactcctgtctcattgtgtaactatattcatgtcgatccgcgagcgctagtatatactgcgcgggagtacagcactcataacctactatcgtccanatcgtcccactgcatctcttcgcgctnagcgcgcacatccctctgccatcatcgctcttgtactagacgatctatcctattcgctgcngcatactacatgtggcgcctacgttgagatcatcacgacgtaataatcatcggcgcggcgtgcatataaagagcgtcgacatcatatcctgctccgctcaccacgacgcgngcgtctataaacttatcatctcgtgcgaccaacagatggtngagtactcattactgttcacctcatattgtgctactctnttacacgctctggctgctactattcgtgttgtaactctcttgtcatacagagctatcactgtctatctcattatccgncttcacataggtgngtctaatactatctgcttgtctattcagacactcgttgacgtccgcgatcnctcanatatccttcctcatgaggctgacttagctactgtgcacaactacttggcgttatacacatatgaggctgcgatatgtgtgcgtaacataatagtgacacacatcgtgtcgataatacatcgcgtcgcataacaatcatctcccaaactctgtgtgacatcactcgtcgggcgtctctcccgttatatccacttgcgtaaacacaacgcgcggcctcaattatagaaacatcggcgctgcgtctaaacggccgtgcaacaaggcgccgccgagcgcgtgtgacaaacacaatcatcaaactatgtaatacacgcgcgcggacaacgcgcgtggcgtcaatagcgtgggcgttctcataatcataggtttatactgtcatattctcacgtcatatcgctatcgcgtccatcgtggtccatccatagtctacataactacttccattcatctcactcgctacctccctactcacttcatccaccatctcacactacgcctagtccgtgcntcctctggtctatattacggaactttcacttttcacctctttgtgctgctcttccttcgcactcctgtgtgataatgtggcttgtcgagtggcgcgtgcaaaatatctatctaagagttaataaacgtcgccatcccgcgtcactcataggggcgtaaaaacggacgcaaaaatggctatcatgtgcacatagggcacataggcgtataatatgtgtcccccgcgcgtttataaagttggtaaaaacgctgataataggcgtcacatcttattctctctattttgatttaggatttnacgccaccctgtcgagggggcgaatgtgctcattaccgttacacctctcccgcgcgtacat

SEQ ID NO: 2033 - DNA, 1605 bp, Glycine max
  misc_feature (1)..(703): n is a, c, g, or t
  misc_feature (1605)..(1605): n is a, c, g, or t
  Probeset Number=SeqID_11812
nnnnnnnnnnnnnnnnnnnnnnnnnnnnnnnnnnnnnnnnnnnnnnnnnnnnnnnnnnnnnnnnnnnnnnnnnnnnnnnnnnnnnnnnnnnnnnnnnnnnnnnnnnnnnnnnnnnnnnnnnnnnnnnnnnnnnnnnnnnnnnnnnnnnnnnnnnnnnnnnnnnnnnnnnnnnnnnnnnnnnnnnnnnnnnnnnnnnnnnnnnnnnnnnnnnnnnnnnnnnnnnnnnnnnnnnnnnnnnnnnnnnnnnnnnnnnnnnnnnnnnnnnnnnnnnnnnnnnnnnnnnnnnnnnnnnnnnnnnnnnnnnnnnnnnnnnnnnnnnnnnnnnnnnnnnnnnnnnnnnnnnnnnnnnnnnnnnnnnnnnnnnnnnnnnnnnnnnnnnnnnnnnnnnnnnnnnnnnnnnnnnnnnnnnnnnnnnnnnnnnnnnnnnnnnnnnnnnnnnnnnnnnnnnnnnnnnnnnnnnnnnnnnnnnnnnnnnnnnnnnnnnnnnnnnnnnnnnnnnnnnnnnnnnnnnnnnnnnnnnnnnnnnnnnnnnnnnnnnnnnnnnnnnnnnnnnnnnnnnnnnnnnnnnnnnnnnnnnnnnnnnnnnnnnnnnnnnnnnnnnnnnnnnnnnnnnnnnnnnnnnnnnnnnnnnnnnnnnnnnnnnnnnnnnnnnnnnnnnnnnnnnnnnnnnnnnnnnnnnnnnnnnnnnnnnnnnnnnnnnnnntggcagcagggtttgggctattgatgagccaaacattgcacatcctgcagctggatgggagcgactgctaaggatcagagctgaaggaagctccagatttgcagatatatactatatagcacagcctgcggcgagatgggggtcactgctaaggatcaaggatgtaataatttaacattttggatataaaatagatccagcaggcacgagattgcgctcaatggtagaggtccagaagttcttgatggagcatcctgagtatacaagagatggggtaactctttcacagttctcatttcaaattccaaggccattacagtgaaaactatgtgaggaagcgctccgctagacttacctcttcatatgaagtcagcgagcctgctgaacatcagtcaagtgagtcctctagcatgggtatgatccagaagggtgaggggcaagaatggggctttcttgccccccattcatgggattccatgaattttaccctactatgtatatggggaactccgttagttgcatctaaccatacaactagagaagtattccggtaatcatatggaccctcgtattttaggtaaattgaacttccgtttgtaagatgtgcagtagaggttcacttatcctcttacaaagatcattatggtggtatttttaatataaatgtattttgcatagtaggagaatagtttgcggaaaaatgtgtgcatgtcgacagcgtaacctgttagtagctagtaataatataatttgcatatatggtcatttagcaatgtactaatttgaacttgtcgaattttttggtagaatattttgttcaaaaaatgatatgaaaatatggtcattcagcaagaggctaatttgatcttaactttagcttcttttgaccttttttttttcan

SEQ ID NO: 2034 - DNA, 428 bp, Glycine max
  misc_feature (23)..(23): n is a, c, g, or t
  misc_feature (171)..(172): n is a, c, g, or t
  misc_feature (178)..(179): n is a, c, g, or t
  misc_feature (412)..(412): n is a, c, g, or t
  misc_feature (414)..(414): n is a, c, g, or t
  Peptide Sequence Number=SeqID_9585
  Probeset Number=SeqID_11813
agttctttttgttctctccggcnaaggaaatgagcagcgagacgagcaagcgagatcatgcacgggagctcctcgccgccgacaggaagctgatgaccgtggcccgttcggcgcgacggcgccggctggagctccggcggctgggacgtacggcgtccgcggccgcggagnncgaggnngcgaagcgggtgcggccggcgccggacagctcctcggactcgtctgactccgcgaaggtggtgccggtggcgtctaggtgttcggcgtgcgtgtcgcacggggcggtgtccgtgatcgggcgccggcgggagatggaggacgcggtggccgtcgccgcgccgttcctggccgagacggcgggggtggagggcagcggcgacgtggagtacggggcaggggacgagggcttctncncggtgtacgacggg

SEQ ID NO: 2035 - DNA, 580 bp, Glycine max
  misc_feature (570)..(570): n is a, c, g, or t
  Peptide Sequence Number=SeqID_9586
  Probeset Number=SeqID_11814
ggtatctcaaggtctcaatctctaactaggacgacatgccttctctctccgttttcccatcactcccatcgcttcaaaaccctaacttgagccaacccaatttcttcaatttccgcttaccgtcgctctgtcaccgtcccctcgtcaaaagcactgcaacttttcaccgtagaatcctctgcaaagccttcagagattctggcgaggacatcaaggcggtgctcaagtccgacgacggtggtggcagcggcgacggcggcggcgacggtgggggtgggggtgaccgcgacgcaaaggctactgaccgcgcggtggagccctgactaagtcacactctcttggcacgcaaatactggagaatgcggatgaacgcatggtcctggataacgagccactctatgaaatctgaggccgtacactcaccctcacaagtccacgttcgtggaatctgaacactagatctcaacaacaatggagcgggcaatcgtgctgcaccggttcccgtgcagatgaactactaccatccgccactcgccgtaaaccgaataccttgccgtcgccgcagctatncatgctcgga

SEQ ID NO: 2036 - DNA, 771 bp, Glycine max
  Probeset Number=SeqID_11815
gatattcaattaaaattcaaascaagcaaaactcaaacggtatgctcaaacaaaagactaccaaaaaagcggccgatttgagacttcgtaccgaaccagatgcttctsmacttgatcacaatacctcctccacttcttacctcaatcgttctagamrtatggctcgtatatcacctaacctcactccaaaagacaacttaagtaggctattggaaaggccatcaccttcacctattactgcacgttcatcaagagcaaacatcttaacagaacacaatggaccaatttttgaggcatcaaagattccaagaggttcaagatctccaaattttggaaaaaatataaaggatgcagatagatcgacggatgatagcggtgaaaataatggtaaaaagttgttggaagcacagcatgacaggaagtatttggaggagcaatataaattaatggagaatagagttaaacatttgatggatgagaacgaaaagataaagggcaaaattaagcagacgcgagtacaaacagaaaatatagtaaagactaaggagaaattagcagagagggaagaaaakattagattgcagcaggaaargcgtgagagagaagcaatasagaagaagaatcaaatagcaaaaatgaagcaagagcacgaagaaaaacgtaaagaaaagcaagaaaatgtcataaacagcaagcttagacttgtttcagaggtcagacaacagaagatcaaggatcaagagttgaaggaggaattaaagagagaagaag

SEQ ID NO: 2037 - DNA, 1977 bp, Glycine max
  misc_feature (1)..(1): n is a, c, g, or t
  misc_feature (4)..(4): n is a, c, g, or t
  misc_feature (16)..(16): n is a, c, g, or t
  misc_feature (49)..(50): n is a, c, g, or t
  misc_feature (97)..(97): n is a, c, g, or t
  misc_feature (173)..(173): n is a, c, g, or t
  misc_feature (177)..(177): n is a, c, g, or t
  misc_feature (197)..(197): n is a, c, g, or t
  misc_feature (285)..(285): n is a, c, g, or t
  misc_feature (287)..(287): n is a, c, g, or t
  misc_feature (290)..(290): n is a, c, g, or t
  misc_feature (309)..(309): n is a, c, g, or t
  misc_feature (342)..(342): n is a, c, g, or t
  misc_feature (360)..(360): n is a, c, g, or t
  misc_feature (379)..(379): n is a, c, g, or t
  misc_feature (439)..(439): n is a, c, g, or t
  misc_feature (475)..(475): n is a, c, g, or t
  misc_feature (521)..(521): n is a, c, g, or t
  misc_feature (556)..(556): n is a, c, g, or t
  misc_feature (622)..(622): n is a, c, g, or t
  misc_feature (655)..(655): n is a, c, g, or t
  misc_feature (733)..(733): n is a, c, g, or t
  misc_feature (749)..(749): n is a, c, g, or t
  misc_feature (821)..(821): n is a, c, g, or t
  misc_feature (823)..(823): n is a, c, g, or t
  misc_feature (858)..(858): n is a, c, g, or t
  misc_feature (962)..(962): n is a, c, g, or t
  misc_feature (968)..(968): n is a, c, g, or t
  misc_feature (1080)..(1080): n is a, c, g, or t
  misc_feature (1123)..(1123): n is a, c, g, or t
  misc_feature (1578)..(1578): n is a, c, g, or t
  misc_feature (1639)..(1639): n is a, c, g, or t
  misc_feature (1842)..(1842): n is a, c, g, or t
  misc_feature (1854)..(1854): n is a, c, g, or t
  misc_feature (1866)..(1866): n is a, c, g, or t
  misc_feature (1917)..(1917): n is a, c, g, or t
  Peptide Sequence Number=SeqID_9587
  Probeset Number=SeqID_11816
natnggaggtacatgnacagacgcaagagtacgacgacgtatatacganncaacagtcgtagaaggcagcttcaatgagtgcggactaggatacagnacagcagcatgtagtatatgacactatgctgtcaagtatcatccgcaccacgtcacgagacgcagacactcgatcnacgntactatgacacgagacgaangcacgatagtgatgctaagcgcgatgacagaccagtagtcgtctagctcatgcatgagtatccttatacacagagctgatatgattanangtngagaatctgacggagtacntcgtacatcgtactcattcgatagcgctgtgtntgcgttgcaccactatcntctgttgtgccgtcatganacacgtctatcatatctatgcgtacatgtgtagcgctcgacttcatcatcgtgagctganatacgacgtgacagacacggctgcgtacagctattncatcacatgttacacgttcgtcagagtgtcatgtactgcaccgtanctcagtcactatacgtcacggagtagtctatagantctgtgatgtcgcgacacgcgtcctcctattatatcagtacgtcagatgtacatgacaggtacatnctgacgtacatatgtacgataacactgcagagntgagacgctacgtcctctgcaagaagcatgagatgcatacttaaggtgtggctgctgactcgcagccagtcgccgacntagtcttgtcgtacancgcacgtgtatggttcgatgtgtatcatgatcgtgcggtcgtcgtgacagcagtcatcagcatactgtagtntntcctgcgcgcaaggcacgagtgacatacactctcntgcagagctgctagtgagaatgccgcagagtgtgttgccgctcacgcatcaatccctaagtcagagttgagagtatcatctcgcggacgctggctctgcacaanagtcgnctacggcgatcgattcatagattatctgtacagtcgccacgcacgttcgtgatgtagtatacaatacatatgatgcagacgatgccgcagcagcgagagagcatcacgtgtntaacatatattctcctcgatatgatgtggaatatgagtcggtnatgattatgcgcctctatatgtatctagtctatagagaaagagtgtatatgatgtcacagtgcagatagtatataacaatataaattgatactgtatttattagatgtgttttattatgagtggaaagagacatagtagatggtgtacagagaacgtcgattgtcggtactacgcacgctagatccacgcgacgcgagatcgtcatctcatttaatatcgtcgtcgtaagaatatcatagtaatgatactatacacgagcactactcacatcgttgctgagcgtcgaacatgagtcttacatacatgatgacatctcatcgacaccgctggcaccttgctagccatgagcttcgaccgctctcagttgtctatactattctcgtggtgaggctacgatagagtagctagagacgagatagtgttggagagtaaatcagtcacaagaaggaacagntatcaccactcatgacacactgaatacgaccattactacatatatcatataaatatagtancatatagatgtatttgggttctgctattacgaatgccatctagccatgcgcgggcagcagacgagtgcgagacggcaggtcttcgtctccagcagagcgtgctggcgctcgaacgaccagaacgacgacaatacaccgggacagagtggaagtgcatgggggttgcgggatgggctgtatcacagataacgtacatctgacgnggggagagggangtgtattgtgtntgacttatcttgatctctggcgtgtgggtgtgtagttggcgcgacaccacncagaaacacatctcagatccttcgctagctcatagcaataacaaagacataaatacatat

SEQ ID NO: 2038 - DNA, 1597 bp, Glycine max
  misc_feature (1)..(1): n is a, c, g, or t
  misc_feature (10)..(11): n is a, c, g, or t
  misc_feature (29)..(33): n is a, c, g, or t
  misc_feature (49)..(49): n is a, c, g, or t
  misc_feature (84)..(84): n is a, c, g, or t
  misc_feature (97)..(97): n is a, c, g, or t
  misc_feature (168)..(169): n is a, c, g, or t
  misc_feature (206)..(208): n is a, c, g, or t
  misc_feature (222)..(222): n is a, c, g, or t
  misc_feature (226)..(228): n is a, c, g, or t
  misc_feature (231)..(231): n is a, c, g, or t
  misc_feature (254)..(255): n is a, c, g, or t
  misc_feature (295)..(295): n is a, c, g, or t
  misc_feature (324)..(325): n is a, c, g, or t
  misc_feature (491)..(491): n is a, c, g, or t
  misc_feature (496)..(496): n is a, c, g, or t
  misc_feature (583)..(583): n is a, c, g, or t
  misc_feature (673)..(673): n is a, c, g, or t
  misc_feature (804)..(804): n is a, c, g, or t
  misc_feature (868)..(868): n is a, c, g, or t
  misc_feature (891)..(891): n is a, c, g, or t
  misc_feature (922)..(922): n is a, c, g, or t
  misc_feature (941)..(941): n is a, c, g, or t
  misc_feature (979)..(979): n is a, c, g, or t
  misc_feature (981)..(981): n is a, c, g, or t
  misc_feature (1002)..(1002): n is a, c, g, or t
  misc_feature (1053)..(1053): n is a, c, g, or t
  misc_feature (1091)..(1091): n is a, c, g, or t
  misc_feature (1107)..(1107): n is a, c, g, or t
  misc_feature (1127)..(1127): n is a, c, g, or t
  misc_feature (1168)..(1168): n is a, c, g, or t
  misc_feature (1177)..(1177): n is a, c, g, or t
  misc_feature (1253)..(1253): n is a, c, g, or t
  misc_feature (1321)..(1321): n is a, c, g, or t
  misc_feature (1343)..(1344): n is a, c, g, or t
  misc_feature (1404)..(1405): n is a, c, g, or t
  misc_feature (1457)..(1457): n is a, c, g, or t
  Probeset Number=SeqID_11817
naaaaaacannaaacaaaggagaaaaaannnnncggcaggcgcggaggnccccccgcggggagagcccatacacaactcaaatncgcctatagcgcngccgcgccggggtcgagcacgacaacacctctcgcggcgggttcaccaagacaggggggggggcgcgcgannagacccgcgcttttttgtcaagaaacgaagaaggagnnnccccggcccgaagngagnnnaancccggagaggcggaaaagagagnngaaaggagacgagcgacccggcgccccccaacccgcaccncgacccacaagcgcaaccgacagcgaacnnaacaccaacgcccgcgccgcccacgcccgcgcgccaccgaccgggacgggcagcagcccgacagccgacgacgcagacacccgcggcacaaacaccccacccccgcacccccacacagacccgcaagcaacagcaaagcgaagaaaagccacgacccgcgacaaanccacnagaaacacaacacacgacacgaaaacggacgcacggccccggaagcaccaacacgcacccaggcccacacaacgcacagccccggangcacaacccgagacgccagaggaggaagcggacgggagacgccgcggagaggcccaggcccgcaccagacagcacagaggcccgcacccncaacacacagaagcagcgggacggcagccagacgcgaagcacgggcgcaaccaaccacgcccggaagcgaggaggacagacaccagccgcacgcgacgcgacggcggaggcaaaaccccgcgccagccaancacggcgggcaacgggcgacgaacccaccgcacacacagacaacgcgagcgaggagagagccanagcccaacgggagcccgcgcccnaaacgccccgcgccgccccagcggacacgcncccacaacaagaggggagnagccccaccaccaacagcgcaaccgaggacgcgccgananttagagaagcataaacagacngaggcccagcgcgcgaacgcgcgacagcacacaaagcgaccacgccgcccncgcgcgccgtcccacacgagacaagagcaaaggcggcnacactgagacgcaggnacacagaggcacggcagcgncagacacacgcacgcgccatgtaactgcgcccaccacaacncgtaatgtnagacacggacgcaattgtgcaccgccggccgagacactcgttatacactacacgccggacgcccacgtatcacgcntcacgaatcatacctcggcgctcaggcatatagtgccaggacgtagagatagtgtcgaaccgcgccanttcaagaccacgtgtgtcagcnnttctactcgcgctccccatgattatgatgatagacgactacgcgatcgcgaatacattannataagcctcagacactatatagcatcgcgtgtgcagacatatgaatgtctanacacaggactagacggatacacattgttgtgcgcatcgcggcacagtaatacacgtccatccgccgcgcgcgtcgaggatgaggtcgtaactatcacagtgcgtcttgaagtactgagatgctatgctaatgtagagcag

SEQ ID NO: 2039 - DNA, 1936 bp, Glycine max
  misc_feature (293)..(293): n is a, c, g, or t
  misc_feature (537)..(537): n is a, c, g, or t
  misc_feature (830)..(830): n is a, c, g, or t
  misc_feature (916)..(916): n is a, c, g, or t
  misc_feature (1004)..(1004): n is a, c, g, or t
  misc_feature (1284)..(1284): n is a, c, g, or t
  misc_feature (1291)..(1291): n is a, c, g, or t
  misc_feature (1368)..(1368): n is a, c, g, or t
  misc_feature (1644)..(1644): n is a, c, g, or t
  misc_feature (1663)..(1663): n is a, c, g, or t
  misc_feature (1675)..(1675): n is a, c, g, or t
  misc_feature (1711)..(1711): n is a, c, g, or t
  misc_feature (1726)..(1726): n is a, c, g, or t
  misc_feature (1778)..(1779): n is a, c, g, or t
  misc_feature (1795)..(1795): n is a, c, g, or t
  misc_feature (1805)..(1805): n is a, c, g, or t
  misc_feature (1823)..(1823): n is a, c, g, or t
  misc_feature (1831)..(1832): n is a, c, g, or t
  misc_feature (1834)..(1835): n is a, c, g, or t
  misc_feature (1844)..(1846): n is a, c, g, or t
  misc_feature (1850)..(1852): n is a, c, g, or t
  misc_feature (1857)..(1857): n is a, c, g, or t
  misc_feature (1859)..(1863): n is a, c, g, or t
  misc_feature (1866)..(1866): n is a, c, g, or t
  misc_feature (1869)..(1869): n is a, c, g, or t
  misc_feature (1878)..(1936): n is a, c, g, or t
  Peptide Sequence Number=SeqID_9588
  Probeset Number=SeqID_11818
gtcgtatggatatgattatatattatgaaatatctacatatatattcctattatttattttctaacatctcttaaatatacgataatcaccgctctctacgttgtcctatatctctcaccaatatatatatagcacgcacacacacagacacttcatctcacacatatacactataaaacaaagtacaggacacgacacggacaggagaaggcagatacgacagagaatctagagtggtggtgaagttggtgggacatgggaggtgcgagaaagagggaagaaggtctgacgncgatgacattcatcctctctctcgcgactctacgtttatcttcaactcgttttctcccattctcttgctctattttctatcattaagctccatcgcgaaccaatacacataccgacacactccgcccaagtcaagcaccacttcagactgaggaccaaagccgacatcacagctcaggcgccactgaggtggtagggaggtgcggtgatggatctgttgtattggcttcagtatgtgtgtctcnaacatctgtatttacttcattacacttactaacagttcgttgatggtgtccagcgtagacgcgtacttaggactagctgtagcaaaatatatagcatacatttacacccatcaaaccagacgtctcaagtagactccgcagataagacagcgcaggagcggtgagtatgcgcagtaatcacagagcttctaactgcgcgtactctgctgctacgacgtggctctcgctgcgtctgggttaatgtgtgcagtatcgtgttctatatatctacacttagcgagccaccgtacttnaatatcatcactctagaagaaagagagcaccagatagctgacgccgctccctccggcctatctctaccaaagctttcacatcaganatatatagaacgatcgcacagagcgtaggggaggatagaggagtagagagaggagatagcgcgaggtaggttaggttaatagtgctgntagcgctgcaaatgaagtggatcatcatgcaatgagtatccaatatgtatttgcaagcaatacgataacaacaacgatccgggctgtaagagtgtagcaacgcgctgctgctgtcatactgatcgtcgattatgacacgactaacgacgcaatgcacgtcagcaggcacatcggatacttcatactagcacatccaatagaatacaactatcatctgagctacccacatgcgtcatctcgtgtttctcatcgtggcacatagaaactcttataattatgnctctctncgccctcctcgtcctcatatctcgctcccactcctctctcactctctcacacgtacttacctccgcctcacactctnctcccacttccgccctcccccctctcgaccgtcccttgccttacgttccgtcctccctacgccttcgcgtgggccgtcctctctctcgctgcacctacctcgacgcacacagctatgcaccgacggcgtacgcgcagctcgtgcatcatcatgccgaatcagcacaagtactcagatcggcgcggcgcgacgtcttgcagcgacaactctcgagttctacctatcgagatgtgctgccttctcttccgctacaactctttatgctcactctctttnttcatggcgtaaaaatcgngttctcttccgnttccgcgacaaatctacacactccctaaccccctancgcgcgagccaacanctctctcctaagctatcgcaaaagaactcaccggcggcgcgcccgcgagcgnngccggcgtttcttagntcgcctgtgnatcgctttgttgtggtgntgcgggtnntnntgttgtttnnntatnnnacggnannnnnggnccngggtaaccnnnnnnnnnnnnnnnnnnnnnnnnnnnnnnnnnnnnnnnnnnnnnnnnnnnnnnnnnnn

SEQ ID NO: 2040 - DNA, 464 bp, Glycine max
  Probeset Number=SeqID_11819
agagagagagagagagagagagagagagagagagagagagagagagagagagagagagagagagagagagagagagagagagagagagagagagagagagagctcgtgccgattctagttattactacagggataccagccttctattctgtgtgcggattgcccagggtcttgtacatttgggagagggcttgttaacgcttaatccatgtcattctgatcgcttcttactgtcgcccgcagcgcttgctggattagttaccgtgttccgcgcgtgcctagacgtgagagctcttgtgttgggaaaatgtctctatgttctctacttgctcgttttggcgctgcgcgcaaggatgttgttgtctgtggatgagggctagacgcctgtatcaatgcctgtgcgtgggggacgcgccgtgagtgttgtggaccaaggtgtgggccggaaccgggccgtgctggga

SEQ ID NO: 2041 - DNA, 1682 bp, Glycine max
  misc_feature (1)..(1): n is a, c, g, or t
  misc_feature (23)..(23): n is a, c, g, or t
  misc_feature (58)..(58): n is a, c, g, or t
  misc_feature (86)..(86): n is a, c, g, or t
  misc_feature (109)..(109): n is a, c, g, or t
  misc_feature (141)..(141): n is a, c, g, or t
  misc_feature (144)..(144): n is a, c, g, or t
  misc_feature (146)..(146): n is a, c, g, or t
  misc_feature (157)..(157): n is a, c, g, or t
  misc_feature (239)..(239): n is a, c, g, or t
  misc_feature (334)..(334): n is a, c, g, or t
  misc_feature (341)..(341): n is a, c, g, or t
  misc_feature (374)..(374): n is a, c, g, or t
  misc_feature (376)..(376): n is a, c, g, or t
  misc_feature (394)..(395): n is a, c, g, or t
  misc_feature (464)..(464): n is a, c, g, or t
  misc_feature (489)..(489): n is a, c, g, or t
  misc_feature (499)..(499): n is a, c, g, or t
  misc_feature (644)..(644): n is a, c, g, or t
  misc_feature (778)..(778): n is a, c, g, or t
  misc_feature (831)..(831): n is a, c, g, or t
  misc_feature (939)..(939): n is a, c, g, or t
  misc_feature (1020)..(1020): n is a, c, g, or t
  misc_feature (1113)..(1113): n is a, c, g, or t
  misc_feature (1119)..(1119): n is a, c, g, or t
  misc_feature (1121)..(1121): n is a, c, g, or t
  misc_feature (1154)..(1154): n is a, c, g, or t
  misc_feature (1276)..(1276): n is a, c, g, or t
  misc_feature (1299)..(1299): n is a, c, g, or t
  misc_feature (1371)..(1371): n is a, c, g, or t
  misc_feature (1376)..(1376): n is a, c, g, or t
  misc_feature (1378)..(1378): n is a, c, g, or t
  misc_feature (1396)..(1396): n is a, c, g, or t
  misc_feature (1399)..(1399): n is a, c, g, or t
  misc_feature (1445)..(1445): n is a, c, g, or t
  misc_feature (1447)..(1447): n is a, c, g, or t
  misc_feature (1456)..(1456): n is a, c, g, or t
  misc_feature (1569)..(1569): n is a, c, g, or t
  misc_feature (1578)..(1579): n is a, c, g, or t
  misc_feature (1603)..(1604): n is a, c, g, or t
  misc_feature (1629)..(1629): n is a, c, g, or t
  misc_feature (1645)..(1650): n is a, c, g, or t
  misc_feature (1652)..(1654): n is a, c, g, or t
  misc_feature (1656)..(1658): n is a, c, g, or t
  misc_feature (1660)..(1663): n is a, c, g, or t
  misc_feature (1668)..(1669): n is a, c, g, or t
  Peptide Sequence Number=SeqID_9589
  Probeset Number=SeqID_11820
ncaatatgattcagattgtgtgngtcagtcgtgttgagtatgtcatggttcttgactnatcgcatcggatgaacacataagtatgnagtcactcgtgagcagtagtcanattactggagtagtggagcagtgtcgtgattnctntntatagtcgagnacatagtgtcgttcagtcgatagttacgtactcacctgatacgatcatactctcggcaacttcgtcatctcatatctcatcngtactctggagcacggtgagttatatgtactgcgtgcgactcagagtggactatatgcatagtatcgagtatcatgcacggtcgacgtcactatntgcactnaagtctagtgcacgcatgctatgtgtcgccagntntagtcggcgatgtcgcgnnacgtctttgagatttatatcatcagattgtgtagtcattaagcgctgtgacgcgtgcaacgaagactantatgactgacatcatggtgcactcngtcgtatctnatattgtgtctgagcagagcacgctcgtctcatgatacgagtcgatcgctactcgctgtcgtgttatgtgtcagacatacgcgcgcgcagcgtagcagcgcctatactatatgcgtatcacattaacaatagtatctatcatatntggtctgatcagtcttgaatcctctacatatctctagcacgaggcatgtgatcatcaccgcatgttgtcgcatagtcgtttcacgcatattgatatcttatcattcatcgtcaccactcacgtatctctccatntgctcactcatgtacgtaattagtgtcgacgactcttgcagatgatataagantgacgagactgcagtatctgtgtcgcgtgacggtcctcacgcgcctcttctctcgatcgctcacccgaccacacacaaccacacgcaccacaccgctcacgcgttatntattcactcttgcttctcattgtcattcgtggctttcactgagtcacgtgtctgtgttagagagaggaagtgtatatagtntgtgaacgtatgtgtatagatagtatctagatgagtgattgtgatagttgtatatatgtgtatcttattatatttaatatagattaagatagntaatgnancaggtacaatactaatatataaatgacaagacncagatatatacgctgcgcatcatactcactaaccatacaacctcactcgatctatcgcacaatctactcatatcacacaactcctatatattattacacgtctcccccaaccctcttgcctntctatgacacggctctgtcgtcnttcactctcagccacatgagaagaagatcggaagacacacagagtgagagagggtccgcggagggcggcggnggcanancgtgtgtcgcgcgggagngcngaactggcggagtgtagagcggcgatcggcgacacccacagacacncnctccttatntcttatgcgtcgactccgcgcgccactctcacactactgttgtaccatctttcttgatatactctatgcatatgctctatatacacctcacctcacctctcattacgtttcanatatatgtnngcattctgggtggtgtgttgtganngggtgatctatatgaaagatcaagntattatatgtgtctannnnnnannnannnannnnctccnnccccccccccccc

SEQ ID NO: 2042 - DNA, 2050 bp, Glycine max
  misc_feature (1)..(365): n is a, c, g, or t
  misc_feature (2050)..(2050): n is a, c, g, or t
  Probeset Number=SeqID_11821
nnnnnnnnnnnnnnnnnnnnnnnnnnnnnnnnnnnnnnnnnnnnnnnnnnnnnnnnnnnnnnnnnnnnnnnnnnnnnnnnnnnnnnnnnnnnnnnnnnnnnnnnnnnnnnnnnnnnnnnnnnnnnnnnnnnnnnnnnnnnnnnnnnnnnnnnnnnnnnnnnnnnnnnnnnnnnnnnnnnnnnnnnnnnnnnnnnnnnnnnnnnnnnnnnnnnnnnnnnnnnnnnnnnnnnnnnnnnnnnnnnnnnnnnnnnnnnnnnnnnnnnnnnnnnnnnnnnnnnnnnnnnnnnnnnnnnnnnnnnnnnnnnnnnnnnnnnnnnnnnnnnnnnnnnnnnnnnnnnnnnnnnnnnnnnnnnnnnnnnnnnnnnaaaatgttaattttgttagcactcccttctcccttaacaatctacccattttatatctccgttataaccacattgtgggttgaatgcagagttcaaagcgtgaatcaatagaagatttcccagtgacacctccactgagcagggaaaggccaccttgtaatctataccgtgccgggggaagaggaggaggaggcatgggaatggggtactcatcctcagattcctttgatcacacctcaatgcaatcatcccggcattactatgaccccaatggtgtgaactcaaccccaaaggcttccaccattagtgctgctgcaaagacagatatctcatcaataatggatgctgatgcttccataagaagtagttcatccagggaagctgatcgctctggggatctttcaatcagcaatgccagtgactttgacaatgaatgggttgagcaggatgagcctggggtttacatcaccatcagagctctcctgggtggtaaaaaggagctcacacgagtcaggttcagtcgagaaaagtttggggagatgcatgctagactatggtgggaagagaaccgtgccagaatacatgaacaatacttgtgagctagatgcctagatttatcaaaggggtggctgctgatgtttaacagaatgtggaggtggtgtttctcatccatttgcttaatcaaagatttgtttatataaagtctacttgtagccatgacttctgaacgagtgttaccatacatccgtttaacctagcgctcgttttacatcgtgatgcaatcaattttgctagttgttttaactctacggggtaaaagggctttatggtagtccttttaaaaattgatttgtcgaaagttacaaataatggatgtaaattatatagctgatgaaattagatccagagaatgaatctactcattttctttttgtttcatctaactcaagcacgcctcggggaggaggcacgggcatggggtactcctcctcacctgcttttgttcttctcgctccgcagtcaccccggctttgctttgtccccttcgtcgttctctctgcccccgtgccctcttccccctgctctgcccctgcctagtccggtaccccgtcttcattgcatggtggtgcttccttgcgtcgtggcgctcctagtgttgctgagcgctctggggccctggctccccgcttcccctgggaccttgacactgaatgggttgcgcgggacgagcccgcgctttacatcaccatcagagctctcccaggtggcaaaaaggagctcagacgagtcatgttcagtcgagaaaagtttggtgagatgcatgctagactgtggtgggaagagagccgtgccagaatgcatgaacaatgcttgtgagaattctcagaaggggtggctgcagatggttcgcaaaatgtggaggtggtgtttcttattaatttgcttagtttatatttttgctatataaagtctcttccatagaggatcagatgttagagctaggtgctacttgcacctctaccttgggctatatatacctctagttattctcttgaatctagggagtaaatgtagcttctgttagtcagagtagctattgttttgtcgaagcttataagtaatgggtgtgaattatatagctgttgaaattggatgcagagaatgaatcatcttcattttcttgn

SEQ ID NO: 2043 - DNA, 581 bp, Glycine max
  Peptide Sequence Number=SeqID_9590
  Probeset Number=SeqID_11822
atcattagttgactagttatgtcaatctttcaaaaattactctgagaaggttggtgcatccaatgattcattaaatactgatagcatcttggaaatggtaaattttttaagaaagttttgtcagtgtcggcactctgttattaggcagaggagttgtgaaccaatagagaacaaagtaatgtacaagagaattaagtacatgtttggattacagtttgtaaactgaatttgcaaaagtatctctcgaactgaatttgaaggttaagggggtgtttggtttggttattttctgtttttattttcactggaaatagaaaatggtgatgaaaatatgtttggttggatttttatattttcattttaagtgaaaatattttctcaaacaaatcaaaaactgaaagaataaaatctcgttttcaatattttcaattaaaatcaagaacctcattttggataaaatgaaaacgcgatcgcaaaaaatgtaattttaaataaatttaaaaatacatttccttttgaaaacgcattttcagtatttttatttcttgaaaacagaaaacaagaagtcaaactaaacatgt

SEQ ID NO: 2044 - DNA, 615 bp, Glycine max
  Probeset Number=SeqID_11823
ctcgagcctgatcggctccagacggatggcataagacgacaaaaggactcgcaaaacagtgataggaaacagactatctgatgagcactgagagcttaggaacttcatcgctaatcttgatactacaatataccgaagagctgggcatatttatcagaatctggagccgcgtgtggtgaagacattgcttcattctttgctgaaccctacaaaagcggtgcctaaacactatggggcaattaaagggatagaaacgcttggatcaagactgatcatcttgcttatacttgcaaatctcgagccatattagccacttcttgagccagatatgcagcctgataagcaagaaaactaacagaataggcatgaagctagacgagtttatgggactcagatgggtgcagcaagacaatacgtgcatgataaggtcaaaaagtttgacaatttggtctctgctagacactcatgtatattcaatgcgcagtggaaagattgtgattgatatgcgctgctaaccaaaagccatcacacgttagtctgtagcataaagaagagctacctctaatgaacaaacttgtaacagacaggcactggaaagcgcgacacaaaatgaac

SEQ ID NO: 2045 - DNA, 487 bp, Glycine max
  Peptide Sequence Number=SeqID_9591
  Probeset Number=SeqID_11824
atgacattcctatagtgacagatgtgcatgagaccatccagtgtgaagcagttggcagagttgcagatatgattcacattccagcattcttgggtcgccaaacagatcttctagttgcagcagccccatctgggaaaattattaacattaagaccggacagttatgctctccttatctgacgacaaattattatcaatacttatggatgactgggaactcttatgtgatgggctgtcatagaggaacaccctaccaatactgagaggagattggcttaccacgtgagacagactgctaaaaacattccaacaggtccactttccctaaggtagcttagtcactacaacaatctcattgataggccttagcctttgtctgtgtttgttgacacctatttcgctaactagaaccatgatttggagagactccacattgtgcaggaaaactttgatttcaagcctggagtgatctacatcaaccttgatc

SEQ ID NO: 2046 - DNA, 2118 bp, Glycine max
  misc_feature (101)..(101): n is a, c, g, or t
  misc_feature (125)..(125): n is a, c, g, or t
  misc_feature (202)..(202): n is a, c, g, or t
  misc_feature (228)..(228): n is a, c, g, or t
  misc_feature (230)..(230): n is a, c, g, or t
  misc_feature (286)..(286): n is a, c, g, or t
  misc_feature (334)..(334): n is a, c, g, or t
  misc_feature (338)..(338): n is a, c, g, or t
  misc_feature (343)..(343): n is a, c, g, or t
  misc_feature (395)..(395): n is a, c, g, or t
  misc_feature (423)..(423): n is a, c, g, or t
  misc_feature (462)..(462): n is a, c, g, or t
  misc_feature (481)..(481): n is a, c, g, or t
  misc_feature (508)..(508): n is a, c, g, or t
  misc_feature (548)..(548): n is a, c, g, or t
  misc_feature (555)..(555): n is a, c, g, or t
  misc_feature (588)..(588): n is a, c, g, or t
  misc_feature (604)..(604): n is a, c, g, or t
  misc_feature (621)..(621): n is a, c, g, or t
  misc_feature (647)..(647): n is a, c, g, or t
  misc_feature (653)..(653): n is a, c, g, or t
  misc_feature (661)..(661): n is a, c, g, or t
  misc_feature (786)..(786): n is a, c, g, or t
  misc_feature (789)..(789): n is a, c, g, or t
  misc_feature (799)..(799): n is a, c, g, or t
  misc_feature (883)..(883): n is a, c, g, or t
  misc_feature (918)..(918): n is a, c, g, or t
  misc_feature (923)..(923): n is a, c, g, or t
  misc_feature (945)..(945): n is a, c, g, or t
  misc_feature (958)..(958): n is a, c, g, or t
  misc_feature (991)..(991): n is a, c, g, or t
  misc_feature (1001)..(1001): n is a, c, g, or t
  misc_feature (1038)..(1038): n is a, c, g, or t
  misc_feature (1053)..(1053): n is a, c, g, or t
  misc_feature (1059)..(1059): n is a, c, g, or t
  misc_feature (1124)..(1124): n is a, c, g, or t
  misc_feature (1131)..(1131): n is a, c, g, or t
  misc_feature (1157)..(1157): n is a, c, g, or t
  misc_feature (1173)..(1173): n is a, c, g, or t
  misc_feature (1212)..(1212): n is a, c, g, or t
  misc_feature (1513)..(1514): n is a, c, g, or t
  misc_feature (1529)..(1529): n is a, c, g, or t
  misc_feature (1726)..(1726): n is a, c, g, or t
  misc_feature (1790)..(1790): n is a, c, g, or t
  misc_feature (1792)..(1792): n is a, c, g, or t
  misc_feature (1877)..(1877): n is a, c, g, or t
  misc_feature (1885)..(1885): n is a, c, g, or t
  misc_feature (2050)..(2050): n is a, c, g, or t
  misc_feature (2058)..(2063): n is a, c, g, or t
  misc_feature (2068)..(2068): n is a, c, g, or t
  misc_feature (2081)..(2082): n is a, c, g, or t
  misc_feature (2091)..(2118): n is a, c, g, or t
  Peptide Sequence Number=SeqID_9592
  Probeset Number=SeqID_11825
aatgatagtacgaggcgcgacacatacagtacactgaatactcgcatctatacatgccgctatagtagacccgcgagaagcaatgtgagtctcatcgtgtncacaactaatagaataacaaatgnagagagagagacacacacaactagtaatagctgctgagacgctagcagcgatgtgtcatagatagcgcgtggttacnttagtgttagatcatcataatgcatntncgcatgcgtgcgaggggtgtcaagtagtgtgcacgcgtcatatgtcgacgcggtangcatcctccctatcatacagtctatagcgacatataaacgtaaacagncatnagatnctcggtgtcttaatagctagtcggtctctttctcttctgtctcttgtgtgantcgcacactagcttagagtgacagcatnctacattctgcagaagtgatgcaaaaagagcacacaganagtatcatatgcctgatgncgcggcggaggagtgctgctgcgcacnagagccgccgacagcagagcgtgcatgagtgagcagtcgncagtgtnagtataagtcagtgccatcgatcgtcctactantctagcgattgacgancagcgtgacagagcggngacatgcgcagatagtatgatgtgangcacantcgcatantaataggtgcaatttatatatgacatgcagacgcccacactcgcgcgctacagatcatccgacgtcatgtcatgcaccagatgtcttcgctcgccgcgcacatcatctgtactccacgtactatngtngatgacgtcntaatcgtgagcgtccgcggagacccgaacatactatagtcagacatacccgagtgatacgggcgctgcagagtactgtcatcgntcgtcgtcgcgatgagacactatgcgtgagatacntatanctatacgacatctacacgcttngcaaagcaagaancactatgacagtgtcacagacgaatgcgtcacncaccaacacnacgagtacgaagagcagtatctcatcttcacacaccncctagtgacgtaacngaagtnctatatatacacagcgatatcttctgacctcgcgatcgtatagtatacgatagcgtatcgggtcntgtgcgngtggcactgaccagatcacgcgtgtnacgagcgcgcgatagngaattctcactcgagacaatacacggatcgctcacgatntacgcgatgatccgtcataacgctactcaggcgcgtcctctcacacgacacacattatgtcacagtcgcgagacaatcagcaacagatcgcgacgccacagtcatcaggactgccaaagcagatacaagacaaccagaccacgcacagagaagacacaccacgctaacaagacaccacccagacgcggacgacgagacacagctagagaccggccgctcgcgcgtctgcgagcgctgcgcgtcgcacgtgagccgccacctcggtgcgtgtttgccaggcgggggagtgtttgtcagattnncttttactaattcanttagttttcgggtgcgaatagggtagatggctaggcggcgggtgaaggtgtggtggtgagagtacacagagatgagatggtagagagggcgtggcgagcgcatatacatcccacatagcacaccacaacaccattagagagagaatgaagtcgctgattttcgggtacatacacacgtgtgcgattggcgtccagcncctcgagcgtgcacagtcatgatacgaagaagaccgacagacagacagacatgcggcgcgaagnangacacacagcgagagagacagactggcaagacagtcaccttcgatcgcgcgagatctcagtgagatagatgtactctagatgatngaaaagtngtacctcgcgtgtgtgtggtagatatacaactaaaccaagacacaccggaggaaggactcacacacacaatatttaataaagggagagccgtaacccggactctacttgctatgaaacagatccctcatcacctatcatatcacaacaactcacgctcacaaatntttatatnnnnnnctctnaaacctttttttnnttttttttnnnnnnnnnnnnnnnnnnnnnnnnnnnn

SEQ ID NO: 2047 - DNA, 1454 bp, Glycine max
  misc_feature (88)..(88): n is a, c, g, or t
  misc_feature (102)..(103): n is a, c, g, or t
  misc_feature (1328)..(1328): n is a, c, g, or t
  misc_feature (1355)..(1355): n is a, c, g, or t
  Probeset Number=SeqID_11826
tttttttggggtgggttggtgttggtgtgtgatcgtatgatcatccccctcatattggttacacacacaatacaatctttttgttttnttccccccccttannatgttctatctggtcaaatagcactaataacgacgcccacgaagagggcaccacgccacggtacacccaacgttgttcccacgacaggcgatgttgttcgcttttctttttattgtgttgtatatacatctcttattatctcttcatatacatgatgtgaagtttggtcgaccgttaccgcgcgagaagaattattgttagctatctacatacatcttcctttactcatcgtacgctttctccgccgcgaccgcctctccaatatctttcattgtgatatatcccctctcattaatctataacccgcaaacagagtatattatataaaagaaattacattaaatataaaaataccttatttctatacctcacgcataatgatagaggacggaagagaacagagacgccccgccgactataacgtaacaaacgaagataaaagcagacctgagtatacgctgtgcaggatacagttacagccacgccgtcttattatttttgcgcgtatcctcctactcctaactataaacactataaactacatattatacattacactctgttatcattctcattatagtatattcatacctcaccccgtggatatacgaatctcacaaatcatataaatgtcacggccattacacacccgtaaaaacgtacggcgcatatatctacgaggcaacataatactgtatgatatgaaggagtactagctcggcgctgtatgaatatgtaaatatcatcaattcgcactcgtgtcggggcgagtgttattcgttataggacacgctatgtcacgtacagatgtatattagtagattatgagagacagcaaaccagtgccactagcaagtctcggactgatagggcggacgacgtttcaacgaccacgactgatcgttatcatagaaattgcatcatcgatcacactattcacaactcagagacaagatgggctctcgatagctaaacactataaataatacgagcgatacatacagagagaagagaagaaccacgatgtatatacatgaatatatggacaagacgctacatacagatagtgacagataacgatagaagactatcgatcgcacagcatgtatatatgacgactatacacactccatacgcagatttgtatctactacatcgatgtgcactcgtgttggtgcgacacgacatagaatgtctgatgacgtacatcaagcgtcaaagtggngcgatgaataagtgtgatatgcgccanacacatcgttagacacctcgtgatgtgacatgtaatgtgatactgacatgcctctatacgatgatatatactatttatagcacctgacactacgagtct

SEQ ID NO: 2048 - DNA, 606 bp, Glycine max
  misc_feature (606)..(606): n is a, c, g, or t
  Peptide Sequence Number=SeqID_9593
  Probeset Number=SeqID_11827
cccctcggagtgaacaaattccgcggcatacaatccagccgcaagggcatctgggtattgcaggaagtgaattgcccttctgtattgatagaagcagggttcatgtccaacccatctgatatgtccaatctgaagagcactgcttaccagcagaaaatggccggcgctatattgaccggtatccagcaatatttatcggctcatgaaaatcaaaccaccttcattccggtagatactaccatagaagtgaaagtaaaagatacggctgctcatcctttgtttgtagttgacggagaaaaaatgggtcggaagggtttgaaagaattaaaactggatccaaatgatattgacaatattagtgttttaaaagatgaggccgcctttaaaaagtatggcgaggaaggcaaaaacggagttgtagagatcaccactaaaaagcaagtagctgactctacaacgacaaagcagcatagtaaagctgatctgatgatgaaaaaattgaatgagctgaaaaaagataatgagaaatcttatttcgagattgatggtaaatccgtcatcactaccaaaagcgggcagacggtttggatagaagttgtcacagan

SEQ ID NO: 2049 - DNA, 501 bp, Glycine max
  Peptide Sequence Number=SeqID_9594
  Probeset Number=SeqID_11828
ggcaacaaattcttctaatgcatcaacatagcaacctcccatgacgtctcccttgcctatttccaagaatctttcattccaatatgataatcctcgcctactgtatgagctgcatctattggctctcacctagtctgactaattgatgtaacctgaaacagatgacgccattgcgcctgacaacatactctcactggcatctaaagacaaccttaacatatgcattggccatcccagatttgacctaattccccatgatgtcacagaccccttgttgattgacggtgacctcatctatcatcttgcctgccctgcttctccaatcttctacaaatacaaccctgtccacacaatacatacagatgtgattgcaacactgcacatgcttgcgcttgctaatcctgcgtgagcaatgatctttcttacatctacttcacaaccatatggtgaccctcatgtgcatccactaccagaaagctattgcagtcatgtacaccccat

SEQ ID NO: 2050 - DNA, 2329 bp, Glycine max
  misc_feature (29)..(29): n is a, c, g, or t
  misc_feature (248)..(248): n is a, c, g, or t
  misc_feature (478)..(478): n is a, c, g, or t
  misc_feature (498)..(498): n is a, c, g, or t
  misc_feature (502)..(502): n is a, c, g, or t
  misc_feature (523)..(523): n is a, c, g, or t
  misc_feature (532)..(532): n is a, c, g, or t
  misc_feature (552)..(552): n is a, c, g, or t
  misc_feature (558)..(558): n is a, c, g, or t
  misc_feature (567)..(567): n is a, c, g, or t
  misc_feature (628)..(628): n is a, c, g, or t
  misc_feature (630)..(630): n is a, c, g, or t
  misc_feature (694)..(694): n is a, c, g, or t
  misc_feature (732)..(732): n is a, c, g, or t
  misc_feature (748)..(748): n is a, c, g, or t
  misc_feature (758)..(758): n is a, c, g, or t
  misc_feature (771)..(771): n is a, c, g, or t
  misc_feature (815)..(815): n is a, c, g, or t
  misc_feature (837)..(837): n is a, c, g, or t
  misc_feature (887)..(887): n is a, c, g, or t
  misc_feature (973)..(973): n is a, c, g, or t
  misc_feature (1005)..(1005): n is a, c, g, or t
  misc_feature (1041)..(1041): n is a, c, g, or t
  misc_feature (1051)..(1051): n is a, c, g, or t
  misc_feature (1249)..(1249): n is a, c, g, or t
  misc_feature (1298)..(1298): n is a, c, g, or t
  misc_feature (1319)..(1319): n is a, c, g, or t
  misc_feature (1340)..(1340): n is a, c, g, or t
  misc_feature (1515)..(1515): n is a, c, g, or t
  misc_feature (1556)..(1556): n is a, c, g, or t
  misc_feature (1612)..(1612): n is a, c, g, or t
  misc_feature (1664)..(1664): n is a, c, g, or t
  misc_feature (1687)..(1687): n is a, c, g, or t
  misc_feature (1780)..(1780): n is a, c, g, or t
  misc_feature (1893)..(1893): n is a, c, g, or t
  misc_feature (1903)..(1903): n is a, c, g, or t
  misc_feature (1929)..(1929): n is a, c, g, or t
  misc_feature (2011)..(2011): n is a, c, g, or t
  misc_feature (2043)..(2043): n is a, c, g, or t
  misc_feature (2045)..(2045): n is a, c, g, or t
  misc_feature (2068)..(2068): n is a, c, g, or t
  misc_feature (2081)..(2081): n is a, c, g, or t
  misc_feature (2083)..(2083): n is a, c, g, or t
  misc_feature (2095)..(2095): n is a, c, g, or t
  misc_feature (2202)..(2202): n is a, c, g, or t
  misc_feature (2219)..(2219): n is a, c, g, or t
  misc_feature (2276)..(2276): n is a, c, g, or t
  misc_feature (2287)..(2287): n is a, c, g, or t
  misc_feature (2318)..(2318): n is a, c, g, or t
  Peptide Sequence Number=SeqID_9595
  Probeset Number=SeqID_11829
tctgtagtacgagtacatcctgactgctncgctctattaatcatgattatactctattatatatggacgaatgaagtgatatattgtggagtacgagagtgatgataatcttcgtgctcggacggagacgcacatagtaaacgccacacaagagagagagtagagagatagatgagtagtcgtgtaacgcagagagggatacactgatatgcagactgataatccgccgcgcgtagcttcactcgatnacatagcaccagagcaactacatctcgacgcgacggcatagtcacgtatatgatatgtctaagctctatacacacagctagtcaggtcggagttcgacgcaacgactccgatctattgtatagccatttgtcgtgtcccgtccgtcgatcgatagagatcgacgctcaaatcagtatactaatctctcctaacatgtgctgagatgcgatagcacgcgagctcagcagangatgctcgcgtcatgtgggntgangtaattctgagcctccgcgcnagcacaagntaggatcgtgacacgacgantgtcgnctgatgtanagtatactatcgtactcgtcgcggcatgcgcgctcgactacgagcgagtgtacatattaancncagcacgacgtagcacagagagaagacactacctcctacatagctactgatatatctcgtatgnacataccgcgtactacgcacgatacgcatataaatcanctatcatgcttcacangtatcatatntattagtgatatnatatatgatcgacactccgacgcgcccgcgtgcaacttagaganatgtactcgcgcgcgtgatctngtattatctatatcccattctgacaatatatatcctgtctcaccgctcgngcacgctcacgtatatactagacgcgacgcgtaggatgagcgtatcagtgtatgatgatgatacggcgagcacacatgagactcanccatactatatctaggtatgttatatacaganaatattacagcacatacagacagtatcacaccgcgnagagtcactnactatagacgtatgatgtagatatatatgtctaactcgcgctactgcgcagcccgcgcactcgtctgtagattgtactatattactgagatacgcgtcgccggtctgaccctcggagagtatgcacttctcatacctatgctaacttacgcagatgtagtatgtagatgcgcaagccatcacgctgtaactagataanacgtacatactagagcggtgctgacacagacgcgcacgcgtgcgtctgntcatgcaacttatatgtagcnactactcatacgacgaccgcncctcgcgagatatctatgtgtagacgcgcgtgcacgacgctcgacgcgctgaatgacgtattcatacatgcacctcgcatgagcatatgtaattaatatacacagaaaacatgagaccgcgtcatctcgtccgaagtgaatcagcactcgtgtcagctgtacgacgtgtacgaanaccatgcacgcaatacacacgacacacactctagatatctnattcctgaccgacgccgtctagtacgatcaaagcagtagcagacacgatgtatctntagcgacagaggtgacacggatacaaagctatacatagcactggacaagtanacacgggatgctacgcggtcganatctatatcgcgctcgacctacgatatgagagacatagtatatatacgtaaatgtaagccacgctcgtactgcagggcagtacgctgactacncatccacactatctgtctactactctacgatgatactgatttgctacacaactacatccgaattatatgtagagatcgttcgtactccacgacgtagctgcgcatctgattanctacgacgangcatatatgatcgtactcgagcgatngtacgcgcctgagctgatatagactgcacgcgtctcttatcgacatgcgcgtgcgcgacatcgcttatgtagaattacaganactctcctctatagctgactacagctaggcancntcgcgtcgatatgagagatgacntacagtcgactantnactagccgagtnatagcgcatgacagtactcatgataatagtgactataccgacccacgcatcatggatgcgcattgatagtcagtctacgctgaccctgacgacgcgactcgacgcgngctcacagccctgtatncgtcgcaatctgcagcagtgagtgagtactgatgaacgagactagcgatgtgctgantcgcgtcgtgnacccatacgtccatgtttgacatcacgactntatcagtgtcg

SEQ ID NO: 2051 - DNA, 220 bp, Glycine max
  Probeset Number=SeqID_11830
gatgcagcagaagaatttgaagccatatgattcaactctagcgtcactttcaatcacttgcagcaaagcactacaactagatttagctgaggcttttctgaatcaaatttctgaatgtctatatccaaatccttataatgctttgctagcatcatgcgatcaactggaagggtcagagaaaacccctaaaatatgtgaatgagtcagtccaatgcatgta

SEQ ID NO: 2052 - DNA, 1313 bp, Glycine max
  Peptide Sequence Number=SeqID_9596
  Probeset Number=SeqID_11831
acaaaaaaaacaattaaaacaaacaacaaacaatggtacaattaaaccaacaaacaactgtcactactcgcactactgagatcccaaaggctactattcctggtgccaatgtgatcaagaaggatgctatcgtcactaatgtcatggaaaaaccagtcattgagaatgtgattgaaaagaagaatgttgaagttcatcacaaggatgtcgtacaagaaatccatgaacaaaagattattgaaatcgaaaagaagccaatgcttcaaactgttcaacaaggcactgttatccaacaagagaaagctgcaactcaattccaagaaattggatctggtgctctcagtgaacaagagagattgagacttgaaagattgagatcaacccaagcaccaaagattactcaacaacaaggtgctgttcgtcaagttcaagaaggtgaacaagttgctcaagttgtaagacaagaattcattgagcatcatgtccaaccagttatcactgaagtacgtgaacaaaacgtcgttcaagaagtcgttcaccctgttgtaagaaaggtacacgaaggcactatcattcgwgaagttwcaagcaccactgcaccactgcaacaaaactggracgctaatmaaaccactatgattsaaarggaagcwccattacaacaaactggattaaaacaaaacattattcaacamggygcttcattgcaacaaactggtttccaacaaagtggcctccaaastggattgcaacaaccaatcttgcaacaaaacatgccattacaaactggattgcaacaaactagcttgcaacaaggtatgccattacaacaaactggtctccaacaaggtgctccattgcaacaaacgttacaccaaaaaggtgctcaattaaagcaaaacttacaacaaggtttacaaggtggtattcaacaaggaaacttccaacaaggttacttccaaaaagaatcattgaagcaaaccggtattcaaggtgctccattacaaactggtttccaacaaggtgctccattgcaacaaggtatgccattacaacaaactggtttccaacaaggtggtctccaacaaactcttcaaaatggattacaacaaattggtcttcaacaaggtgctccattgcaacaaactggtttccaatcaggattacaacaaggtgccccattgcaaggtggtattcaacaaaacttgcaaagaggattgcaatcaggtgtcattccacctccaacacaaagtggattacaacaaggtaatttggcaagaaaattgtaaataaaatatttttaccttatactc

SEQ ID NO: 2053 - DNA, 1998 bp, Glycine max
  misc_feature (1)..(2): n is a, c, g, or t
  misc_feature (19)..(19): n is a, c, g, or t
  misc_feature (37)..(38): n is a, c, g, or t
  misc_feature (48)..(48): n is a, c, g, or t
  misc_feature (55)..(55): n is a, c, g, or t
  misc_feature (57)..(57): n is a, c, g, or t
  misc_feature (59)..(59): n is a, c, g, or t
  misc_feature (61)..(61): n is a, c, g, or t
  misc_feature (64)..(64): n is a, c, g, or t
  misc_feature (77)..(77): n is a, c, g, or t
  misc_feature (85)..(85): n is a, c, g, or t
  misc_feature (87)..(87): n is a, c, g, or t
  misc_feature (105)..(105): n is a, c, g, or t
  misc_feature (180)..(180): n is a, c, g, or t
  misc_feature (198)..(198): n is a, c, g, or t
  misc_feature (288)..(288): n is a, c, g, or t
  misc_feature (367)..(367): n is a, c, g, or t
  misc_feature (375)..(375): n is a, c, g, or t
  misc_feature (391)..(391): n is a, c, g, or t
  misc_feature (395)..(395): n is a, c, g, or t
  misc_feature (449)..(449): n is a, c, g, or t
  misc_feature (459)..(459): n is a, c, g, or t
  misc_feature (520)..(520): n is a, c, g, or t
  misc_feature (523)..(523): n is a, c, g, or t
  misc_feature (577)..(577): n is a, c, g, or t
  misc_feature (636)..(636): n is a, c, g, or t
  misc_feature (702)..(702): n is a, c, g, or t
  misc_feature (817)..(817): n is a, c, g, or t
  misc_feature (963)..(963): n is a, c, g, or t
  misc_feature (988)..(988): n is a, c, g, or t
  misc_feature (1018)..(1018): n is a, c, g, or t
  misc_feature (1021)..(1021): n is a, c, g, or t
  misc_feature (1083)..(1083): n is a, c, g, or t
  misc_feature (1149)..(1149): n is a, c, g, or t
  misc_feature (1173)..(1173): n is a, c, g, or t
  misc_feature (1189)..(1189): n is a, c, g, or t
  misc_feature (1199)..(1199): n is a, c, g, or t
  misc_feature (1216)..(1216): n is a, c, g, or t
  misc_feature (1284)..(1284): n is a, c, g, or t
  misc_feature (1311)..(1311): n is a, c, g, or t
  misc_feature (1362)..(1362): n is a, c, g, or t
  misc_feature (1383)..(1383): n is a, c, g, or t
  misc_feature (1391)..(1391): n is a, c, g, or t
  misc_feature (1396)..(1396): n is a, c, g, or t
  misc_feature (1448)..(1448): n is a, c, g, or t
  misc_feature (1452)..(1452): n is a, c, g, or t
  misc_feature (1509)..(1509): n is a, c, g, or t
  misc_feature (1539)..(1539): n is a, c, g, or t
  misc_feature (1542)..(1542): n is a, c, g, or t
  misc_feature (1546)..(1546): n is a, c, g, or t
  misc_feature (1564)..(1564): n is a, c, g, or t
  misc_feature (1567)..(1567): n is a, c, g, or t
  misc_feature (1569)..(1569): n is a, c, g, or t
  misc_feature (1583)..(1583): n is a, c, g, or t
  misc_feature (1646)..(1646): n is a, c, g, or t
  misc_feature (1659)..(1659): n is a, c, g, or t
  misc_feature (1662)..(1662): n is a, c, g, or t
  misc_feature (1666)..(1666): n is a, c, g, or t
  misc_feature (1671)..(1671): n is a, c, g, or t
  misc_feature (1673)..(1673): n is a, c, g, or t
  misc_feature (1683)..(1683): n is a, c, g, or t
  misc_feature (1702)..(1702): n is a, c, g, or t
  misc_feature (1704)..(1704): n is a, c, g, or t
  misc_feature (1747)..(1747): n is a, c, g, or t
  misc_feature (1750)..(1750): n is a, c, g, or t
  misc_feature (1755)..(1755): n is a, c, g, or t
  misc_feature (1785)..(1785): n is a, c, g, or t
  misc_feature (1787)..(1787): n is a, c, g, or t
  misc_feature (1808)..(1808): n is a, c, g, or t
  misc_feature (1840)..(1840): n is a, c, g, or t
  misc_feature (1852)..(1852): n is a, c, g, or t
  misc_feature (1872)..(1872): n is a, c, g, or t
  misc_feature (1915)..(1915): n is a, c, g, or t
  misc_feature (1922)..(1922): n is a, c, g, or t
  misc_feature (1929)..(1929): n is a, c, g, or t
  misc_feature (1957)..(1957): n is a, c, g, or t
  misc_feature (1998)..(1998): n is a, c, g, or t
  Peptide Sequence Number=SeqID_9597
  Probeset Number=SeqID_11832
nntttttgtttgtgtttgngtggtttgtggtgttgtnnttttcttttnttccccntnanancgnacccaacgcgtcntggtgaangnccggagacagggaggagngcgtgtcagaggttgtgtgctgctgtcgcgggtagtgtgccaccccccacccgcgcgctggcgcacgccgcgccngcgaataacataccccanccacgattatacctctccgccgcgagcaccctgcaggagggaggtgagtgtctcttgtagcacactctcctcctcttctcctctcgattntgtgcgcccatagttctcttcagtgtgtgtttctcgttgtgtggtgtatggtgtgttagtgtgtaatcgtgggatgctntcgatgtnatagagcatcaaggangcgngtgatgatagagagatagtaggaatgtcacactcccacgcattatcacacaganacactctctntcactatctcattctctacgcctaccgggctggagtaggagacggtgtgtgacgtagcagnccntcgccctccacccctaacacgcctctgccttctcttctctgcgcacactactantagatcgttgtatatatcgtcgctcgtgcctctctcgctcgccgcgagcgtagtgtctngtgtacagacaggtatgtatgatagagaggacaacacatatcatcgtatatctacatcctctctcnctatacgcgcatcagcgcggaggcgtacgtcgcgacctcgccatcgtgatacgctcgcgcgctcttcaatgatctcgccctcttcttgtacgcgagaccgcgcgctctgtcagcnctgtatgtcgcttgaatatgatcgagcgtgcggcgcgctcccactcggttaatgcactcgctcgccgggccgcgctcgcctctcgatatgctgttgtgtcgtgtcatgtcgtgccgcgtacgtatgaatcgatcgacggatcgggngatgcgtgattgatacgtcctcgcnttatatgtatataatccaccgcgttccttntanatatgatgatgtgttggtatgtctcgcgcaacatgacttgacgatacacgacacggccgccnctgcacgcacgcgacgcagtcgctgacatatagtgtcgctcctctgcgcacgactacgtcgtctcntacaccaatatatagctgttctanacgcgcgcaacatcanagcgagtcgnatatacttcatcgacanactgtcgttcgtgtggtgagatagtgttatgatcaacatcacatctacgccgtgctgccgtccatccncgcacatcgtacttacccagcacgcgncaggagcagtcatgccgtattggactatcgatgctcgtcgagcaggcgctncgcgcgcacacttgctatgtngatgtagntcgcntataccatgcccctaccactctccgtcagtgacaccacctctcactatatcncccntgcgcgcgactcgctcagcctacgctctcggcgcatgagccgttgagttccacgttngtatttaccgcgctcctctcatttgtgcantcncgcntcgtccgactcacattancantnctatcactcgtacncgcgctgtcgactactgctgcagcgcatgacgtgacttccacgactatctgacgtcccctccnctagccggactgngcngtgngtgananatctctggantagtagcgtgtgcgcgggncngtgcatattactccttaccatgagcagccgtggcgacagtgancgntgcantaccggcgacgagcagtatcgacgctcgcnancgcgtgacctcagcattcctnagcgacacgtcgtgcttgctccggacacggcncgtctcgtacgngtacgctacgcgctacgcgncgtactgttcgtgtgatcagcggaactcctgcgtcctatcatncgatctncgtatancgtctcctcatactgtatccgtgccctnagcatcgtcgcgtgcagcgcagatagtactgcgtcgcgcgn

SEQ ID NO: 2054 - DNA, 1353 bp, Glycine max
  misc_feature (1)..(38): n is a, c, g, or t
  misc_feature (47)..(48): n is a, c, g, or t
  misc_feature (66)..(67): n is a, c, g, or t
  misc_feature (70)..(70): n is a, c, g, or t
  misc_feature (123)..(123): n is a, c, g, or t
  misc_feature (275)..(275): n is a, c, g, or t
  misc_feature (291)..(291): n is a, c, g, or t
  misc_feature (353)..(353): n is a, c, g, or t
  misc_feature (1155)..(1155): n is a, c, g, or t
  Probeset Number=SeqID_11833
nnnnnnnnnnnnnnnnnnnnnnnnnnnnnnnnnnnnnntttgggttnntttactaatttagtggcnnatnttcgcctaaatctttggtaggtccctccacgcggcgggcgtggccggcatctncttattgtaggtacgggtcgcctcccgccggcctgtcagtgcacctgtcggtatccgtatgcgtcatgcatcccttcccatcccacaagacgaaatagtaaaagaagtggaaagtagcaagacgaggaatacaacaacacaaaatcaacacntgcacacaacaacaancacaaaacacccaaaaaccatacttttaaaacctccataattttctactcaacactcttcancatacaccatcatatccccacaacctctactattattctaatatattatcataataaatagactactctgaataatatattacctcgtatcaatactatgctctgattacaatatctaacttcttacattattattaaatttattatgatatgagatatactcatttcataatacttacatatttttattctctaaatatatctaaaactgtaaacgatcttctagtatgacacatatacaacctatatactaatcacactcatctcatgttacaaggctcagccgccatccaccgtgtgtatggcgtagggtggagatgtattaatattttgatatactttctatactttccacctccactgtgtaatatcacattgtacaagcatctcacagaactgataatgaacatcattccataagctcaccataatcttgcgtttctgcggctctcttgcacttcactccctaccatcctataccagacacctaccaaacgacatctctatagaatacatactaatgtgcagtgtgttgatgtgttggtcgggcgaaccgcaagctgatgcatagcagcgattgatataggtcctcacatctacataatacattctagcccatattcgcaatcaaatcccgctctatcacatgagacccgcgagacatcagtcacagcacttaccgatctcattgttgcgagcgcggatatccgctagatgtggtctaagaggcgggctacgaatactaaccgccgccattacaactacaaatcataaactaacgaggtacaaccgacatgcctgntacgccgccctcaccgcacacattgtcctactatatgttgcacttacgttctactcaactaacttattgtgatcttagatcttctctattgtcatagtcttcttgttctctctgacgcagtgctcgtgggtgcggtaagcgtactccacgcctatatacacaaagacctacggccgggccgccggacaatcccgcgag

SEQ ID NO: 2055 - DNA, 277 bp, Glycine max
  Peptide Sequence Number=SeqID_9598
  Probeset Number=SeqID_11834
gtacgtggcggcttggctcaccggatgctgttcggtgcctctatacaacctcatggacgatgctgccactgctgagatcaccacggtgcacaatttgcagtggctcaaatctggactggagatcaatggggatggtcttggagtgaaagtgagcaaagaactttttggtagggttgctgaagaagagatggctacgattggaccggaattggcgacacaaaacttcgtgacaggaatgtaccaggaggcttgcaatatcttcactcacgcatgcact

SEQ ID NO: 2056 - DNA, 1755 bp, Glycine max
  misc_feature (35)..(36): n is a, c, g, or t
  misc_feature (39)..(42): n is a, c, g, or t
  misc_feature (51)..(52): n is a, c, g, or t
  misc_feature (58)..(58): n is a, c, g, or t
  misc_feature (63)..(64): n is a, c, g, or t
  misc_feature (67)..(69): n is a, c, g, or t
  misc_feature (120)..(120): n is a, c, g, or t
  misc_feature (146)..(146): n is a, c, g, or t
  misc_feature (164)..(164): n is a, c, g, or t
  misc_feature (212)..(212): n is a, c, g, or t
  misc_feature (265)..(265): n is a, c, g, or t
  misc_feature (269)..(269): n is a, c, g, or t
  misc_feature (271)..(271): n is a, c, g, or t
  misc_feature (275)..(275): n is a, c, g, or t
  misc_feature (332)..(332): n is a, c, g, or t
  misc_feature (345)..(346): n is a, c, g, or t
  misc_feature (380)..(380): n is a, c, g, or t
  misc_feature (385)..(385): n is a, c, g, or t
  misc_feature (426)..(426): n is a, c, g, or t
  misc_feature (438)..(438): n is a, c, g, or t
  misc_feature (561)..(561): n is a, c, g, or t
  misc_feature (587)..(587): n is a, c, g, or t
  misc_feature (601)..(601): n is a, c, g, or t
  misc_feature (603)..(603): n is a, c, g, or t
  misc_feature (606)..(606): n is a, c, g, or t
  misc_feature (616)..(616): n is a, c, g, or t
  misc_feature (618)..(618): n is a, c, g, or t
  misc_feature (712)..(712): n is a, c, g, or t
  misc_feature (825)..(825): n is a, c, g, or t
  misc_feature (839)..(839): n is a, c, g, or t
  misc_feature (883)..(883): n is a, c, g, or t
  misc_feature (886)..(886): n is a, c, g, or t
  misc_feature (967)..(967): n is a, c, g, or t
  misc_feature (1001)..(1001): n is a, c, g, or t
  misc_feature (1057)..(1057): n is a, c, g, or t
  misc_feature (1074)..(1074): n is a, c, g, or t
  misc_feature (1077)..(1077): n is a, c, g, or t
  misc_feature (1253)..(1253): n is a, c, g, or t
  misc_feature (1285)..(1285): n is a, c, g, or t
  misc_feature (1310)..(1310): n is a, c, g, or t
  misc_feature (1478)..(1479): n is a, c, g, or t
  misc_feature (1553)..(1553): n is a, c, g, or t
  misc_feature (1730)..(1730): n is a, c, g, or t
  misc_feature (1734)..(1734): n is a, c, g, or t
  misc_feature (1755)..(1755): n is a, c, g, or t
  Peptide Sequence Number=SeqID_9599
  Probeset Number=SeqID_11835
ttgtcctcctctcgcgtgtggccgcgccgccgccnnccnnnncctacctanncgcccngcgtnngannngcgcttgtgcttcctggttttccccgtatctatccgccgcaggtaataagntgtttgtctgcttcttcctccctgtngtggtgttgagctgacgncacgcccatcctcatacataatccttgttgtgtccatcgccctctccncgcgcgccggcgagcaggaggaggatgctctcgtcgctctcctttgtgtcctntctntntctntcatcgagtattgccctgtatagtgtactgcaccaccacataccccatccccgccangctgctcacgctnntatgcacgccgctcctgcactcatgcactccccncatcnctcggcaagagcacctatcgtctttatgtgagtcttgcgtngtaggagcgagntcacaatgacatacagacgagacggttccgcgtcgccggagccgaggataagtgatagatatgtctgtagaccgttctcatcctctcttctgacacatcagacgctctactccgcactccgcnacctctaacatatattattgccgcanaccaccataatagnanaantctatgaganancaatgtcgtctagctccacctctctatgcttattccgatcgtggttgcgtgtgccgtcagcgtgtgtgtttatatatgatgtttactacacatnactactcaccaacaccaccggctcgaagcaacattcataacgactcacctccacaagcaatgccgcacacgagcgatatgctcataccttctccatacagtgcaactacgtcntctcttgtgtgttnatagtatatagacgtatataactcatagataaatatatataaanganacaacataatactatatacttctactctcataccataatatgtagtgtgtacgtcgcgcctcgcgtcccgtgactcacacnccggtcaaccacgactcaccaccatacactccancaggcgtgcttgtggtggtgaccgtgctgagcgccgcggacgcccatctcgcgccngctatatgtatcaggtnatncgtactgcagactcccttcgccccaccaacacccctctctcgtatctatgtgtctgctcgttctcgcattgtcgtctatacctacacactatactgtctcactgtcctcacccactatctcactctctactcgccgcgcacgctcgcgcctgtgtgatgcttctcatacttcgttncttcttctctgttctctgttgctgagttctgntaatttagttgcgttagtcgatatntgcatccctctactcgcgcctgcatcgcgcagtctgatcaccgatgagatcgcttcacattgtgaactatgtctcgtttactctggtgatggagagtatatgtgtcatcttatcacactcgcatctcactgattctcgtcgcgcgctctgcactgtcgccgcgtgcgnngtcgcccgcgcgtggcgcactactttgccgtcgcgtactgctctacttctactcatccgacgcgcacacaccancgcccactcgtcggctgtcttaccgtctgtatgcactcactgctagctctctcccctgtcttgtactcttgcgctacctctatctgtctctcaatccaccgccctctcttcctctcatctctctcgtgtctctcacatattgtaatacttctcatttctcatatgttcttctgcacntcgnctctctgctcactactactan

SEQ ID NO: 2057 - DNA, 577 bp, Glycine max
  misc_feature (7)..(7): n is a, c, g, or t
  Probeset Number=SeqID_11836
gtaccgntccgcattcccggtcgacccagcgtccgggttggttcatttgatctgcgacgggggagaggggggagaattgtgatggggggaggacagggtcccggcacaacctacaaaggggttaccattcatcagccaaagcgctggcaccctatcaccggcaaggggttgtgcgcgggcatgtgggtttgggtattctacagggcaaagcgagaggggcctgttgtattgggctggagacatccttgccaggggccccatgatgatcatggcaagggccattagcattccttaggcgtgagctccaagaccaggaagaccagaatttgaagtgtctgttgctgtggatgtgttgttcaaatgtgtcctttgatcaattcaataaatttggctgtgaaataagccccccccttttgcgtgagttcatgagcattagatatgtctgtgccccttccctgctaactgggatgaaagtcatgctatgtgttggttggattattacccatttcgtcgcttttctccgaaatttatgggagtggactcaaaaaaaaaaaaaaaaaaaaaaaaaacccccaag

SEQ ID NO: 2058 - DNA, 1133 bp, Glycine max
  misc_feature (1)..(68): n is a, c, g, or t
  misc_feature (872)..(1133): n is a, c, g, or t
  Peptide Sequence Number=SeqID_9600
  Probeset Number=SeqID_11837
nnnnnnnnnnnnnnnnnnnnnnnnnnnnnnnnnnnnnnnnnnnnnnnnnnnnnnnnnnnnnnnnnnnntcatttttttttgttcatggcaaggtgaatggacctgtgttggttgaagacacttgcctctgtttcaatgccttgaagggtcttccagggccttacatgtctcaacaatttgctgatggcatatgatgataaatcagcgtatgccttatgtgtattttcctttgctgctggtccagacagtgaacctatcacattttctggaaaaactccgggaaagattgttcctccaagagggcctaatgattttggatgggatcctatttttgaacctgatggctcgggccaaacgtatgctcagatgcccaaagaagaaaagaaccaaatttcccaccgctccaaatctcttgcattggtgaaatctcattttgctgaagctagatttacttttgacgtcaagaacttctgaaagctgaacgtggtaggttataggctacaagctctttattaaaagtcccttgaaattaaacggaaattgtttctaccagtaacaatgtggaaattactttgaacttaaatactgcttttgtttacaacttctccagcaaaagaaccaaaacccaacttagaaaaatataccaaagaaaaactaatcttaaagatgttttggtttgaacaaaaattgctacgagactaaaaaatagagcttatatcgatatacattgttggtgtaaaaaaaaaaaaacaaaaaaaaaaaaaaaaaaaaaaaaaaaaacaaaagctccaaatctcttgcattggtaaaatctcattttgctgaagctggatatacttttgacatcaagaacgtctgaaagctgaatgtgnnnnnnnnnnnnnnnnnnnnnnnnnnnnnnnnnnnnnnnnnnnnnnnnnnnnnnnnnnnnnnnnnnnnnnnnnnnnnnnnnnnnnnnnnnnnnnnnnnnnnnnnnnnnnnnnnnnnnnnnnnnnnnnnnnnnnnnnnnnnnnnnnnnnnnnnnnnnnnnnnnnnnnnnnnnnnnnnnnnnnnnnnnnnnnnnnnnnnnnnnnnnnnnnnnnnnnnnnnnnnnnnnnnnnnnnnnnnnnnnnnnnnnnnnnnnnnnnnnnnnn

SEQ ID NO: 2059 - DNA, 1773 bp, Glycine max
  misc_feature (1)..(1): n is a, c, g, or t
  misc_feature (23)..(23): n is a, c, g, or t
  misc_feature (43)..(43): n is a, c, g, or t
  misc_feature (62)..(62): n is a, c, g, or t
  misc_feature (119)..(119): n is a, c, g, or t
  misc_feature (134)..(134): n is a, c, g, or t
  misc_feature (157)..(157): n is a, c, g, or t
  misc_feature (201)..(201): n is a, c, g, or t
  misc_feature (267)..(267): n is a, c, g, or t
  misc_feature (288)..(288): n is a, c, g, or t
  misc_feature (360)..(360): n is a, c, g, or t
  misc_feature (478)..(478): n is a, c, g, or t
  misc_feature (567)..(567): n is a, c, g, or t
  misc_feature (579)..(579): n is a, c, g, or t
  misc_feature (581)..(581): n is a, c, g, or t
  misc_feature (755)..(755): n is a, c, g, or t
  misc_feature (766)..(766): n is a, c, g, or t
  misc_feature (776)..(777): n is a, c, g, or t
  misc_feature (857)..(857): n is a, c, g, or t
  misc_feature (870)..(870): n is a, c, g, or t
  misc_feature (1014)..(1014): n is a, c, g, or t
  misc_feature (1124)..(1124): n is a, c, g, or t
  misc_feature (1278)..(1278): n is a, c, g, or t
  misc_feature (1282)..(1283): n is a, c, g, or t
  misc_feature (1285)..(1285): n is a, c, g, or t
  misc_feature (1333)..(1333): n is a, c, g, or t
  misc_feature (1373)..(1373): n is a, c, g, or t
  misc_feature (1377)..(1379): n is a, c, g, or t
  misc_feature (1421)..(1421): n is a, c, g, or t
  misc_feature (1512)..(1512): n is a, c, g, or t
  misc_feature (1606)..(1606): n is a, c, g, or t
  misc_feature (1610)..(1610): n is a, c, g, or t
  misc_feature (1658)..(1658): n is a, c, g, or t
  misc_feature (1668)..(1670): n is a, c, g, or t
  misc_feature (1736)..(1736): n is a, c, g, or t
  misc_feature (1742)..(1742): n is a, c, g, or t
  misc_feature (1746)..(1746): n is a, c, g, or t
  misc_feature (1748)..(1748): n is a, c, g, or t
  misc_feature (1751)..(1751): n is a, c, g, or t
  misc_feature (1754)..(1758): n is a, c, g, or t
  misc_feature (1765)..(1766): n is a, c, g, or t
  misc_feature (1771)..(1773): n is a, c, g, or t
  Peptide Sequence Number=SeqID_9601
  Probeset Number=SeqID_11838
ntgaatgtcacattggcatgtcngggccgagcggtcatgagtngtatcagatgactctgagncaccgtgtggtatcggtggcgcgtctctcatctcagctactgtgaatgcctgggctngagtgggtccatctncaccgatgtcgctatgacagcgntgactagcgtgcaaaatgagcagcgagagcatagcagacatcangacacatcgctgcatatggtaatactgatctacatgcgcactatgctaatgtagctgtatgtcagnaaggtgcatagacttgatgtngtatgtgttcagtgtggtactctttcagttgttatctgtcttacatgagtatgacactgagacataggtacnatatcactcaacgcacacgtcacactgaatactgatccacgaccaacgtgcttacgatagtggagcatatcacgtacgtcattaatatacgtgatgcgcgaattctacacacggctanttgcaactgtcatcctgcacacgtatatagcattatactctagtcatatgacacaacacaacgacaatcacaatccatctgcttagccnttttctgttgtngnggtgagtagggatggggatgaggaggtcgcaatcaattttcatgcaacgagagtagagtgcatttatcccctctcatcactcagcagtgtgtacagtctacgactcctaggcgctgtctcttactaacgtctatgcatagccacagggcctcacataagacatacaagaagcancgagcaaactnacactctccnncactccaccactcaactatcatctccattatggttatgtctttctataatcaacacacacacacacgtaacgtatccagncgaagatcggcgncagcctgtccactgacctatcactcggacggcgagggtgtgagatcacgaggtgaatcacaaaggcacagcataagacataatacatcaagtcataggacgatgtctgctggtgactgtaactgcggagagcagtggggattancctccacatctaagcaaagcataaattcaacattataagatagattgaaatatgagggttaggggatgatatgatacagccagccaggagatgtcaatcaataactctcntatcagaccgcctgtactgcttgcagtggttggctccacaaacatccaatcccacacagaccaccatagagggaggtgggggcggtatagctgtgattaaatcaatctatattattcatacatcatttctactcttttgtttcttttttctcanctcnngnataaactcaaacaaaataaaagataaggacagcaagagatggcgatgnggggtaagcttgttgttgtgtgtgtaggtgtgtagcacancgtnnnaataacacaaaagtaacacatacaacatccctcacacacacnagacacactaacatcagtacatacaatcttataactctccattctccttatcgccgttttgtgtttctttgtcctgttataaattgtatanataatattatatttgttgtgtgttttgaagagtatagagaagtagttggtgtgcactaccgaacactcatactcctatatgatttaggtggtgntttnctttcccccaccaatactcctcctaccacaacaaacacagggggatanctgtggtttnnnttttgtgtgtggggtgggcgggggggggggggcaacacccccacaaacgccagcgagacacaaacnaaaagnaggnangcnggnnnnngggcatnnttttnnn

SEQ ID NO: 2060 - DNA, 588 bp, Glycine max
  Probeset Number=SeqID_11839
ctcccatatcatttgtttccgaggttctcttcccatatgcccgtgataatgttgggaggcatctatctctaacatatgatacccccgagaccaaagctgatatcaagttgcttcgttccccagttcaaagtgaccttgaacaagggattgcaggtgctgtgcctatccctccagatgatgctgggaaacaggagtcattgctgcacttgttgccaatgtggatgctatgatttaagctgatagaaagatccctgcctaaaagattgccggggcctattatggaaaacggcctatgaaaataggaattggaggaattgtttttgatgatggacccaaagctcttaaaaaagggcccgcctgggtaaaagggtacctaatttcaaggggaacaaatgggcccagggttatatttggaaaaccacctggggcccctaaaaaattttttggggtttttgacccaccgggaggcaaaaaaaaaaccccctttgttaaatttcgggccccccgggggaaaaacccaccaattttttttgccccggaaataaaaaaaccccccccccccctcccggttgaggggaatatttttcc

SEQ ID NO: 2061 - DNA, 561 bp, Glycine max
  Peptide Sequence Number=SeqID_9602
  Probeset Number=SeqID_11840
ctgtacatgcttcgttcggccggtcgctctctccctcctctccgcactgctgcgccctctcctcgactcctcgtcgactcgtctcgcctgcttcgactctcctgcgccaaggtctgttgcgatgggcctcctttgctcgatgggcgcccctggttgagtttcattcgtgcgcagtttggttcgccttgccattgttgactgcgtcgagccatggatccttctatccttaccactgaggttgtacgatcttgtccgttgctgcatctcctctccgttttgctcgttgttgcatttgcgtcctgctcatcaaggattgctgctctccgctctgcctgccttcgtgttgtacttcctgtatgtgctatcatattgtcgcctgtaattgttttaatatgtatttcggatatggccggccgtcgtgtgctgttcgttcttgtgttcattatatcccgtgctcgcgtgtgagcaggatgtgtgcgtttgtttcagttattgtacctattttggaggccgtggtggctcgttgcgtctgtggtcacttttgtatttatgtgaggtcgc

SEQ ID NO: 2062 - DNA, 1695 bp, Glycine max
  misc_feature (41)..(41): n is a, c, g, or t
  misc_feature (182)..(182): n is a, c, g, or t
  misc_feature (301)..(301): n is a, c, g, or t
  misc_feature (637)..(637): n is a, c, g, or t
  misc_feature (831)..(831): n is a, c, g, or t
  misc_feature (850)..(850): n is a, c, g, or t
  misc_feature (933)..(933): n is a, c, g, or t
  misc_feature (972)..(972): n is a, c, g, or t
  misc_feature (1232)..(1232): n is a, c, g, or t
  misc_feature (1424)..(1424): n is a, c, g, or t
  misc_feature (1633)..(1633): n is a, c, g, or t
  Probeset Number=SeqID_11841
ttatttctttataatcaatattagattcatatctctatcanatctgcaatcatactcactaacaccaacacgcagtgtctacactgcctctcgcaaatactgcgtcatcacaccgcgtcgacaactcacaccacattacagacagagctatgcaacgttcgtgtgttacgagaatataagantatataatattctgatctgctcgtgtgtatatgtattttatatatacaactgtccatagcatcaacacccacatacacacgaatgagaacagatacgagtatattacgagacacacgcntaacactatcgcaccacacgcgctcgcgtcgatacattgcctcacataccgacataacatccactaggccgtggctgacaacgttgtactctcggcatatgattgataagctgacaccacctagctactcaccatgcgtaaccagcaccactgacacgctcattctagaatcctcaatcacatcccacgtcacgcacaccatcgctcatatacacacacgcagtatgcatcacaaaatcactctacaggatatgatagtatatctatagttaattctactaccctgaaccaagcacatcctgtatataccgtgatcacgcagagcgcgacaccgcnacgcaagcagcacataggcatatccactacactcacacgacttgtgatatgctgttgcgtcctcacaactcgcgtcatatatgcatcgatatagtattaactgtgagtgtgccgccgctctctcagtgtttgatcagccaccccaccgttacgcgtgtgtagacgcgccatctaatattatgtgcgcctcgtcngtattcctacaacatcaanacccgctctcaactataaattctcctctcgtggcgacttcgtagcacctcccccgcagagtgtagacacgttcgccgcatccntacataacaccaactaccctctctattgacacagaagantccctaataagcgacgcgcgcgacaaattcgagatcgctatctgatatccccctacatgattggctatacatactgtactcgacggcgctcgagtaaaacccaccgagtattaggatacctgaatatgccatagcgtcgcagcagatcggtaaacacacagcataattcttcccgcacacacgcaacattctatcggattcggaaattggcgcttgaggacaggaatattacacggatataatgcgactgtgtacagacnagtctcatacgatcctaggtgcacggatatatgtatacctatccgcgacctcactacatgtatatcgaatactcatagagcgccttactcttcgcatcatgtgcacagctgacacgaatgcacatagactacagactacgctatactgacaacacgtgcggtgacacgcgctcacactatgacatctcgtanttgtacaccacttcatgtctatcgatcttgcactaggtactatgtgaaatgcgtcgtcgaggcgtcgcacgcaggctaccatgagtgtcgaacatacgctgtgcactctctcctcatccgccgctgattcacacctctacagacgtcctcgtacagagacgctgagcgcacgcacatagttatgctacaagtctctaactgactgcctnactatatagagcagcgcacgactctctatgtggagtatactaccgtggctgtgctactagga

SEQ ID NO: 2063 - DNA, 721 bp, Glycine max
  misc_feature (299)..(299): n is a, c, g, or t
  misc_feature (336)..(336): n is a, c, g, or t
  misc_feature (348)..(348): n is a, c, g, or t
  misc_feature (355)..(355): n is a, c, g, or t
  misc_feature (378)..(378): n is a, c, g, or t
  misc_feature (380)..(380): n is a, c, g, or t
  misc_feature (426)..(426): n is a, c, g, or t
  misc_feature (432)..(432): n is a, c, g, or t
  misc_feature (444)..(445): n is a, c, g, or t
  misc_feature (447)..(447): n is a, c, g, or t
  misc_feature (456)..(456): n is a, c, g, or t
  misc_feature (464)..(464): n is a, c, g, or t
  misc_feature (466)..(466): n is a, c, g, or t
  misc_feature (483)..(483): n is a, c, g, or t
  misc_feature (487)..(487): n is a, c, g, or t
  misc_feature (491)..(491): n is a, c, g, or t
  misc_feature (500)..(500): n is a, c, g, or t
  misc_feature (502)..(502): n is a, c, g, or t
  misc_feature (508)..(508): n is a, c, g, or t
  misc_feature (513)..(514): n is a, c, g, or t
  misc_feature (522)..(522): n is a, c, g, or t
  misc_feature (529)..(529): n is a, c, g, or t
  misc_feature (553)..(553): n is a, c, g, or t
  misc_feature (556)..(556): n is a, c, g, or t
  misc_feature (560)..(561): n is a, c, g, or t
  misc_feature (570)..(570): n is a, c, g, or t
  misc_feature (582)..(582): n is a, c, g, or t
  misc_feature (585)..(586): n is a, c, g, or t
  misc_feature (588)..(588): n is a, c, g, or t
  misc_feature (591)..(591): n is a, c, g, or t
  misc_feature (593)..(593): n is a, c, g, or t
  misc_feature (595)..(595): n is a, c, g, or t
  misc_feature (599)..(599): n is a, c, g, or t
  misc_feature (601)..(721): n is a, c, g, or t
  Peptide Sequence Number=SeqID_9603
  Probeset Number=SeqID_11842
acaaaatttcaaatttttttcttaaaaataaacaatcattgacaatcatgcaaagaggtgcaactggcaaagttcaacaatcccaaaccaagcccgctcagaccaagactggcaaatctagacctatcgaaagacctggcctcactgaagatgaaatcgaagaaatcagagaagccttcaatctctttgacactgataactctggtatgattgaccctaaggaattgaaagctgccatgcaaagcttgggcttcgaatctaaaaaccccaccatctaccaaatgattgccgatttggancatgaaggccccctattgattttgataccttcttganagcaatcactgnaaagctnggtgacaaagaatcaagaaacgntntctccaaaatcttccaattattcgacagtgctatagtggatccatnaacatnggatcttgagannantcgccatanaactctgnanaaaccatgactcctgangagntgantgaatgttncnaagagncgctnngcggttcngaaatcnttttgaagatttttttgtttccgnggngaanncccccctcnccatctgtttgnttnntnttnancnttcnannnnnnnnnnnnnnnnnnnnnnnnnnnnnnnnnnnnnnnnnnnnnnnnnnnnnnnnnnnnnnnnnnnnnnnnnnnnnnnnnnnnnnnnnnnnnnnnnnnnnnnnnnnnnnnnnnnnnnnnn

SEQ ID NO: 2064 - DNA, 1820 bp, Glycine max
  misc_feature (19)..(24): n is a, c, g, or t
  misc_feature (26)..(30): n is a, c, g, or t
  misc_feature (32)..(33): n is a, c, g, or t
  misc_feature (46)..(46): n is a, c, g, or t
  misc_feature (50)..(50): n is a, c, g, or t
  misc_feature (53)..(53): n is a, c, g, or t
  misc_feature (66)..(66): n is a, c, g, or t
  misc_feature (203)..(203): n is a, c, g, or t
  misc_feature (216)..(216): n is a, c, g, or t
  misc_feature (497)..(497): n is a, c, g, or t
  misc_feature (509)..(509): n is a, c, g, or t
  misc_feature (736)..(736): n is a, c, g, or t
  misc_feature (750)..(750): n is a, c, g, or t
  misc_feature (872)..(872): n is a, c, g, or t
  misc_feature (900)..(900): n is a, c, g, or t
  misc_feature (958)..(958): n is a, c, g, or t
  misc_feature (998)..(998): n is a, c, g, or t
  misc_feature (1004)..(1004): n is a, c, g, or t
  misc_feature (1130)..(1130): n is a, c, g, or t
  misc_feature (1155)..(1155): n is a, c, g, or t
  misc_feature (1182)..(1182): n is a, c, g, or t
  misc_feature (1192)..(1192): n is a, c, g, or t
  misc_feature (1446)..(1446): n is a, c, g, or t
  misc_feature (1479)..(1479): n is a, c, g, or t
  misc_feature (1491)..(1491): n is a, c, g, or t
  misc_feature (1506)..(1506): n is a, c, g, or t
  misc_feature (1515)..(1515): n is a, c, g, or t
  misc_feature (1535)..(1535): n is a, c, g, or t
  misc_feature (1540)..(1540): n is a, c, g, or t
  misc_feature (1566)..(1566): n is a, c, g, or t
  misc_feature (1574)..(1574): n is a, c, g, or t
  misc_feature (1597)..(1597): n is a, c, g, or t
  misc_feature (1609)..(1609): n is a, c, g, or t
  misc_feature (1648)..(1648): n is a, c, g, or t
  misc_feature (1654)..(1654): n is a, c, g, or t
  misc_feature (1660)..(1660): n is a, c, g, or t
  misc_feature (1665)..(1665): n is a, c, g, or t
  misc_feature (1689)..(1689): n is a, c, g, or t
  misc_feature (1729)..(1729): n is a, c, g, or t
  misc_feature (1746)..(1746): n is a, c, g, or t
  misc_feature (1775)..(1775): n is a, c, g, or t
  misc_feature (1800)..(1800): n is a, c, g, or t
  misc_feature (1812)..(1812): n is a, c, g, or t
  misc_feature (1814)..(1814): n is a, c, g, or t
  misc_feature (1820)..(1820): n is a, c, g, or t
  Peptide Sequence Number=SeqID_9612
  Probeset Number=SeqID_11843
ttgtttttttttttttctnnnnnntnnnnntnntggccacgccgcngatntangctgtctgccgantgttttgtgtggtggtgtgtgtgtatcgagtatgacagatacgtcgaacaacataggacgacgccaatattatacgatataagctttactttatatcttctgtagatttctttgtttctacggatgagcacaggaangcgatccaatgancacgctcgcacctacactacacatctaccgaacaacacagcacccacacacatgactcacacacacatcactaacacgccactacgcacgatgattcaccacacccttcactatgagtatcctccagtagcattctaattgtgtatgtcatattttagaaatcttctactaataatcagagagctaacatcacagacagcataatacggcaagacgaacaaacgaacatgagacggacgagcgacagcgcgagagacgacgtactatgatatgaagatganagagctagaganaggaagcacgagactatgctatgagcagcatcgatcgacacagtcgctgacgctgaacgacttgagatatgacgcgtaatgatgtatccacctatcaacaaccaatcatctatctaaatatatcatatatcattgatatgatcttccgcctacttctactctcaatctgtcttgtctagcgtcttcatctactatcgtaatcgcgcaaatgcacaatcaacacacanactagctaatcacntactatatacgcttactgtgtcttgtctctcttataatctctgctcctcctacgcccctctatcctatcactcactacctcatctcactcccgcatctacattcactattcgacctagtgangcatcgtatatatatgtgattacggtcncaccaactcatcgcctcgcaagtgcgactcatatattggcgcacgtcatcacagagantgatcacgacatatatatagtcatctacatgatattatantatcangttatgacaatagcgagaagatatacagacacaacataatgccgacacgagacatgcagacttacgaagcaatacagttgattatactacatctgattcatacatacgtacaacaataacacatcnataagctcgcacacatacacaatanttatcgcaatcatgaacacagctcctnagactctgantatatacagaccactgaatgctgcgtctgctcacgcacactcgtctactctcctctgcaaccgccactcgcacgtcgcgctcctactccatatatgatacatacgatgacactctgatatgtagtctatgacacgctctcgcgcactgtacgcattgtgtgtgttacgcgtcgtggtgtggaccttgttacagatcgcgtttctgttagatcctctacgatgcgacatatactctgctcgcgcgcataagtggnagggacgaaacgagtcgagcaagatagctctgngatgaggtgtgntgctcaccagcaacngcatatgtntgcatcatagacaactctangtatntctacctatctgcatgataaaaccanattacagngttacgatgcacctatatacatncgaccactactnccatgcctactcacactcgactctctcgcctcaccccancctaanacgtgncatgngtaccattgcactacatacacacntcgctatttgcatgatgaataatcatgacagagataaccnatgcacagacacacgcncacacgcatatctacagcccactctaacngatacactcgctatggtatcatatnctgagtgagtgntnatgcan

SEQ ID NO: 2065 - DNA, 661 bp, Glycine max
  misc_feature (1)..(1): n is a, c, g, or t
  Peptide Sequence Number=SeqID_9613
  Probeset Number=SeqID_11844
ncacccccagccagccgccacccacaccccccccgcccaaacacccaccacaccgcccctggccacagaccagcatagcccaccaaccagcaggcataaggaccggcaaagagagagagacagcagttttcattatcccaacaggtctaagcccacagagagactaagcacccgggattatgacaatggtagtaagcactatcgtaggagcaggagtcggagtagaagtcggagcctgcaagctggcactgctcagtatgaatcacgttctagtcctcagagagaggagagtaagagaacttctgcttcgagtaatctagctcaacttaaagacatgtatggtgatttaggggataataaaggagatgccaacatggaaagaattcctagaaaggatagtggaggtgaagaggttattagacttggcgggtctacttggaagtattgaaagttatcatggaatgcttgtatcagatgttggatggatttcatggagaaaaatattgggactagcccttttgttaccagatgtttagtttggtgaatgctatccttaacatttatagataatgtatactaaaacttattcctggtgcattgaatttcatgctttgtaatcgcaagttttagactaaagatcattcctgaactatcatgtttt

SEQ ID NO: 2066 - DNA, 1635 bp, Glycine max
  misc_feature (10)..(11): n is a, c, g, or t
  misc_feature (22)..(22): n is a, c, g, or t
  misc_feature (67)..(67): n is a, c, g, or t
  misc_feature (74)..(75): n is a, c, g, or t
  misc_feature (79)..(79): n is a, c, g, or t
  misc_feature (86)..(87): n is a, c, g, or t
  misc_feature (231)..(231): n is a, c, g, or t
  misc_feature (288)..(288): n is a, c, g, or t
  misc_feature (372)..(372): n is a, c, g, or t
  misc_feature (605)..(605): n is a, c, g, or t
  misc_feature (803)..(803): n is a, c, g, or t
  misc_feature (810)..(810): n is a, c, g, or t
  misc_feature (828)..(828): n is a, c, g, or t
  misc_feature (835)..(835): n is a, c, g, or t
  misc_feature (837)..(837): n is a, c, g, or t
  misc_feature (846)..(846): n is a, c, g, or t
  misc_feature (865)..(865): n is a, c, g, or t
  misc_feature (894)..(894): n is a, c, g, or t
  misc_feature (957)..(957): n is a, c, g, or t
  misc_feature (959)..(959): n is a, c, g, or t
  misc_feature (966)..(966): n is a, c, g, or t
  misc_feature (1066)..(1066): n is a, c, g, or t
  misc_feature (1076)..(1076): n is a, c, g, or t
  misc_feature (1106)..(1106): n is a, c, g, or t
  misc_feature (1242)..(1242): n is a, c, g, or t
  misc_feature (1257)..(1257): n is a, c, g, or t
  misc_feature (1302)..(1302): n is a, c, g, or t
  misc_feature (1318)..(1318): n is a, c, g, or t
  misc_feature (1333)..(1333): n is a, c, g, or t
  misc_feature (1347)..(1347): n is a, c, g, or t
  misc_feature (1356)..(1356): n is a, c, g, or t
  misc_feature (1398)..(1398): n is a, c, g, or t
  misc_feature (1459)..(1459): n is a, c, g, or t
  misc_feature (1535)..(1535): n is a, c, g, or t
  misc_feature (1538)..(1538): n is a, c, g, or t
  misc_feature (1553)..(1553): n is a, c, g, or t
  misc_feature (1572)..(1572): n is a, c, g, or t
  misc_feature (1579)..(1579): n is a, c, g, or t
  misc_feature (1633)..(1633): n is a, c, g, or t
  misc_feature (1635)..(1635): n is a, c, g, or t
  Peptide Sequence Number=SeqID_9614
  Probeset Number=SeqID_11845
ggtagggtgnncgtcgtcttcnctcaccattccttcacttcgtaaacgagagaggataaatattaancaatatnncttnctctttnngaggccgaacactagaagggagaggacgcgagaggcgtccccctctctaggtggaggattaggtgtaatgagcgagcgcgcccaccgccgctcccccgtcctcgtccatgttgtctgtgcatggtgagcccgagacaagacgcntctcaggatagcatatgcctacatcgtcatatgttgtgtcagtagagagttccagcntgagcaggcggcgctctctagctcgcagatagagcgaaaggagtcgcataatcgggtgattggctgcttcgttcggattggtcnactccactaacgctaagtcgccaagacggaatgcgcggggtagtcgatggatctcctgcgtgctcacgcgcgctagaagaggacaaacatagccgttactgtgactggagagagatggcgcaggctcacgcatgtacgagcctattcagacacccacggcagcggtggatgaggcactactctagccttctattaaggagctttctccgtcacctggatgcaaggatagcgcnagcgagaacccagcggggccaggcattcaccatctagcggagagcttctctgcgtatcactaggaattgacgatagatatgtgtgacagaacatccctctctgcgagacatatctgcttagtacttggaacagcgtcgctcacatgtctgtgagaagatggtgtagctttgagagacgaaggaagtgaagtggatatnagtgggngattaggagagaaaaaanatataancnacatataangtaaatgaataacaatcgnatctctcccgtggtccgcgtaagcagagntatctcctaagaggtacgataatgattatacgcggattgtgtattaaaattctctccacacantnccctagncgcgtgtacgagacagcgtgcgctatgagatgtggggcgtgatgtcgtgagcggagagggtctgtagcttgtgtcagatatactcgtgtaggacggaacntgagagatgnaaagcatctctcaccacaccatcccccacntcttctgtcagaagcttctgagtatagagctccaacttataacgctatctttatagacacaatagagtgagttggctttacaagctgcacactcgcgcgtggacagtacaaggtctctctctctacatgacggagngtgaggagatatcangaacagagaatagaggtgtgagcgagagagagcttcattacgatncatagtcatcagtctnaccgaatcgacttantcatgcttcacagngactgacgngagacggctgagatatccacaggaatcgagactcgtcgcatncatagacacgatctgtctactagtcagtatatggtgccgtgtgacagtcatatagagactnctacgatagatctgcactcttctcgtagaagagtcgagggaggggcgttagatcgcgcgcgttgctgctgagccgnccncagtgcggggtgagnatagctatgacgacgatgnatagagnacatatctgcatcgtactgctctatccttcgtagctgcgtctatatacgctganan

SEQ ID NO: 2067 - DNA, 1503 bp, Glycine max
  misc_feature (226)..(226): n is a, c, g, or t
  misc_feature (258)..(258): n is a, c, g, or t
  misc_feature (336)..(336): n is a, c, g, or t
  misc_feature (377)..(377): n is a, c, g, or t
  misc_feature (460)..(460): n is a, c, g, or t
  misc_feature (474)..(474): n is a, c, g, or t
  misc_feature (476)..(476): n is a, c, g, or t
  misc_feature (488)..(488): n is a, c, g, or t
  misc_feature (492)..(492): n is a, c, g, or t
  misc_feature (504)..(504): n is a, c, g, or t
  misc_feature (1341)..(1341): n is a, c, g, or t
  misc_feature (1451)..(1451): n is a, c, g, or t
  misc_feature (1503)..(1503): n is a, c, g, or t
  Probeset Number=SeqID_11846
gagtttcttataatttgatattgtttatatattatatatccgcggcgcacaaagcacacacatatactatataggcgttatacaaacaacaagagcggaggagcgcagcgacggatataaacattaaggtgcaagacgacaaccacactataaggggcgggtgctgacaacaatacaccaccacagacacgtccggatgtctaggaacaacactcgataaataacnaaaacatatagtggtcggagatcacacataangtggtgcgcttctggtctcttcttctctcacaaccacctcgaattcacgacactccactcctgatcgctcgaactganattgtgctatgacctgtgtgtggtacagcagatacataatncaaataatgaacgttgcgacgactcaattacacgcagcgaaaaataggaggtgtgtgagcgcacaatagcaatataatcgggngtagcgatatgcangntgtgcatgtcanatcnatatcgctgtgnctcctcatctcgtgtctgtagacaatacatacaaaactactcttgtggttctttctcgtgttgttctctgtctactctgtgttcgttccatcgtgcttcgtgctctctttcgtattccgtgtcatatatatctctcttaccctgtctcgtctctccttcgtgtctgtgtgcctcatcataattatatgctgctgttgcatgctcatctaactacacacaacatcggctgggtggactgtggtgtgggcgtgcccacatactgcccaccgcgtcttatactaccctcgaactatagtatctgtcatctacactcctatctatcttatagtgttgtacgtgtggatgtatatcgagaacaaactacactaacatacatacgtgggccgagtctataatactacttatcacctcatactaccatactgtcgaaggctgtggtgcgtgtggtgtgtcgcttatattgttgttgtcttcttatctgacttaccaatgtcacgtgattgctgttgtctgctgacacgtactactcatgtctcgtcctgtataaatgcgcttatctctctgaactagcgctctatcttcaccatctacggtacttctatatatatgggtgtgtctgttgttcgctaaataacacattgtcagacagacctacacgcacactctctctgtctgtcctcttctgaatgtatacattctctactgatatttatcgatctgttgcgcggtcgtcgtgtacaacgtcgttgatctctctgatatacattgcatgctggtgtacgaatagtactaacacacataacgacgtgtagcataacatagttgtgtgttgcgtcnatgtgcacactaactgtcgtccatctaacaataatacacacaatactgtgcgtgagagtctgggtgcggctgtcttcttcgccgtctgctaacagacatcacctcacgcngcgtatactacacagtgctgtctctctcattacgcatactatacccacttan

SEQ ID NO: 2068 - DNA, 501 bp, Glycine max
  misc_feature (237)..(237): n is a, c, g, or t
  misc_feature (270)..(270): n is a, c, g, or t
  Peptide Sequence Number=SeqID_9615
  Probeset Number=SeqID_11847
gccagctgaaagaccagcagctaagcttgctcccactgacacagcctacagctaccggcgtgatgggcggaggcggcttcgtgtccacgctccggtggctgccggacaccggcgccgcgctgcgctcgccctacgacctcctccgcggctggccggggctgctgctcgaccacccggccgtcgacgccgtgctctgggccgccgtcaccgccgtcgagtccgtcgccatcgcgggcntggtctgcgccttcttcctctgctgcggctgcnccttgtagtgaaagtcgatccatcagccagccggcccatacatgtcttctctcctgtccttctcaatgctccccgtttcgctcctgcttcgtctggatgcttatggtgtgcattatgtgatccagaacaatatgaaagaaatataatggcgaatcaatgttcatggaacgcctcgtgtctgtgaacttgagtatgataaagcctccgagcaagtacggtcatatatgcaaa

SEQ ID NO: 2069 - DNA, 1430 bp, Glycine max
  misc_feature (1)..(1): n is a, c, g, or t
  misc_feature (31)..(31): n is a, c, g, or t
  misc_feature (55)..(55): n is a, c, g, or t
  misc_feature (123)..(123): n is a, c, g, or t
  misc_feature (135)..(135): n is a, c, g, or t
  misc_feature (209)..(209): n is a, c, g, or t
  misc_feature (289)..(289): n is a, c, g, or t
  misc_feature (692)..(692): n is a, c, g, or t
  misc_feature (871)..(871): n is a, c, g, or t
  misc_feature (991)..(991): n is a, c, g, or t
  misc_feature (1159)..(1159): n is a, c, g, or t
  misc_feature (1219)..(1219): n is a, c, g, or t
  misc_feature (1284)..(1284): n is a, c, g, or t
  misc_feature (1308)..(1308): n is a, c, g, or t
  misc_feature (1377)..(1377): n is a, c, g, or t
  misc_feature (1388)..(1389): n is a, c, g, or t
  Probeset Number=SeqID_11848
ncgccatcacagcagactcgcagagtgatgncccgtgcagccaaatgcacagtgntacacaggtagtaagcgacgtagaccccatcagcacgtgacgtcccgtatcacgtcacataatctacncagtatctatcntgtctagcgcagactgcacagtacatccatatcatgatggttggtgcacataggatattgcaacggatcgctcnggctcgtatcgatgagctgatccagatatagatggtacatatcacgatgtatacatatgcaggatagtgtactaactacnaagacacagaacgaggaacgaatagaggcacatgagatgagagtgaggactgtccgttgcacagagatatcatccagcctaacacatattcacaacaacggttacagcaaggaggaaggaggggcacaaacacagaccatcacaagaccatgacatgccaaagctcattaatagaagtggtatatattattgatatgtggagatggaacttagctcaattaataataagttcatagtattataatggacaatagaggacgatacaagcaccacacaaagcgtagcagaggagtgtaacacacaaggatggtgggcaccaaacacacacgataataacaacacctgcaacgcgtcgcgcgtcatagcctattaatggttgtgcagccacacaccacacaactcntacatctcacactactggagttgtcgcataggaacagtatgaggtgtttcgccgtgggttctgtcagaacctaccgacatgatcttcgtgtgtatattcgttattaactctaatatccgatatctctcttcaccaacaaaacccttcaccatccgaacagagagatatctcgtcacggnaagagaacgacaccgccggtgtgacacgtcggcggatgtccgatatgtgttattgatttttcatataaatatatatatagtggcataggaatccatctccactgcaggaacggcatcgcnactggcgaggagtagacacgcgcaaagtggacggggcggggataacgcctgcgtcacacccgcacgtatagaatggatagacacacatagtcacgcacagaccaccactgggcatgcataatcctctatgggctgtattgtaggttctaacgtctcaatacagatgangatgcaggtgagttgtaatctccttggaggtgtgcgcgtctgagaatatagatgggaggnggcactaactcacacatctcggctccttcataaccacatagaaaaaaggaggcggcgcccctcancgtatgtggtgtgcgtgtaatttntaaaagcacaaccgcatactagagtagggttatcccgtctcacacttgccagtcgcccagccgggtgtngagggaggggnngtggcctgcggcgggggaaggggggcccaaaccactcccca

SEQ ID NO: 2070 - DNA, 2018 bp, Glycine max
  misc_feature (1)..(3): n is a, c, g, or t
  misc_feature (17)..(18): n is a, c, g, or t
  misc_feature (23)..(25): n is a, c, g, or t
  misc_feature (27)..(28): n is a, c, g, or t
  misc_feature (34)..(35): n is a, c, g, or t
  misc_feature (42)..(42): n is a, c, g, or t
  misc_feature (44)..(46): n is a, c, g, or t
  misc_feature (65)..(65): n is a, c, g, or t
  misc_feature (70)..(70): n is a, c, g, or t
  misc_feature (76)..(76): n is a, c, g, or t
  misc_feature (91)..(91): n is a, c, g, or t
  misc_feature (94)..(95): n is a, c, g, or t
  misc_feature (113)..(113): n is a, c, g, or t
  misc_feature (136)..(136): n is a, c, g, or t
  misc_feature (150)..(150): n is a, c, g, or t
  misc_feature (161)..(161): n is a, c, g, or t
  misc_feature (245)..(245): n is a, c, g, or t
  misc_feature (258)..(258): n is a, c, g, or t
  misc_feature (276)..(276): n is a, c, g, or t
  misc_feature (282)..(282): n is a, c, g, or t
  misc_feature (284)..(285): n is a, c, g, or t
  misc_feature (303)..(303): n is a, c, g, or t
  misc_feature (392)..(392): n is a, c, g, or t
  misc_feature (400)..(400): n is a, c, g, or t
  misc_feature (445)..(445): n is a, c, g, or t
  misc_feature (471)..(471): n is a, c, g, or t
  misc_feature (476)..(476): n is a, c, g, or t
  misc_feature (485)..(485): n is a, c, g, or t
  misc_feature (502)..(502): n is a, c, g, or t
  misc_feature (506)..(506): n is a, c, g, or t
  misc_feature (513)..(513): n is a, c, g, or t
  misc_feature (520)..(520): n is a, c, g, or t
  misc_feature (556)..(556): n is a, c, g, or t
  misc_feature (560)..(560): n is a, c, g, or t
  misc_feature (616)..(616): n is a, c, g, or t
  misc_feature (633)..(633): n is a, c, g, or t
  misc_feature (644)..(644): n is a, c, g, or t
  misc_feature (661)..(661): n is a, c, g, or t
  misc_feature (707)..(707): n is a, c, g, or t
  misc_feature (729)..(729): n is a, c, g, or t
  misc_feature (758)..(758): n is a, c, g, or t
  misc_feature (761)..(761): n is a, c, g, or t
  misc_feature (795)..(795): n is a, c, g, or t
  misc_feature (829)..(829): n is a, c, g, or t
  misc_feature (838)..(838): n is a, c, g, or t
  misc_feature (843)..(843): n is a, c, g, or t
  misc_feature (875)..(875): n is a, c, g, or t
  misc_feature (899)..(899): n is a, c, g, or t
  misc_feature (924)..(924): n is a, c, g, or t
  misc_feature (931)..(931): n is a, c, g, or t
  misc_feature (959)..(959): n is a, c, g, or t
  misc_feature (1055)..(1055): n is a, c, g, or t
  misc_feature (1263)..(1263): n is a, c, g, or t
  misc_feature (1425)..(1425): n is a, c, g, or t
  misc_feature (1432)..(1432): n is a, c, g, or t
  misc_feature (1451)..(1451): n is a, c, g, or t
  misc_feature (1488)..(1488): n is a, c, g, or t
  misc_feature (1501)..(1501): n is a, c, g, or t
  misc_feature (1524)..(1525): n is a, c, g, or t
  misc_feature (1527)..(1527): n is a, c, g, or t
  misc_feature (1538)..(1538): n is a, c, g, or t
  misc_feature (1545)..(1545): n is a, c, g, or t
  misc_feature (1550)..(1550): n is a, c, g, or t
  misc_feature (1557)..(1557): n is a, c, g, or t
  misc_feature (1576)..(1576): n is a, c, g, or t
  misc_feature (1631)..(1631): n is a, c, g, or t
  misc_feature (1637)..(1637): n is a, c, g, or t
  misc_feature (1688)..(1688): n is a, c, g, or t
  misc_feature (1769)..(1769): n is a, c, g, or t
  misc_feature (1792)..(1792): n is a, c, g, or t
  misc_feature (1801)..(1801): n is a, c, g, or t
  misc_feature (1827)..(1827): n is a, c, g, or t
  misc_feature (1845)..(1845): n is a, c, g, or t
  misc_feature (1865)..(1865): n is a, c, g, or t
  misc_feature (1930)..(1930): n is a, c, g, or t
  misc_feature (1957)..(1957): n is a, c, g, or t
  misc_feature (2018)..(2018): n is a, c, g, or t
  Peptide Sequence Number=SeqID_9616
  Probeset Number=SeqID_11849
nnnggggttgtgggtgnngggcnnntnntctccnnccatgcntnnnctatctctacaccgggacncaccncgcacntaggctcattcaacnaanngcagtggcggtgtgtggngatggtgaactggcctgaagtgnagtagtatatgtgntgatagtgtangttgtgcccataccacatcgactactaccaatactaagcagcgcgcacagagcgtgaagtgtatactactatatctgtgtaggnggtgtggttttgnttgtagtgtggtgtgtgntgcgtntnntgtgcgatgatgacgcangacagtagattatgtatcgacggtgtatgtgcgacaactgtccagatcacactgctcactagcgcagcagactggaccgcgtgctctcnaagacgcngcgaagtaacgcgcactcgccgacgtctcctgccttgacactacngtagtgctcggatgagtgagcagggngtacnctacaacanactactatgactagcanatanatatacnaacacgnacatacacagtgaggatggagatcatgtcgtctcancgtnattgactcacacgcgctggtccctctcactgctatctgtatcacgtgatattacgntgtatgatgattagttnctgatgcagcngtgtgcatatgatgtgnacatagtcactgattgcgttacatgtatcatgcagctacgatattnctctatatagtcacatcaccantataatacatatatactcccaagtcgtcncancacagcactcgacgcgcagagcgatgacgtgtgncgatctccgctatctcgcgttgacgtgcatatgnctgttcgtntggtngctggcgcgttgtgtgttcgcgcgcggcagcngactccgtcctggcatgtcgttgnctcgctacgcgcacgacgtgatgancgacgcntgtcatctctatacaccatcacatcganatgcagccatcttctctttacacatcaatattacatctctcagacttcatgcttaatacctctatatcacgtcgtctatgtgtgtatctatgttgngtgtgttctggttgtgtgcgatggcacgcgtgttagtgtgatgcatacgtctgttgagtgtgagcgactcgctcgatgttgtatggtgcgcgtcgtcaccgccgtgacgtctcatgtatctgtcagcgactactcgcgagtaatcgagactatcttcactgctgttgcttgatttgtgctgacgacatcgcagcgtctcttgcttganttcgtgcatcgtgctcttgtgatacgcgatcgtctcacatactgtgcgtgagactccgtgtcgtgcagtctgctatatcgctagagatggcgcgctctgatatgatatattagtgatgtatgtatatgctcacatcatgacatctatgctgttccgtatcangcgaccntaccgtacatctacgtcanagtactgtcttcacatccaagatgtcgatacgtatgnctgctagatttgnacacagccacgaatatcgctcanncnatcgtcgctanatctctngcccnctcacancatgtattgagtgctctangtatgctgtatgtagatactactctagctgccccatatcatgagcactgacgcancgaagntggtgactatgacaatcagcgcccagcgccatgagctctatgcgatgagtntttctcagctactgctacatcaacgtatgcagcacatcgtgtagtacgtccatgctaatattagaccgacggacgtcgtgntgcgactcttgcacgtcgtcctncgtcatcantcactacctacgacgcattgattgtncgatacgtcgtctactgncgctgacacgtcgcgtctgntaaattcctaggctactgattgtcgcgtctagtcatctagtcgcgcagtacccgctgcatcctancatgtccgtgtatccagctgacactcnataccatcgctgcgcggtggttgaatcgctgtgtgcagcacgagcgctatcgatcgacggn

SEQ ID NO: 2071 - DNA, 472 bp, Glycine max
  Probeset Number=SeqID_11850
gtgggtggtgagtgctaccacatagggacatctcttgaaaattattgcaaatctgcagaatattgcggcgatatgccagaacttcctggaaaatgttctggaactcatgcaagacgtgagcaatactccaattggagaagaatatgggacggggggaccgcttattggaactgtgctaccatttatatttgctactaatcggacgggggctcattgaccctggaaaatcatacaaccacctcacggggagatatgtgctcccaccaatgacataaatactaccgttggttcagctgcactgacaacaattgcatattacaatgcgggactttcacaaaaaggataagcttattttaataaatacatccaaccaaccccaaacctttcaccgattaacatctcagaagataacacaaaacccttatctcttactttaccacttttcggaagtatattagctgaagaattactt

SEQ ID NO: 2072 - DNA, 604 bp, Glycine max
  Peptide Sequence Number=SeqID_9617
  Probeset Number=SeqID_11851
gaataattatccaaacacacaagagctcctaacccttacatcgctcacatgtacaaattcattgctgctttactcctcctcgctgtcttctccactcctttacaagcccaagaaatggtcttggaacaagtcggtgaatacattgagatcgttaatttcgaagacttcatcaaccctggcactgataacccagaagttattgttgtgattcctgaaccagaacaagaagaaggtgacgagatcgacgtccctgctggagaagtacttgttattggcgagtatgagtttgtcaatggtgaaactggtgaaggtgctttggctgaagaaggttttgtatctgaagaaggcactttatttgaaggagaactcaccattgtcgaagtagaatttgatcaagctcttattcaacaaggtttcctttctctttaaggaccatctggagagaagaactttgtcagtttgcataaaaagaaaaacataaacactttttattgtataagtttatatgtataaaggttgcttttttaagggttaaacatagtaagtaagtagtatgtagagctctgtaaagacctttttatgatttttactccatctactcatc

SEQ ID NO: 2073 - DNA, 250 bp, Glycine max
  Probeset Number=SeqID_11852
gtttcccccccacaaatagttgtcttactcacctttatgaatatccttcgtgcttctttatcttttttgcaggttttgatgcagcccccgagtagtgaattgctagttgctatattgttcctcctcagtgttgttctatttgttgtggattactttgaagaattatattttgtgttcatagctgcaaccatccccttccttggcgttctgcttgaaaatatggagctttcagttaattctcttgctcagg

SEQ ID NO: 2074 - DNA, 848 bp, Glycine max
  misc_feature (848)..(848): n is a, c, g, or t
  Peptide Sequence Number=SeqID_9618
  Probeset Number=SeqID_11853
acagcaaagcagcatcagccaagtgacatcgtccatccattaagccagcaccaacttctcagttctcttcgtgcgttagctttcctactctgccttgagtaatggcgaccatggtggctttgagttccttcgccgtcgttggctggtccgccacccgctctccggtggcggccccgcgccggcgcgccctcgtcgtcagggcccagaccgagcctggcatggagtcaaccaaggagacaacgagcgcatcgacctcctcctcctccccgagcacgagcgcggccccgaccccgatcccggcggcacccaagcccatgaccaagaaggcgaacccctcggtctgggacgcgctcgccttcagcggcccggcaccggagcgcatcaacggccggctggccatggtgggattcgtggcagcgctcaccgtcgaggcggcgcgcggtggcgggcttctcgaccaggccggcagcggcgctgggcttggctggttcctggtgaccgcgggggtgttttccgtggcatcgttggtgccgctgctgcagggccagagcgtggagagcaagtccagtggcttctggagcgcggacgccgagctctggaacggccgcttcgccatgctcggcctcgtcgcgctcgccgccaccgagttcatcaccggcgcgcccttcgtcaacatctaagacggcgtactgtagcgctgcggattctcttttcatcagctaacaaatcgtaatagtagtactaactgttgtagccacgtttatgtcacaaaaaaaattgttgcagccacgttgccgttttgtactatcggtgatggcaatctgtaaatctcatgtttacattgtttn

SEQ ID NO: 2075 - DNA, 1633 bp, Glycine max
  misc_feature (1)..(1): n is a, c, g, or t
  misc_feature (75)..(75): n is a, c, g, or t
  misc_feature (86)..(86): n is a, c, g, or t
  misc_feature (186)..(186): n is a, c, g, or t
  misc_feature (200)..(200): n is a, c, g, or t
  misc_feature (213)..(213): n is a, c, g, or t
  misc_feature (217)..(217): n is a, c, g, or t
  misc_feature (221)..(221): n is a, c, g, or t
  misc_feature (224)..(224): n is a, c, g, or t
  misc_feature (349)..(350): n is a, c, g, or t
  misc_feature (415)..(415): n is a, c, g, or t
  misc_feature (459)..(459): n is a, c, g, or t
  misc_feature (470)..(470): n is a, c, g, or t
  misc_feature (591)..(591): n is a, c, g, or t
  misc_feature (595)..(595): n is a, c, g, or t
  misc_feature (598)..(599): n is a, c, g, or t
  misc_feature (606)..(606): n is a, c, g, or t
  misc_feature (754)..(754): n is a, c, g, or t
  misc_feature (893)..(893): n is a, c, g, or t
  misc_feature (1084)..(1084): n is a, c, g, or t
  misc_feature (1230)..(1230): n is a, c, g, or t
  misc_feature (1281)..(1281): n is a, c, g, or t
  misc_feature (1364)..(1371): n is a, c, g, or t
  misc_feature (1402)..(1402): n is a, c, g, or t
  misc_feature (1413)..(1413): n is a, c, g, or t
  misc_feature (1505)..(1505): n is a, c, g, or t
  misc_feature (1510)..(1516): n is a, c, g, or t
  misc_feature (1519)..(1521): n is a, c, g, or t
  misc_feature (1524)..(1524): n is a, c, g, or t
  misc_feature (1526)..(1527): n is a, c, g, or t
  misc_feature (1532)..(1534): n is a, c, g, or t
  misc_feature (1539)..(1539): n is a, c, g, or t
  misc_feature (1547)..(1547): n is a, c, g, or t
  misc_feature (1559)..(1559): n is a, c, g, or t
  misc_feature (1565)..(1565): n is a, c, g, or t
  misc_feature (1582)..(1582): n is a, c, g, or t
  misc_feature (1589)..(1589): n is a, c, g, or t
  misc_feature (1596)..(1596): n is a, c, g, or t
  misc_feature (1603)..(1604): n is a, c, g, or t
  misc_feature (1606)..(1606): n is a, c, g, or t
  Peptide Sequence Number=SeqID_9619
  Probeset Number=SeqID_11854
ngtgtaggggtgtttctgagtcatggtgtggtagctgcgcggaaggaggtctgggcataataggtatagtccgantgctgagcgcncatagtatcacgtatgatatgtgattatgtagtggcttgtaggtgtctatatgagcagtgtgcgcgatgtgatgtgtaggtatagagctacagtactcanatgcctgtgcactncatctcccacgantatntctntcntatgtcgtgcgtggtatatcatcctctatcgatatctcgtggtactgctcgcgtacgtgtgatctgtcaccgcgcgtgtcgtgcggcgcgtcagcggtgatcagtacatactaggagatctatcnncacaacatgacactattacacagtaatccgagcgacgcgtctagtctccatgtcgcaggtcgtcngctgtccgtgtctaagttgtcctataccgtgacgtactatgagnagtaatactgncttgatgattcatatacatatcgacgcagttagcgcgatctacaccacagtattctcattcgcgataacacagcagtcatatagactgcagacagagcagacataatcacaagcgcgcgancacnacnncagtacnatcgacaataacttcacgtagcgcgcgtatacctcgacggcgtagtgcgcgtacaattgatttatactagactactatgtaatcactcgtcaacgtgtatattcagagatatcagccgactgacctctctccttcatcgtccgtctangccgcgtcatcccgtcgtctcacttcgctgcggcttccgtgcggtgtctcgcacagtgcgcgtacacatcgatagcgtgcctcctcagacatatccacatctcatggtgatagtaaacaaataaaatcgaaccacacanaaagatatgcacaacacaagccgacatccagacaagccaaccgcaccaacaacaagaccagacgcaccacacagcagcaagcggcgacgtcagaagacgacgacgatggtgatgctatagattacactcactatcaatatacatcaccactacatatacagtcttaactaatagtatagtactcattaccncgtgcagtctatcttatagttctcaccatgcacaagaatataattcagtgcatgtatatgtctgggccgcgcgggcgcgcgagcgagcgtattgtgtgagcagcaacgcgacacaatatccgtcgcgcacacataccgatggacanacaccacaggcactagaactccgcgcgcatcagaccacacacaactctacnccgcgcccctctcctccgccgccgctacgccgcgcacgacacgagccgctcacgggtccacggcgcagacgcgcagcgcacannnnnnnncagtagcgtgtgtgtgatattgttttaatgngagttcgcgtngacgtcatcagctatcatggttatggtattatgacctactgtctatgcagtattattatttataaatactgttctcatgtagtgtatgatantttannnnnnnttnnnttnannattannnactgngccgcacncctgaccagagncgcagncacagcgcgtacgcatntgggtgngcacccncgcagcnncncccccccactccgtctttaacacgcct

SEQ ID NO: 2076 - DNA, 844 bp, Glycine max
  Probeset Number=SeqID_11855
aaatcgagagaaggaggaaccctagccgatccgccgccacagtgtttcttttagttcgccacaaattgcagcaaagagaacagttaggtcggatagatggcagatccaggtgctgatccagctgttttgcagatcgtgccttgcccggactgtggcaggaacgtggtcacctacgtaggcgcggcgcgggcagaacgccggcctgcgattctacaagtgccggaatcacaacccatcggggggtggatgcgatttttacagatgggaggaagcctacgcggcccatcttgccacagcacatccagtgggggcaaatcggtgctggtcagatgcagggcgggcaggcggctggagctcaagctgtgcaggcggcgcaggttcatcacgtgcagcagaacggagcgccggaggtgtcgcaggctgcatccttggcaagtacggtggcaggatacatgctggcggcggctccagtcgccggtcgtcagggtggcatcgtcgccgatgctgcatccataaatctggtggcgtcggtagcaaatctagtgattggcgtggccattctgatgctgctggttgcggatgttgtcttgcgcgtgctgaactaggtgtcgtggtgaagatgcgagagagactcgctggcattagtgctaagtgctatgtaaattaagctactaagtacatgtgttaggtggtcaaagtgtgttggtgagcaccgagcgatgctgtacccatgaagcgcacagtgacggtgtacttttggaggtgtactgcttatggtgtactagcgtcatccaaatattacgaaatggtatcatgtttaactccagcaaaacatttatcaagt

SEQ ID NO: 2077 - DNA, 427 bp, Glycine max
  misc_feature (81)..(81): n is a, c, g, or t
  misc_feature (93)..(93): n is a, c, g, or t
  misc_feature (96)..(96): n is a, c, g, or t
  misc_feature (100)..(100): n is a, c, g, or t
  misc_feature (112)..(112): n is a, c, g, or t
  misc_feature (118)..(123): n is a, c, g, or t
  Peptide Sequence Number=SeqID_9620
  Probeset Number=SeqID_11856
ggaacctcaaggaatgaaaagcagtgatggaagtgaaaaccgaaacagtaagacctccaaaatgaaatgagaatttgtttntataatgggatntantagncaaagaaccatntaattnnnnnnggttggggggggggggatctgatggaagatcaagatcatgttattaaataagcctcctatggtttgttaacaagaggtgttatagttatactgcactgattccagatccactataagggaatgtatacgaaaaaattaaatttgaagattatagtctatctaaaatctgaaactgagcctagtcaacttaaactcgaaagaaaatatcctatgatgcaaaaatttccattcctaagttcatacctgattaaacaaaccaccaaatttatttttcaaagacatcacttttgcaagacccttttct

SEQ ID NO: 2078 - DNA, 546 bp, Glycine max
  Probeset Number=SeqID_11857
cctgcttgttgatttcctacaccagcaacacttttcccacggtttctttctttctcctcttcccaattataactatctgtagttaaaattagatatatatgcgtttgaattgtaaaactcctataatttggagtttccaactgatgtttcatttcgtctggaactttccaaatttggagattcactatattatcattgttattcttattattcctgtattccttaatgaaccaagtgcttcaaagtcatttaacgctgtttgtcacttagggcttatatttattatgttgagtaataattgagtttgagaatttgcttgcaatttgattgagaccacttgagcaaagcagggatgcgttgctactgctttatttattttgtttttttaatcagctttccaattgattttggttttgttctttaagaattatggctttgtggtttgtttcaccctttttcatttttgttttttgatcatcgataacaggactacgtgcccacggtttttgacaatttcagtgctaatgttgtggtggatggaagcac

SEQ ID NO: 2079 - DNA, 467 bp, Glycine max
  misc_feature (37)..(37): n is a, c, g, or t
  misc_feature (275)..(275): n is a, c, g, or t
  misc_feature (362)..(362): n is a, c, g, or t
  Peptide Sequence Number=SeqID_9621
  Probeset Number=SeqID_11858
ccccccccctttttatactacctgctcgagctgcttnacctttatttggagcttagtgtaggatttcagtactatgaatattcaaaattgaaacaacagaaattcaattttatttattattgtgagaaatatgagcttttgagatatagttgtatagtaattggtgtcattctcaatctttttggcacatttttcaataattctttcacagaagattacaaacatgaatgggaatacatcagaagaatctttatcattgtcggtatcactcttancttcacaccttttgcaaataattgctcctcaatctgcaaaagatttatgggtcttcgacctttccaagtctttggtaaactctgctnatggtgtctatttacttcattggcccatcaccctcgctctccaatactctgaaagtcaaattgatgatacctatgatcaagtcaaacagcttagtagaacaaata

SEQ ID NO: 2080 - DNA, 1501 bp, Glycine max
  misc_feature (1)..(1): n is a, c, g, or t
  misc_feature (3)..(3): n is a, c, g, or t
  misc_feature (9)..(9): n is a, c, g, or t
  misc_feature (24)..(24): n is a, c, g, or t
  misc_feature (73)..(73): n is a, c, g, or t
  misc_feature (147)..(147): n is a, c, g, or t
  misc_feature (157)..(157): n is a, c, g, or t
  misc_feature (175)..(175): n is a, c, g, or t
  misc_feature (189)..(189): n is a, c, g, or t
  misc_feature (192)..(192): n is a, c, g, or t
  misc_feature (203)..(203): n is a, c, g, or t
  misc_feature (238)..(238): n is a, c, g, or t
  misc_feature (250)..(250): n is a, c, g, or t
  misc_feature (256)..(256): n is a, c, g, or t
  misc_feature (295)..(295): n is a, c, g, or t
  misc_feature (331)..(331): n is a, c, g, or t
  misc_feature (337)..(337): n is a, c, g, or t
  misc_feature (342)..(342): n is a, c, g, or t
  misc_feature (376)..(376): n is a, c, g, or t
  misc_feature (387)..(387): n is a, c, g, or t
  misc_feature (429)..(429): n is a, c, g, or t
  misc_feature (455)..(455): n is a, c, g, or t
  misc_feature (471)..(471): n is a, c, g, or t
  misc_feature (475)..(475): n is a, c, g, or t
  misc_feature (520)..(520): n is a, c, g, or t
  misc_feature (571)..(571): n is a, c, g, or t
  misc_feature (593)..(593): n is a, c, g, or t
  misc_feature (605)..(605): n is a, c, g, or t
  misc_feature (628)..(628): n is a, c, g, or t
  misc_feature (634)..(634): n is a, c, g, or t
  misc_feature (650)..(650): n is a, c, g, or t
  misc_feature (762)..(762): n is a, c, g, or t
  misc_feature (809)..(809): n is a, c, g, or t
  misc_feature (874)..(874): n is a, c, g, or t
  misc_feature (913)..(913): n is a, c, g, or t
  misc_feature (935)..(935): n is a, c, g, or t
  misc_feature (1084)..(1084): n is a, c, g, or t
  misc_feature (1132)..(1132): n is a, c, g, or t
  misc_feature (1143)..(1143): n is a, c, g, or t
  misc_feature (1213)..(1213): n is a, c, g, or t
  misc_feature (1223)..(1224): n is a, c, g, or t
  misc_feature (1232)..(1232): n is a, c, g, or t
  misc_feature (1309)..(1309): n is a, c, g, or t
  misc_feature (1370)..(1370): n is a, c, g, or t
  misc_feature (1392)..(1392): n is a, c, g, or t
  misc_feature (1394)..(1394): n is a, c, g, or t
  misc_feature (1396)..(1396): n is a, c, g, or t
  misc_feature (1441)..(1441): n is a, c, g, or t
  misc_feature (1449)..(1449): n is a, c, g, or t
  misc_feature (1458)..(1458): n is a, c, g, or t
  misc_feature (1461)..(1461): n is a, c, g, or t
  misc_feature (1463)..(1463): n is a, c, g, or t
  misc_feature (1467)..(1467): n is a, c, g, or t
  misc_feature (1481)..(1481): n is a, c, g, or t
  misc_feature (1483)..(1483): n is a, c, g, or t
  Probeset Number=SeqID_11859
ngnatctgngcgcgacagcagcgncattcactagtctcacgccacagtactcactaatatcagtcacatctgnctcgacgttcctctacactacatcatcatgtcctctcatcgcactctacactatcgacagagctcgactagtgntactacacanctgctcacagtgatgctncacacacgcactcnctntctcacatcgngcacagcaccagagcgaggcgacagtcgactgctntgtatgcatagntctctncgctcgctgtctgcgatgactcagtcgcgtaactagcanacactcacatagacgcatcgcttcgatgatgagctntatctnatcantatcacacttgagacgcgcacgctcagtacgtgncgttgcgcgtnagacgaagctcacttactctcatgctcacgctgcggcatagnatgatctccacacacacttagctatnctagcatgagatgatngggngtgaatgcttacggtatctatcagctcagtctgtccatcatcatntcactctcgctaccttctacactgtcgcgacagtgacgcagcacgggcagnacgcgcgtgcagatcacgagancaactcacgcantcttctgtgtcatcttctctcantcacantctatacgtcttgcgncacttcagtcgcactactgctacagcatacttgtcgacactacaatagtcatactactagtaacctacactgacctcatcgaatcatgcatctgtcatcttcggcgtgatangcgacgatacgatcagtctaaacagcagtagcgagtgtcaatgcagngacagctcatcacagacgactactcactctcctgcagcgacgctgagaggcatgacgagcacganagcatatgcatcgagcgaccgactcggatagagtagcgngaccttctatgacacgtatgtntacatatacttatgagtatatctgctcacgacacgtgtatagtctacatcagtatcacatcgttagcgcacgcgacgacactgtactcgcctgcttccttgtctactatgactggtgtctcgctctgcgctttcacgtactgcagacangctccgtacttgcgaagcatgtgcagtgagcgatcgacacagcgcgangctgccgcggnacgacatatagtcgctttgatgatctgcgtacatatcgtatcatacgagtgtcgtgtaagtgagataatncatacttgtnnttaataancgcacgatcaacgcactctacgtggcctgctgtggagcgcagagcacagcggtatagtgagtgtagtagtatatacnacacatctctactatcatcattctattctctactagtggctgcagacgggtgtgttcatgngttgtgtcgtgtgtagttgtgnantncatactgtagacacgatattacgatagcgttagcgtagtagtcangaagaganagcataacnacncncaanccacacaacaacancngaaaaacaacaaccaacc

SEQ ID NO: 2081 - DNA, 493 bp, Glycine max
  Peptide Sequence Number=SeqID_9622
  Probeset Number=SeqID_11860
ccgccttgatggtctggtcaagaatgcagctgaacagcatttggcaaactctgttgaggaaatcacacaacagcagcttgagagagtcttcataaccaacatctttgctcagctctgtttggtcaagtatgctctgaagcacatgaataaagggagctgcatcatttactgtacttgagttaatgcttactgtgggaatccaaaaaccgtagtctgcactgctaccaagggaactagtggggcctcaccatatgggtctctctacatatagcgaatggggaataagggtgaatggtgtggaacctgggggagtttggacgccgatgcgccagcttcaaagcctgcagagatgattcagaacttggggagtgaggtgccagttacacgtgggctcaagcttgagagagagcaggagagtattgtgctggaaacttagttggactctacactacgttctgggcaggatgctcgttcgggagaggggatggtagta

SEQ ID NO: 2082 - DNA, 1744 bp, Glycine max
  misc_feature (1)..(1): n is a, c, g, or t
  misc_feature (19)..(19): n is a, c, g, or t
  misc_feature (30)..(30): n is a, c, g, or t
  misc_feature (68)..(68): n is a, c, g, or t
  misc_feature (73)..(73): n is a, c, g, or t
  misc_feature (88)..(88): n is a, c, g, or t
  misc_feature (124)..(124): n is a, c, g, or t
  misc_feature (155)..(155): n is a, c, g, or t
  misc_feature (213)..(213): n is a, c, g, or t
  misc_feature (246)..(246): n is a, c, g, or t
  misc_feature (272)..(272): n is a, c, g, or t
  misc_feature (279)..(279): n is a, c, g, or t
  misc_feature (338)..(338): n is a, c, g, or t
  misc_feature (354)..(354): n is a, c, g, or t
  misc_feature (371)..(371): n is a, c, g, or t
  misc_feature (377)..(377): n is a, c, g, or t
  misc_feature (457)..(457): n is a, c, g, or t
  misc_feature (462)..(462): n is a, c, g, or t
  misc_feature (471)..(471): n is a, c, g, or t
  misc_feature (484)..(484): n is a, c, g, or t
  misc_feature (592)..(592): n is a, c, g, or t
  misc_feature (1130)..(1130): n is a, c, g, or t
  misc_feature (1141)..(1141): n is a, c, g, or t
  misc_feature (1617)..(1618): n is a, c, g, or t
  misc_feature (1623)..(1623): n is a, c, g, or t
  misc_feature (1625)..(1626): n is a, c, g, or t
  misc_feature (1668)..(1668): n is a, c, g, or t
  Peptide Sequence Number=SeqID_9623
  Probeset Number=SeqID_11861
ncggtccataggtctctcnatcgtccaatntcgtgatcgcgcaccagctctacacgaactagctcacngaacnacgctccgtcattanccacagtcacacggcgtgactctcgacacttaagcncaattcaatacctgtttcgcctgctctacancgcgcagctactcggccgatagtcgctcacagtgacgatcgtagcgagccgtgcagtnggccggcatgccgtcgtgtcgtgcgtgtgctcngttctcacgggcatgcgaccgcgcgncggatcnacactccaatatcatgacgcatgtcagcgcgcgctggcggcgtccgcgtgtcatttcgncgcgtgcagccgtctngtccgctgtcgctcgtntctcgncacgaccccgcgtctcttagtactgcgctgtccgttcggtgtgtggtcgcggtggtatctctactgctgttgtctgtgtntctantgtcggatncgcgcatctatgnttcagctattattctatcggtgcagctgcagacatcgtgtgctcgacccatacatagtattatgcatctgcgagcgtgtgtggcgtgtgtgagtgcgtgctgcgtgcntcgctcatcgtcaccgcgttgctttcgccgtgcggcgcgtggcgtgctccgacgcgtgccgtcgatgcatcttcgtagtcgtcatctgttctcgtccgtccgtcctgccggccgaaagatgggatcgtctcatacggctcattgcgtctttcgcttttctcgtcctctccgccgtaggcggtcgtcggccgcgtcggtcagctgcggtgctctgacgcgtgaggcagctgatggacgtgcggggcgagcgtgtggtcgttcagctacacgctagcgaatacgccacatcggtcgagcggcgttggcggtgttgcgcgtcttcccgattccggcatcagcagcacgcgcggtctgtgatacgacgccatcggtcagtcgcccgccgtcgcctatctcaattactctctatccgcgactctatccagttcgctgcctacgcgggcgatgcgcagcggcgtattctctcgtctattcgttcatttcttcgtcacaatcattctttgaatttcgtctcacctcacctttcctccgtgcgacncgtatatcctncctcctactccccttcctcgctctctcgctaccttgcttcttgtgtcgttgttcgcctctgccctgcgtggtcgcccccggccctgcgtcagccgcccatcacttactcctgtaataacacgataagaataatatactcacgagtgaacatacatttggtgcgttggtgattgttcggtcagttggtggtccgtctcggggtgcggcggtgcgtgctcgcgttgtggggctttttttttgttgtgttgtgttgttaggatgtggctcaattacgcggagacgcagcacagcgagcgtgggtggatccgcgcgtgacagcaggcggcgcgcgacgcggtggcggggcgggtcggggcgggtggtgagaggtgtgttacgagtgttgtttgaggtagtaatttatctcaccacgtgtttttgacgtcgacacggcggagccgctcgtccgtgtgcggctagaacagcagcgactacgnncaccncnntatttttatgctatattttattgatggtgggtgtgtgggcgntgtggttgggtgtgttggcgtgcgtgtaggggttccggcagagaggggagcgagaggagagggaggggcaccccca

SEQ ID NO: 2083 - DNA, 559 bp, Glycine max
  misc_feature (324)..(324): n is a, c, g, or t
  Probeset Number=SeqID_11862
tttccatgctaacttgttgcttctgctgctaatagttggttgtcatgctcaacttcgagttgattactacgaaaacacatgtccaaatgttgaatcgattgtacaaactgcggttgagaagaaacttcagcagacatttgtgacaggtcctgctacacttaagctcttctgccatgattgtgtgattaggggatgtgatacatctgtgatgctagctacaagaaacgacgcatcggagaaggataatgctataaatctttcactagctggtgatggattgaacactgtgatgaaagccgaaggtacggttgacaatatacctgnctgccatagtaaggttgcatgtactgacgtattggcatgaacaactgaacacatcgatgcattagcagaaggacgatcgtatgcagggcagttgggaaggctggatggaagactcgcagcaagagccggtggtaggaacgatcgaccgcatgctgaatggaagctagacagctaggccgagtgtgtgctgcacgatagactgggactgacagatctggttggtgtgtcagcagca

SEQ ID NO: 2084 - DNA, 583 bp, Glycine max
  misc_feature (538)..(538): n is a, c, g, or t
  misc_feature (551)..(551): n is a, c, g, or t
  Peptide Sequence Number=SeqID_9624
  Probeset Number=SeqID_11863
tcagctacgtaggcccccccccccctcatcatcacaaggttggtaatgaaacttttaattctaagattaaatctgatcaaatatcttttgagaatgttaagaataaatttcattattttccccattttgcattttattttgtgacattttgaacttattaggaccctagtttcaaccactctcactcacactaattgttaataggatggagtcattaaatgtcattagtgttctgttctagaagcaatatatcaccactgcttataaatttattgcaatgtcaaaaaattcatgcttccaaactatgttaggttacaaattgttttattaaataatgtagttcaacattttcacttgatactggaaaagctgagagtcctagacaaaaagagctaatagttacatatcaagtatgacatcgacttagtttcatgtttgggaaatagaattttacagtctgccaaacagcataagtactcctagcagctggaagatgtctgatttttatcacaacagggcctgtttgcaatacgtttgngtagaaaatttgncatgtgtcttttttctccctctttggcatgag

SEQ ID NO: 2085 - DNA, 1766 bp, Glycine max
  misc_feature (189)..(189): n is a, c, g, or t
  misc_feature (1200)..(1200): n is a, c, g, or t
  misc_feature (1294)..(1294): n is a, c, g, or t
  misc_feature (1430)..(1430): n is a, c, g, or t
  misc_feature (1619)..(1619): n is a, c, g, or t
  Probeset Number=SeqID_11864
tactgcgtgtattccgccgctcctgttattgttacggtacctatcaccagtactaacgtttcacttgactgtatttggaggtcatgtgggcgcctccgtggtagtaagggcagtaggaagatatgttaacatgcattcatttaatttatttattgtaatattattatgaataaataatatatacttcancttatttcttgatacaccagactaacccgcgagtcggtacgactagaggactgcggctcccccaatctgtcttttattctgtgttctgtcccttccatcctattgaaaagcaacgctcgctgtcgtttccgccggtttagggccgcggagcttgatctaggggctatgattcttcgtacgcctactctcgcagattttcaggtgccccaccatctggcttgactccaaccgtcttagttctgcgaccaccaaagagtggactagatcacctatgtattccacatcgacagaagctctcctccgctcatgtacattgtaatctcatatataagtcaagacatcgtaaatacagctaaggtgcaacctgctagccggactggaattgccccgtctgaatatgttctcatccgcccccggagcctttgtcatgtgcgacgctgagtattcctcttatatatcatatcccgcggagggactgttgcagccccgcccccactgatgtgagatctatagaatagacattgctgactccacgaggttggagactatagtggcctgcagcacatgcgctgttatgtattgtgtaccgcttttgctctacgccgctcgcgctaatgctgccagctattctaaaagatacatagtatgccgttatccttcgtgcttggttctccgccttggattatattcacgcttcacttgtgcgcatctatccaatatagaatactgtctggcgacaagttattagatgatatcgcaatattatctaacctctgtctcgctcatatccacctctcttgatgcatctgaatattcacttctaatacatctacctctaacacgctctagcacactattcacatcctatgcatcatatccaaccattattactacctcacggctcggatacgtcaactctcgcttgaactctgcggagtcccgtgaaatgctatgccgtgattgcagtggatggagagcacacgaggatgttcgagtgctgtgcgacgtatnttcgatattagtatgttgtctagatcagagctatacttctactaatcgcagtcgatactcacactagacacgccgcgtccgcaccgaattctanacttgtatctctgcgaagatcatctgatgacctcgtctggttactccacatgagtacggtgcgctaaactgtactgtgtcccatgctactgatgagtgcggtctctctactgcacatccatcgatgtagtactgtntccgatacctattatcacatcagatgcaccttgctacgtagctgctgcactggtgtgtgtgtcgccgacctgtcatcaaactgctgcgcgtgtatcttctgctgctgcgatccctcacgctctcgcgctccagtgtctgatcgtatgatgcgcgaactcaactcgacgctagcgtcgacggacgtcgangatgtgagacgacacgatgaatgtatgttgatcgattgagatgactctgcttcagcaggtgtcgctgtgtattacgtcatttcactgtatacgcgcgatcgcttgagatactgcgatccgagatacatgcgtacattgcgttaactt

SEQ ID NO: 2086 - DNA, 494 bp, Glycine max
  Peptide Sequence Number=SeqID_9625
  Probeset Number=SeqID_11865
atcgatccagatagagagaggacagcgatggcattgacggtggcgaagagtgcgttggaggcgatcagagagaaaggtctcggaggtttcctcaggatgatccgagaagaaggctttctgagatgtctgccagatgggaacctcttgcaaaccaaaatacacaacataggagcaacgcttattggtgtggacaagttcggtaacaaatactaccagaagctcggcgatactcagtgtggtcgacacaggtgggtagaatatgcatccaaggatcgttacaacgcatctcaagtgccagcagaatggcacggatggcttcatttcatcaccgatcacactggagatgagctgttgagtcagaaaccaaaaaggtatgggattgagcatagagagaacttctctggacatggtgatgcgtacatttaccattctaaaggacataccttgaacccggggcaaaagaactggactcggtacaaccatgggtcccacca

SEQ ID NO: 2087 - DNA, 480 bp, Glycine max
  misc_feature (456)..(456): n is a, c, g, or t
  misc_feature (474)..(474): n is a, c, g, or t
  Peptide Sequence Number=SeqID_9626
  Probeset Number=SeqID_11866
ccctctctctctctctctctatcgtctctcggagatattactcagggcgttcttctgtggatcaaagatgaatcaatacaacgccttcgtgtctcgcgaggagatgatgggacttgatcgcagcaacgatctcgtcgtttgtcctaagcctcgacgtgtcggcgtactcgctaacaacctcacgcgccctctcagattacatatgagtcaagctgctgctgatttgtgtgattctgaagctggtgcagagcttttagacatcattcgtagaaaggaggacaatggtacaatagggccgtactttctcggttcgcctccgagcagagcagcgaacccattagcacaagacgcacgctttcgagacgagaagatcaacccactctcgcccaactctcctttgcttcagcccaattcatccaccgcctttccttctccatctccatcatcgtctcgtgnttgcgttaggatgaagtntggact

SEQ ID NO: 2088 - DNA, 1443 bp, Glycine max
  misc_feature (23)..(24): n is a, c, g, or t
  misc_feature (30)..(30): n is a, c, g, or t
  misc_feature (34)..(34): n is a, c, g, or t
  misc_feature (46)..(46): n is a, c, g, or t
  misc_feature (58)..(58): n is a, c, g, or t
  misc_feature (64)..(64): n is a, c, g, or t
  misc_feature (87)..(87): n is a, c, g, or t
  misc_feature (130)..(130): n is a, c, g, or t
  misc_feature (149)..(149): n is a, c, g, or t
  misc_feature (498)..(498): n is a, c, g, or t
  misc_feature (576)..(576): n is a, c, g, or t
  misc_feature (578)..(578): n is a, c, g, or t
  misc_feature (615)..(615): n is a, c, g, or t
  misc_feature (631)..(631): n is a, c, g, or t
  misc_feature (671)..(671): n is a, c, g, or t
  misc_feature (742)..(742): n is a, c, g, or t
  misc_feature (768)..(770): n is a, c, g, or t
  misc_feature (772)..(772): n is a, c, g, or t
  misc_feature (815)..(815): n is a, c, g, or t
  misc_feature (836)..(836): n is a, c, g, or t
  misc_feature (860)..(860): n is a, c, g, or t
  misc_feature (865)..(865): n is a, c, g, or t
  misc_feature (868)..(871): n is a, c, g, or t
  misc_feature (877)..(877): n is a, c, g, or t
  misc_feature (882)..(884): n is a, c, g, or t
  misc_feature (889)..(889): n is a, c, g, or t
  misc_feature (893)..(893): n is a, c, g, or t
  misc_feature (897)..(897): n is a, c, g, or t
  misc_feature (899)..(899): n is a, c, g, or t
  misc_feature (924)..(924): n is a, c, g, or t
  misc_feature (927)..(927): n is a, c, g, or t
  misc_feature (953)..(953): n is a, c, g, or t
  misc_feature (959)..(959): n is a, c, g, or t
  misc_feature (961)..(961): n is a, c, g, or t
  misc_feature (963)..(963): n is a, c, g, or t
  misc_feature (967)..(967): n is a, c, g, or t
  misc_feature (976)..(978): n is a, c, g, or t
  misc_feature (987)..(987): n is a, c, g, or t
  misc_feature (1016)..(1016): n is a, c, g, or t
  misc_feature (1031)..(1031): n is a, c, g, or t
  misc_feature (1043)..(1043): n is a, c, g, or t
  misc_feature (1046)..(1046): n is a, c, g, or t
  misc_feature (1057)..(1057): n is a, c, g, or t
  misc_feature (1084)..(1084): n is a, c, g, or t
  misc_feature (1086)..(1086): n is a, c, g, or t
  misc_feature (1107)..(1107): n is a, c, g, or t
  misc_feature (1144)..(1144): n is a, c, g, or t
  misc_feature (1162)..(1162): n is a, c, g, or t
  misc_feature (1164)..(1165): n is a, c, g, or t
  misc_feature (1175)..(1175): n is a, c, g, or t
  misc_feature (1186)..(1186): n is a, c, g, or t
  misc_feature (1203)..(1203): n is a, c, g, or t
  misc_feature (1215)..(1215): n is a, c, g, or t
  misc_feature (1228)..(1228): n is a, c, g, or t
  misc_feature (1237)..(1237): n is a, c, g, or t
  misc_feature (1243)..(1243): n is a, c, g, or t
  misc_feature (1258)..(1258): n is a, c, g, or t
  misc_feature (1362)..(1362): n is a, c, g, or t
  misc_feature (1364)..(1364): n is a, c, g, or t
  misc_feature (1367)..(1367): n is a, c, g, or t
  misc_feature (1376)..(1376): n is a, c, g, or t
  misc_feature (1382)..(1382): n is a, c, g, or t
  Peptide Sequence Number=SeqID_9627
  Probeset Number=SeqID_11867
gttgtgtgtgtcgccgccgcccnncgccgncccnacctctcacgangttcgtgaaggncatatncatcttagtatatttatataaanccacgaactttgtgtgcaccagagggcgcctcctccctcaccngggccttatctatatcatnagaggcccgcggtccgcgctattataatattatctgctatgttgtagcacaatcttctcgtctccgcgctcgcactacgcacgggggtacgtgtggtgggcatctacttcttgtcaccacacaccacagtatgatagtacgtcgttatgcgtaggacaaatgtaagtcatcccctgggagttgtatcttatttataataatatccctgtggcggcgattactatgttacactttggcttgtggcgattaatttaataaataagacacaccgacacatagttacctctatgagataaatatatgttatatcggattgtatatatagatgctagtgggttatagtatttantaaggtaatacacgcgcctggcggcagcgtgcgcgtcgacacagccttaggtatatagatcgcacctggtgactatantntcgcaatagtcatcctaccgtcttgtatatgtttcgntatgttgtgtcatacnctgcggtccgtcgcggcgtgagatcgaaatgctagaatanttagggatttaatatgatacgagacgagcgagaattaggagaagggtagtaattgatagatatatgatganatgataatgaagagaatcacagcaannnanaaaaccgacacgcccccgccacaacgccgggtgaggtggtggntggtgggttgttggtgattgntgtagtagtagaggttatgaaaanacacnaannnncccctngtgtnnnccccnacancaanantccgccgtgagttatttgcttgttnaantctctaactgtgaagagccattaacncatccntntnaatnactttctcnnncatcgctancagacctatacgacacatacactcttctncgtcacacaagatanggtcagatcaanttnatataccggantagggcgttcgatctcatctcggtcgngntgtcatactatctcgactatnatcggtattcgtgacatggcacaattactactatatnatgttatagcgtaatatntnngcggtatgantatctttgttnattacgatgcgcatgangattcgttacgngatacactaacgntcgctggcngtgatntgtctgtatagtaantgacttgttctatgatctgagcgaatcagctgaggcccacatcctgttgacgacgcatcgatgcttcgtcgcgcggtctcgcagtcctgcgcaacacacaggcncncancgcggtgtncgctcntccaccaccctgttatcgccttcgatgtcattccactcttcgtgctctactcgcgcgcagc

SEQ ID NO: 2089 - DNA, 523 bp, Glycine max
  Peptide Sequence Number=SeqID_9628
  Probeset Number=SeqID_11868
tggtcacccctggcacgacttatacattgggccacgagctccaccaataatccactgtgagggtgaaattgggaaaggaagtaaagttaagtatgaactggacaagacaagaggacttatagaggaagatcgtattctttactcatcggcagactacccacacaagtatggaattatcccgataaccatttgggaagacagtgatcctatggaagagctggttctaatgcaggaaccggagcttactggttccttccaacgtgctcgagctataggactaatgcctaagattgaccggggagagagggatgactagatcatatcagatagtgctgatgaccctgacttccgatattacacagacatcactgagcttcctccacatcggctcgctgaaatcagaagatactgtgaggactacaagaataatgacaacgctacagatgatgttggagactatctaacatctgaaactgccattgatgccatcaaggactcgatggacttgtatgctgcttacata

SEQ ID NO: 2090 - DNA, 448 bp, Glycine max
  misc_feature (422)..(422): n is a, c, g, or t
  misc_feature (424)..(424): n is a, c, g, or t
  Peptide Sequence Number=SeqID_9629
  Probeset Number=SeqID_11869
cgccaaccaagctctctttgctggtgattccaggctgcacaaacccctgcgtattttcgggctttttggtactccaaatgcagaggtgtggcctggggtgagtaaccttaaggactggcatatatacccccaatggaaccctaatagtctgtcaacggctgttccaggcttgcatgagcttggccttgatttgctatcccaaaagttggcaaatggaccttcccagaggctttgtgcaaaggaagcaatgggacatgcttgcttccatgacctggactaggggcatctttagaaagacaaattattgatctatgcttctcttgagcggtggatcgttttaaaccaataaacatttacgggtttacttttcatatttgtggaagcaaaaagttcttaaaagcccccggcctttctggtccggngngggggtaatataaaaaggttgaaa

SEQ ID NO: 2091 - DNA, 576 bp, Glycine max
  misc_feature (544)..(544): n is a, c, g, or t
  Peptide Sequence Number=SeqID_9630
  Probeset Number=SeqID_11870
ttttttttttttttttttctttttttttttttttttttttttttttttttttttttttttttttttttttttttttttttaaagggttaccaaaccacatattttctaaaattcccccttttgaggaaccttgtataaaaccaaaaaaaggggatgcggttccaaaaccccggggtgaaaagagaaaacttttaggggaaaaactaaaaataaataaataaataatacccctagcaagggaaacaaaattaagccccaagccccctgaagagggttggccaaaaagggactgcaactggggccaaaacatatgtccaaaggatgaaaacaaaaaattccccttcaccagctccaaaaaactgggggagggggcctataacctttggggggggaagggcattttgaaggagaaacccaaactggatacaaggggatctgggttgcccccaaaccccaatttggggggggccccccttaaaaaaaggggaaaccccccaaaggggggcggggaaaaataattttccacaacattttaatttccccnaaaagggggcgccaaaaaaaaaaattttctcc

SEQ ID NO: 2092 - DNA, 1726 bp, Glycine max
  misc_feature (28)..(28): n is a, c, g, or t
  misc_feature (84)..(84): n is a, c, g, or t
  misc_feature (99)..(99): n is a, c, g, or t
  misc_feature (137)..(137): n is a, c, g, or t
  misc_feature (286)..(286): n is a, c, g, or t
  misc_feature (315)..(315): n is a, c, g, or t
  misc_feature (414)..(414): n is a, c, g, or t
  misc_feature (464)..(464): n is a, c, g, or t
  misc_feature (590)..(590): n is a, c, g, or t
  misc_feature (644)..(644): n is a, c, g, or t
  misc_feature (649)..(649): n is a, c, g, or t
  misc_feature (709)..(709): n is a, c, g, or t
  misc_feature (742)..(742): n is a, c, g, or t
  misc_feature (749)..(749): n is a, c, g, or t
  misc_feature (778)..(778): n is a, c, g, or t
  misc_feature (856)..(856): n is a, c, g, or t
  misc_feature (858)..(858): n is a, c, g, or t
  misc_feature (860)..(860): n is a, c, g, or t
  misc_feature (911)..(911): n is a, c, g, or t
  misc_feature (1102)..(1102): n is a, c, g, or t
  misc_feature (1388)..(1388): n is a, c, g, or t
  misc_feature (1536)..(1536): n is a, c, g, or t
  misc_feature (1538)..(1538): n is a, c, g, or t
  misc_feature (1583)..(1583): n is a, c, g, or t
  misc_feature (1635)..(1635): n is a, c, g, or t
  misc_feature (1650)..(1650): n is a, c, g, or t
  misc_feature (1657)..(1657): n is a, c, g, or t
  misc_feature (1665)..(1666): n is a, c, g, or t
  misc_feature (1669)..(1669): n is a, c, g, or t
  misc_feature (1678)..(1678): n is a, c, g, or t
  misc_feature (1681)..(1681): n is a, c, g, or t
  misc_feature (1686)..(1690): n is a, c, g, or t
  misc_feature (1692)..(1694): n is a, c, g, or t
  misc_feature (1696)..(1696): n is a, c, g, or t
  misc_feature (1700)..(1700): n is a, c, g, or t
  misc_feature (1702)..(1704): n is a, c, g, or t
  misc_feature (1716)..(1716): n is a, c, g, or t
  Probeset Number=SeqID_11871
ctctctgctgcgtatacgtctgatgttntacactatctgtcgtgtgttgggtgtgtttatagttataacatatatatctatatnattctattgatgctngttatctggattcatcaacagtctgatcacatgactantctgtcgtggtatgtacaatgtgtgtgctcggtatatatgtatatgtacgatccacgagctgttgtgcaatcgaagatgttcgtaagcaatagaacgtgagatagagaggatatctacgcatgaccatcgtctcaatatgagtgtcacnatctatctattcgtgtaacatactgacgnctatattctcacgtctttactcgctagatcccgtgtatgcatgagtgcatgtacgaacatggcacacacgggcgagccgctgcttcatatctataactngactcgactcgtactatattgcgcataataaacgatgtctaactatcatngacatgttgtaaaggttgatatgatatcaatgatatctattagtacaagtgagcacttgatatgatgctaaactgtcatcatatgtaagtgaatgtagatcagatatatagtgacgtgatagtganagcacatcacatatattgtaacacatatgatcacacagagatacccatctctanacacntatttgatagagtagatcataatgtggagtagttttgcgaggtggcggttgcgagtgtgnagtggggatgtgtgtagaatatgggagagatgnagagcgngactgagcggtacgtcggggcgagcgtcncttacgagtgcgggatagcgctacgaggatcgtacatcgtctacgcgtgcacggccgtgctgatgaagagatacgcancngnctactaagacatctgagccgcaacgcgtcactctcacactagtgtagcgtncaccatcttaatcgttgccccgtacgtaggatctctgctggttcgtatgccacagcggagtaatctagcagagtccgcagtacacatctttacacatcacctcgatctgcagtgcgacgtcatcttcacatgttgctacacacagatgacgctgacacgcgccgaccaagagatcgcggaggagaacatanaacacacagtatgagcgcaaagcgacgaagcaccacacgcgcgcgcggacacatgaacacacacgacaacaacacaacacattacgagaataacagatataatacatctcacgagaacatatggagataaaagtgatgagtgttaataataactacaacgagaggacacaattaggcggatgtcgtgaaacgcaggcgagcgcacctaaggacgcacagcaacctcgaagataaacaccacaaacgacacacaatatacacgccacgctagcagtatatacacgcnatagctatccacaccagagattacattatcacctcgaccggccataataaccagagcagcgcagtatatattctctcatattatctttattttgtgatctcactacctggatcgatagctcactatctaccgagtgacgacactagtntngctgtcttaatattctactattaccttccctctctctcatacaanactctttctcatctcttccatataactccgcaagatgacgactgtaattatntcttagtggtgtctntttctgnctgttttnnttnctttatttnttnttttnnnnntnnngngggntnnnggagaggagggngggaaaaaaa

SEQ ID NO: 2093 - DNA, 1287 bp, Glycine max
  misc_feature (1)..(23): n is a, c, g, or t
  misc_feature (1050)..(1050): n is a, c, g, or t
  misc_feature (1098)..(1098): n is a, c, g, or t
  misc_feature (1102)..(1102): n is a, c, g, or t
  misc_feature (1105)..(1105): n is a, c, g, or t
  misc_feature (1123)..(1123): n is a, c, g, or t
  misc_feature (1128)..(1128): n is a, c, g, or t
  misc_feature (1134)..(1134): n is a, c, g, or t
  misc_feature (1139)..(1139): n is a, c, g, or t
  misc_feature (1145)..(1145): n is a, c, g, or t
  misc_feature (1154)..(1154): n is a, c, g, or t
  misc_feature (1161)..(1161): n is a, c, g, or t
  misc_feature (1171)..(1171): n is a, c, g, or t
  misc_feature (1198)..(1198): n is a, c, g, or t
  misc_feature (1200)..(1287): n is a, c, g, or t
  Peptide Sequence Number=SeqID_9631
  Probeset Number=SeqID_11872
nnnnnnnnnnnnnnnnnnnnnnngtggttcctctagctgcaaaggattgtgcagaacagaatgaacaacttgagatgaaagttgactcagtagagatattgacttgatggtcaactatatcaatggggttccagtcaaaactgcaggttctcaacatagcaatgcacctgatgtcggcccctctaaattcagtgagcaaattaatagaggacaactggaccttaattgtgaaaatcaatctagcaagctaaggtgcaaaggtttatcactgtctgatgccattactagtacttgtgattctcagatgcatagtggagaatttgaagccctaaataaaaaacccaagtcctcagatattgaaaataaaggtactaataatgatgaagaattgccatctcttgagctcagtttaaagaggcttagaggagttgaagatgctgatattacaattcaggatgaccggaatgttttaagacgttctgatcagtctgctttctcaaggtacaatgcagcctctaacactaagaaatctcccactggatgtgttggaagcaattctccttataataatagcttagaagttacaaagaaagattcatctcgtgatattcaatctcattcttgcggcaatcctcctaaccaaaactcaaatggtgctagcaataacattgatatgggttccactactaataatgcttatgctaaatctgcagttatgagtgagccagcaggggcatcaacaacaaaatgtttgtaccaaacatctgctttccagcctgtaaaaaacagccttgtttgtacctctcaacaagttgtcttaaataatactgaagatatgtcggcaacaattctggcaccacctaaactagacagacataaagattctgcagctctggacttccatctccattgtgaaaaccatactgattgctgacacatgaagcatcagctgcacctgatcatgagctgatctataaagaaatggcttctgtgctccattggggatcatcaacgggaaaagtgtagtgaagtatgtggaacccagttcanttagagtgtcagcacacatggagcttggcaatggacatccagcgtatnctgnggnaacccgagacatggtccntgganttgcanggatnttggangaagcccanataaaanaacttcaggnaggctaatattgccaaaaaaaaggggntnnnnnnnnnnnnnnnnnnnnnnnnnnnnnnnnnnnnnnnnnnnnnnnnnnnnnnnnnnnnnnnnnnnnnnnnnnnnnnnnnnnnnnnn

SEQ ID NO: 2094 - DNA, 1499 bp, Glycine max
  misc_feature (289)..(289): n is a, c, g, or t
  misc_feature (448)..(448): n is a, c, g, or t
  misc_feature (543)..(543): n is a, c, g, or t
  misc_feature (755)..(755): n is a, c, g, or t
  misc_feature (946)..(946): n is a, c, g, or t
  misc_feature (1020)..(1020): n is a, c, g, or t
  misc_feature (1072)..(1072): n is a, c, g, or t
  misc_feature (1221)..(1221): n is a, c, g, or t
  misc_feature (1236)..(1236): n is a, c, g, or t
  misc_feature (1272)..(1272): n is a, c, g, or t
  misc_feature (1326)..(1326): n is a, c, g, or t
  misc_feature (1421)..(1423): n is a, c, g, or t
  Peptide Sequence Number=SeqID_9632
  Probeset Number=SeqID_11873
actaccgttaatggagcagagatcgtgagttatacattatagtaatgggtagtggtacaagcaagcggagttcgtaagcgcgatgtcttgttgatatgtaatttgagggagattactcagacctagtggtgaatgtggatgttcatctactaccactctgtctgaggcgctgtatgcggtatttgttgtctcgtcgtgtcggtttcgactttcccgtcttgtgttgttcgtcggtctagttcgagacgtctgctcccgttgagccgtggacgaccacgagcattatcgntgatgtgatttattcagagcgtgcggctcgcgcataatacaatctctactttactcacgtgtgtgtgatgatggtgcgaggtgtggtggtctacaacaatatcttgcgtgcatcacgagcgacgtaagtgcgacatcatgtcctttcatgacgtgttcngtcgcgggcatgtttgttgtgtatctctaagatattatgattctcagtataggtaatgaatcatctcatcatgagagtatagatgagagcagttncaggagcgttatatcaacaaagactgaagcactaaatggctgcgtgaccagagtttctcatactaccttctatcctcataatgttgtggatcattacacaagtcggcgacactctgctcgatgtatatcatgatctatctgttgggagtgagatcgttattatattggtgtggtggctgttcggttggtagtgtgtgtgtaattagatgagngagaatgggaagagtggtgcatgagggtatgagtataataagaaggtagagatgggagcaacaacaaagtcgaggcgactaacaagggagtgacaagaatgatcagacagagaagcaggggagagagaagtgaatacgtagcaattgtctatataacgaatatatttgggcggtttgtggtgtgtggtgtngtgctaccttcgttccctcacttcacgtcctaccgcggaccgaccgcggcagattgcgatgtacgttggcgtgngcggcgacgacacagcgggcgatttcatgtgttctcttatttattatacgcnattatcttatgtttaatttcagcatgtctcctggagagggctacggaggcgtgatgatgaatgttgcattattcatcaatcatcgttagacatatatgctgggtgtgtgagcgatcgataatattacagaagtgtgactagatagagcncactcacacggaacncgtcttgttataatatatagagtatagtatatatcntctggcgttattcggctgctccgcatatctgtttccttcggtcttctgttccanttttatttattcctgtttcatcgggagggggggagggcccccctccaccactcgggttatactttatcagagtattcatcctatatttattctannntatatgtttagtgtagaatcctcttcttctcgcctcgtctaataccacaaacacattcccctacgctaccacatta

SEQ ID NO: 2095 - DNA, 1287 bp, Glycine max
  misc_feature (297)..(297): n is a, c, g, or t
  misc_feature (1173)..(1173): n is a, c, g, or t
  misc_feature (1178)..(1178): n is a, c, g, or t
  misc_feature (1216)..(1216): n is a, c, g, or t
  misc_feature (1242)..(1242): n is a, c, g, or t
  misc_feature (1271)..(1272): n is a, c, g, or t
  Probeset Number=SeqID_11874
attgttccagaaaccggggatggacttcatgcttttctcttggaagtttttagggggataagaaaggaaccttcattttaaacctgttattgttgaacataaagttcctaactctttgtaattttcactggtagactcagtcgccggggctgatgatgtcatgactcatcttggagtcctttcacattggggatgttttgcagcttcgtttagacaacctgatgggtgttcatctccggagggggccggtcacataactaggctagctcaaatgattccttggattcaaaatgccancaatttttggaacttggggattctgttcttatatctttagggggaggaaattcaaaaactaccagccaagaggtgcagttcatccttaccaacaaaccaaagttgatctatgggaccccatcaaagctaattgtgaaggggaaatataatatggtctgataatccaaatgatttaagcatccaagtggctagtccatcagactccaagacctgcgcacctaaaaagcgaatgtcgtttgaggacgcacagcacagagcatgccagtccggaaaaaggccattgaaggactccgaaaccggtgaatttattgctcgctttgtgaacatattcttttacatatcctcttattgctcagcaagaagggataaaacagttgactgctcaacaatcaattattcattaacagaaaacaaattggcagatgttgctgaagctggttctagctaattcctcaacacaccttaattttgtgatgagttcttccgtcctctttcatgcttcgaagggatgatcacatgagcaagatctacttgtacctatgccagaggatggagccaatactttgtaagacaaataattgggttgtttagctatatcttaaatactatgagttggaagatgacatcattattggttgtcataatgaatgactcgatgacttgatcactatattgtttcttcgtttatataaattttattggtcatacatgagagcttaatacgagttcctgcagcccgtaggactcactacttcaaaagtgcccgccaccgcgatgaagcctcagctcttgtccctttagaggaggtaagtacaagcgtgacgtatcacgggcatactgatcctgtgcgactgtatccgtcaatgcgactcaacnaacgnagctaagtaaaaagctggagcctatgagaactacccantaatgctgcgccctgcgcctcatcgntacgtccgccactgatagacgcacccccnnaaggaaggttttttc

SEQ ID NO: 2096 - DNA, 1547 bp, Glycine max
  misc_feature (22)..(22): n is a, c, g, or t
  misc_feature (24)..(24): n is a, c, g, or t
  misc_feature (37)..(38): n is a, c, g, or t
  misc_feature (181)..(181): n is a, c, g, or t
  misc_feature (191)..(191): n is a, c, g, or t
  misc_feature (193)..(193): n is a, c, g, or t
  misc_feature (337)..(337): n is a, c, g, or t
  misc_feature (365)..(365): n is a, c, g, or t
  misc_feature (460)..(460): n is a, c, g, or t
  misc_feature (695)..(695): n is a, c, g, or t
  misc_feature (767)..(767): n is a, c, g, or t
  misc_feature (800)..(800): n is a, c, g, or t
  misc_feature (803)..(803): n is a, c, g, or t
  misc_feature (937)..(937): n is a, c, g, or t
  misc_feature (986)..(986): n is a, c, g, or t
  misc_feature (1426)..(1426): n is a, c, g, or t
  Peptide Sequence Number=SeqID_9633
  Probeset Number=SeqID_11875
gaaaagcattctgggaattacncncacatcacgcgcnnctaccctcttgtacagcgtgtcgtccgtacgtgcgatatcacccccacccacctaaatatacacgtgtgtctcccctcgcaacgcggggcgtgaggcgagggcgccctcattgaacatatacttgggtatctcctccccgcgngtgccagacngnagtacaaggagtggataactgcttaattaatatcttgttactcaacctactcaccagagtatctccctatcacgggagtgtggaccatatgcttcactctctcccccacctcaattctctgtctcgttctccactcaccccacntctcatactctctcgcataccctcctcnccctatactccactccccatagctaatagattagaccgcgtactttcctcacgccgtcctgctcgccgtggtcatacacacaagtcatgctggcngcgagcaaaatcacgagctgacctaggtcgagcgaatactccgtgcatcatatcatctcgcacatcgtatacatcatacacacaccctcctccggctcgcgtcaccgttcctagtttcgtccctctaacccaccatcccatactccactatatgtagtccagttcctcatcgcttccgccgattaacatccatacactactctagtaccactctctacatccaaattactctccngattagaacagcgccgccttatactatactataataattggtcatatggagagccgagacaactattataanatagaaagaaaaaaagaaaagatattaattaangtnataacaaaataataaatagatataacaaaaccctccacaatacagacggaggcaaacatagatctcagacaagtaactatgtgtgactacctggtctgcctcccgccacccctccacacagcatcactctgtantgatcgggacaccacaatctggccgtgatatacgccacaaatataacgnggtctactcaaatctcacgtcctcctctctactcacatgtctccgctcatactatattcatcctcaccccacacgacaacacctccatgaacctacaaaacataatatctaaccactcacccactccttactccacttacacacgttgattctctgcgatgcgtacacccctgacacaacaatcacatatacacatgagatataatatcacactacgcctacacacgtgagcctctctctcattccaaaatcatatacttcgtgttgcacgtacatcatcttctctgtctatggcgcagctctacactctcaacaaccataactagttctatggtagcctactgggaacgatacgacatccctcatatacatgaccgcgtcatatcactctatttatgtcacactctactctcgatgtctgctctctataattatcatcntctatatatcagtacatcgtgcggcacaccactccaacatatgaggaggatcacttgagggaggcgacaacacctatactcgcgcctgtacagaacaccgactcctatcgatatcacacag

SEQ ID NO: 2097 - DNA, 532 bp, Glycine max
  Probeset Number=SeqID_11876
cagaattggatggggttcccccgggaatttggttttttttccacatatcccccggagggttttaaccatttttccttaagggtggtttttgtattatgggtaatttgatttccggggcttggaaaggatggggggggaatgatagagcctgttctggccccaaccccagaaaatagggccgggcttgggggtccacagaagaagttgggtcctaaccctggggggcaggcagggggccgtttcaagattctttttcataaaaaaaccccttcccggttttgggggatgtccgagagtttaggtttgagccccgtatatagggggtagctttgataaaaatattatttagaggttttttcaaaattttttttggaaaccctagttttcccgggcaattttgaatttccttttttggaaattagtcaacatgtcaaattttgccccaaataagcaagatttttgctttgggtggaaaaaaaaaaaaaaaaaaaaaaaaaaaaaaaaaaaaaaaaagaaaaaaaaaaaaaaaaag

SEQ ID NO: 2098 - DNA, 729 bp, Glycine max
  misc_feature (372)..(372): n is a, c, g, or t
  misc_feature (392)..(392): n is a, c, g, or t
  misc_feature (403)..(403): n is a, c, g, or t
  misc_feature (409)..(409): n is a, c, g, or t
  misc_feature (413)..(413): n is a, c, g, or t
  misc_feature (418)..(418): n is a, c, g, or t
  misc_feature (445)..(445): n is a, c, g, or t
  misc_feature (539)..(539): n is a, c, g, or t
  misc_feature (564)..(564): n is a, c, g, or t
  misc_feature (586)..(586): n is a, c, g, or t
  misc_feature (599)..(599): n is a, c, g, or t
  misc_feature (609)..(609): n is a, c, g, or t
  misc_feature (622)..(622): n is a, c, g, or t
  misc_feature (643)..(643): n is a, c, g, or t
  misc_feature (648)..(648): n is a, c, g, or t
  misc_feature (651)..(651): n is a, c, g, or t
  misc_feature (658)..(658): n is a, c, g, or t
  misc_feature (661)..(661): n is a, c, g, or t
  misc_feature (665)..(665): n is a, c, g, or t
  misc_feature (668)..(668): n is a, c, g, or t
  misc_feature (673)..(673): n is a, c, g, or t
  misc_feature (680)..(680): n is a, c, g, or t
  misc_feature (688)..(729): n is a, c, g, or t
  Peptide Sequence Number=SeqID_9634
  Probeset Number=SeqID_11877
gaatataaattttctaaattatcctttttcactataatcctttccctcctaaatatctatgttattacgcaacctcacctcctccttcctcaagttccaaccaaaaacacagctatatgctcctctttactacttcggaggagttgaaaaacatgaaaagatggttttaaccttaaagactcctaataaagttatacttcaagactttaccgatttctacagaattatcacaaggaccaagagcggttctctagttattcagaacaagactccatcatgctatcatgagcttcctgcaggcactgttaagataaagatgaccgatatatatgatggaaacccagtagaatacattcacaatggtggcgctgntacagtgtcgcggataactnttgggagatanacttgntggntggcnaaaagaagaagccagagggtgatccantaaaacaataaaagaatagataggcttaaaaaaaccgagctaagagttattgctcgtggatatatatacgaaagcacattttaattgattattnggtaaattcgtatatggacttactnatcctattcatctatattctcnacctatgggtatncctcctatantaaaaaaaaaaanaattctgcgccggggaccctnttctnacngcgcccncgngacntcncttgnccttggnggtattcnnnnnnnnnnnnnnnnnnnnnnnnnnnnnnnnnnnnnnnnnn

SEQ ID NO: 2099 - DNA, 1552 bp, Glycine max
  misc_feature (1)..(1): n is a, c, g, or t
  misc_feature (47)..(47): n is a, c, g, or t
  misc_feature (60)..(60): n is a, c, g, or t
  misc_feature (66)..(66): n is a, c, g, or t
  misc_feature (104)..(104): n is a, c, g, or t
  misc_feature (122)..(122): n is a, c, g, or t
  misc_feature (160)..(160): n is a, c, g, or t
  misc_feature (166)..(166): n is a, c, g, or t
  misc_feature (190)..(190): n is a, c, g, or t
  misc_feature (409)..(409): n is a, c, g, or t
  misc_feature (474)..(474): n is a, c, g, or t
  misc_feature (514)..(514): n is a, c, g, or t
  misc_feature (770)..(770): n is a, c, g, or t
  misc_feature (867)..(867): n is a, c, g, or t
  misc_feature (1287)..(1287): n is a, c, g, or t
  misc_feature (1464)..(1464): n is a, c, g, or t
  misc_feature (1539)..(1539): n is a, c, g, or t
  Peptide Sequence Number=SeqID_9635
  Probeset Number=SeqID_11878
ngcaacaagatagtcgacgagatctcactagagtccagaccgcatcntgagatactcacntatacnccgcgatcaccggtagaatcaagcatggatatgtagantctgccgcgcagctacangtatgacgtgacgaacgtcgatcattctaatcgtgtcnggtcgnggttgtgtcgtcttcctcatatanattatccacgtgcggcagtgtgacgtggagagtgttcttagttgtcgagaatggcgtcatatcgtctcgattagtggcatgtcgatacgtcgagagtacggcgcgtgtcaggatgcggatacgagcatacgtacgacgtccgttctacatcgacttcgctatagactgcacatactgtacggttcgatagagatgatgtctacctgatctatgtgaatnagtaggctacagcgaaggaagccgtctcatcagcatgttcgtcgcatacttgatgacgcgctcgntgtgagtatgactagtacgtagcagcacgtccggtcatgncagacacggtgcaaaagaggtagctgctagaaccgactacgcagtatcgctgtgcccgtgtacacgacgagagtatacgatgacgtcacgacatattctatcgacagtcaccgtcatacgagctgtgctcgtatgtagctcaacctatacgatgtagtagcagagtatacacttatgcagtcctacggctgtccgccgcagagcaagataacgattagcacagagacgtccgcacacgcgtagacaagatcgacanaacgcgtgccggatgagtgtgtaggcggcggtcctcgtatcacgattatatggatcgtgcgtgcgatgtcggcgtggtcgtcgttgagaataattgnaacagatctgcagcgtcgcgctctaccgctaagtattctcaccgggcgtggcacgatgcgttctatatgtgcggtcgcgtcgctctgcgagcgtgcggcggcacgctagtggcgtcagaggcggcatggccgatcgcgcgaaccgtgcagggacagccagtgtatagcgtctgtgacgtgtaaggtaagcataaatatatatagagaaagcagtgcacgtataccgtgttatatatcgagtcatccacttacaattcatgaagccaatctcatgcgcgacgcgcgcagagacggaccgaactagcgagagagacaatcagagtggcgagcaatagatgcgctagaatggtagtcgtcgaggtcacaaggcagacgacgcggcgacgtcgtccgctgccgatagatcaatatatatagtanataatattggtcgtctgagtcaggctgtatgagcgccacttgtgcctgccccagtcgtatcaatacgagaaatagcgtcagcagaggtgaaagtgggagccagtggagcgaggacgagaggaatacaggatggagtgaaacgaggagagtaaaacagagagaacggatatgtagaanggcgccgtcgtcaacatccacttcgtcgtggggatctgtgtgtctgtgtatccggtcgtagggatgagataaganagaaagagtggaa

SEQ ID NO: 2100 - DNA, 596 bp, Glycine max
  misc_feature (596)..(596): n is a, c, g, or t
  Probeset Number=SeqID_11879
aatacgatcagttttggttcgtcttctcttcgagaggaagctttgatttgatcgtaatcgatagattgttattgttgattaagagagttgagtttttttgtgatcggaggtgatggattggggaagtgtgacggctgaagatctcgtcgatgctctccgagaggttgattggtcgtcgccgccgcgtccgctgtctgagttcttctcaaggttcaccgttcctaaatctctcgctaaatgggacagccgcctcaagtgcaatctctactattaccgaacgaactacttcatcatgatcgtctttatacttggattgggatttcttacaaggcctctcgccattctctctgcctttttgactgcagtaactgtggcatttcttaatgacagctttgcaggttcctttagtgagaaggccacacgaaccatcagaagtttctccccacagttagctgctaaaatgagacctccattggcgcctgtcattcgtggacgcccatcagcaaagagagcaatctatatctgtggccaaccccgttgggtctttgtcttgatatcctcacttgtgagttttgccctttggtatatttcatgtn

SEQ ID NO: 2101 - DNA, 583 bp, Glycine max
  misc_feature (54)..(54): n is a, c, g, or t
  Peptide Sequence Number=SeqID_9636
  Probeset Number=SeqID_11880
gagcctggggccttgagcacctatgttaacagcaacttccaagccatcaacaantcaatcaaggttggtggaagttgccagcccaatgatccaggtgggcccatggatatctcagatttctcccctggcactcagcagccctgttgcttcctcttccaataggaagaaaagcatgggtcttagggtgatgatgtagaaaaatgtctgtttatatccacttttctttcatctttctttcccttcgtcccatacttttcttacttctgggggtgacttcgatgatgctgctcatgcccaaaggagacatgagatttatcccattgcccattacgagaatagaaactctcattttgattgttaagcactaggttatcatatcataagtatgctttgaataaccatctttttgcaatatgttgcttttttttttttgtttattcttttctttgttcggggtcaagcaataggagtctttaattttcccatcatatgcataattgtattctctactttaagaatttatgaacattgagttttgagtcaagtgtcgaagttatttattagacctctagttatcatttgg

SEQ ID NO: 2102 - DNA, 741 bp, Glycine max
  misc_feature (148)..(148): n is a, c, g, or t
  misc_feature (210)..(211): n is a, c, g, or t
  misc_feature (253)..(256): n is a, c, g, or t
  misc_feature (273)..(273): n is a, c, g, or t
  misc_feature (294)..(307): n is a, c, g, or t
  misc_feature (309)..(312): n is a, c, g, or t
  misc_feature (314)..(314): n is a, c, g, or t
  misc_feature (601)..(741): n is a, c, g, or t
  Probeset Number=SeqID_11881
accgttccatttctcaacaacttctgctacttcctactccaaccgcacttctgttccgcaattatcatgggcaaggtcaagatcggaatcaacggatttggaagaattggccgtttggaaaccagagtggctctgcaaaaagacaatnttgaactctttgccgttaacaaccctttcatcccctccttttccccgagaggggggggaacnnccacagtgttctttttttctggaaacctcccgatggccccgnnnntttttttttcccccctncccgggaaaagaaaagggggnnnnnnnnnnnnnncnnnncncccccaaaaacaaaaaaaaaaaaaccttctgggggggggggtcgccccccattttccccgtaaagaaaaggcccccccccttccagcaggagggcaaggaaatctacctccccccctccggatccccatcatagggtggtgtaccccatacccaccccctccctcaggatcctcccccgccggcaataccacccacagcccacgtgcaagccacacacacgtccaatcgtcgacgcactagacccaaggtccgcccagccccagaaccacaaacagccttagtctcnnnnnnnnnnnnnnnnnnnnnnnnnnnnnnnnnnnnnnnnnnnnnnnnnnnnnnnnnnnnnnnnnnnnnnnnnnnnnnnnnnnnnnnnnnnnnnnnnnnnnnnnnnnnnnnnnnnnnnnnnnnnnnnnnnnnnnnnnnnnn

SEQ ID NO: 2103 - DNA, 1593 bp, Glycine max
  misc_feature (1)..(1): n is a, c, g, or t
  misc_feature (39)..(39): n is a, c, g, or t
  misc_feature (43)..(43): n is a, c, g, or t
  misc_feature (45)..(45): n is a, c, g, or t
  misc_feature (70)..(70): n is a, c, g, or t
  misc_feature (120)..(120): n is a, c, g, or t
  misc_feature (146)..(146): n is a, c, g, or t
  misc_feature (164)..(164): n is a, c, g, or t
  misc_feature (168)..(168): n is a, c, g, or t
  misc_feature (227)..(227): n is a, c, g, or t
  misc_feature (229)..(229): n is a, c, g, or t
  misc_feature (311)..(311): n is a, c, g, or t
  misc_feature (329)..(329): n is a, c, g, or t
  misc_feature (331)..(331): n is a, c, g, or t
  misc_feature (379)..(379): n is a, c, g, or t
  misc_feature (468)..(468): n is a, c, g, or t
  misc_feature (880)..(880): n is a, c, g, or t
  misc_feature (1123)..(1123): n is a, c, g, or t
  misc_feature (1128)..(1128): n is a, c, g, or t
  misc_feature (1306)..(1306): n is a, c, g, or t
  misc_feature (1360)..(1360): n is a, c, g, or t
  misc_feature (1517)..(1517): n is a, c, g, or t
  misc_feature (1551)..(1551): n is a, c, g, or t
  Peptide Sequence Number=SeqID_9637
  Probeset Number=SeqID_11882
ncctgattgctgacgataacactagtagtaggtactgcntgangnagtagcaggtacctcggctgataantgactagcggggtcactagctgtatgtctctatctacctctgtgcaacgncgtcagcgtatatacatgggactgcncgcagatgtgcgtgccgntgtntatcgatatgtatatagtaatatacactgaatgaacacacgtatgtctatgtagatatntntctcgctgtctctgtccagcgatctatatatatgtatgtatatatcaatgtcgatgtctatatatctatcgctgtctcgatntcgatatgtatacctctntntgtctatgtctctcacaatatatatatatctatatgtctacctgccgntctctatctgaatatgtgtatatagcgcgatatactgatgcagtatgtctctctctatatatatatatatatatatatatctaattccnatatatatatatatatatatgtatatatctctctctctgtctatatatatctctatctatatctatatatatctctctctctctctatctatctctatatatatatatatatctctctatatatctgtatatatctatatatatatatatctatatatgtctctgtctgtatctatatatctatctctatctgcatgtatctctctctctcaatctatatatctatatatctgtctatatacctgtctatctctatctctctctctctatctgtctctatgtctctctccatatctatatctatatctctctccataactctcactctatctatatctcatatatatctatctcagcgtctgacactctatctctctctatctctacatatatataccaccatctctacctncccctatacctagaccactgtctccatctatatatatctgtatctatctcccacacactctctctcaacatcactaccaccaacaccatcacacactctctctctctctacatacaacacacacagctacatctctacacacacatccacgtagccacaaccactaccgcctctatacacgagccgcactcacgccatagcacaccacaaccagtactccactcgcaacccgatacatatgcngacanacaatctctactataaccacaccctcgccctctctcgcagacatatacgcagagtcaacacaacgccgcacgacacctctatccacaccaccaacctcaacccagcgccgaatacatatgtaacaccaaaccacaccctacataccaccccaccgcaatccctagacacacacactcncgcagagacacgaacacgacacacctacctcacacaccaaacctcacacacacnacacaacctcactcacactcgaagagagcctacacacacaccgaacgcgtctagacacacacacaccaccattactctacgcccaccacacacgccacgaccgaaccactacacagcacacaccgcgatacccacacacgcaacgcaaacgcaaccnccaagcatcagatccacaagacaacacacactcnctaataacaatccacaactacgacccgccacacaccgacacg

SEQ ID NO: 2104 - DNA, 513 bp, Glycine max
  misc_feature (498)..(498): n is a, c, g, or t
  Peptide Sequence Number=SeqID_9638
  Probeset Number=SeqID_11883
cctcgtgccgaattagacagagaaaccaatcggaggaaaatgaaactagtttggtccccagagacagcatccaaagcatacatcgaaacagttcaatctgtaagcattatttttaacaggcaaatgttactttcgttaattttgttagaaatattatttaatttggaacctctactttcttcctttatgtctcgtcaatcttaaagcgtgtaagcatcttttttgtgtttgtttggtctgtttctactgcattatttaccagtaatataatcaaaatagtgtatataaattaaatgaaggacgatctttattttacctgcaagcatgttttgtgagatttagttagaccaaatctaaattctaaaaaattgattattttttaatatcgataaatattaattgttaatttttgttaatcgtgttttattgttttctttgcagtgtcggattttccgggaatccggggtggcggagctggtgtcggcgattggcggcggngtggaacgcgcagct

SEQ ID NO: 2105 - DNA, 418 bp, Glycine max
  misc_feature (304)..(304): n is a, c, g, or t
  Probeset Number=SeqID_11884
aaagttcggatattgttatattggataacaattttgcatctttggtcactgtcttataggtggggaaggtgtgtttacaacaacatccataagttcgttcagtctccattgacagtgaatgtggcggcacgtgcaatcaactttgtggcatcggtgtcacctgggaaagtgccactaactgctgtgcaatttttttgggtgaacttgatcatggacacattaggtgctttggctctttataccaaaaagcaacaatggaattgttgcacaaaccaccagtgggtgaagcaaaatctctcatccncaatagtcatgtggaggaacctattggatcaagctttgtaacgaatagcgatcgtactgttccttcgaataagaaaaaaatcaaagatttttgtcacagtgaaaaaaccaaaaa

SEQ ID NO: 2106 - DNA, 523 bp, Glycine max
  Peptide Sequence Number=SeqID_9639
  Probeset Number=SeqID_11885
gtctagaacaagagcatcaccagcaagatcagcaattctgatcactgatttgaaaagcttttcgaatttagccgcttcttcttttgtaagaccaagttcaacagctttttctgcatcaaaaaccaatttccctttttcgtttttagtgaggctttcactgaaaacgattgtaagaacagctgcgcgatctaagaatttctcagcagtcgccgcttcttcttcagttagtccgagctcaacagcttttttcacatcaaatgtgtagttgttgtcttcctcaacaaatgaattgatgagaatgttgatgacacgctcgtttttctccaataattctttaatgatttgctgctgttcaaaaggaattcctttgaaagttgcagcgcttgcttgcccaggagctactgttgtgaaagtaagaatgatagctaaagcgaaaaatacaacagagctgagcgatttgctcaaaaacttcttcatgcttcttttctctcccttttctgttaaattttgttgccccgcacag

SEQ ID NO: 2107 - DNA, 1614 bp, Glycine max
  misc_feature (34)..(35): n is a, c, g, or t
  misc_feature (45)..(45): n is a, c, g, or t
  misc_feature (84)..(84): n is a, c, g, or t
  misc_feature (116)..(116): n is a, c, g, or t
  misc_feature (135)..(135): n is a, c, g, or t
  misc_feature (170)..(170): n is a, c, g, or t
  misc_feature (466)..(466): n is a, c, g, or t
  misc_feature (483)..(483): n is a, c, g, or t
  misc_feature (492)..(492): n is a, c, g, or t
  misc_feature (501)..(502): n is a, c, g, or t
  misc_feature (551)..(551): n is a, c, g, or t
  misc_feature (561)..(561): n is a, c, g, or t
  misc_feature (596)..(596): n is a, c, g, or t
  misc_feature (645)..(645): n is a, c, g, or t
  misc_feature (776)..(776): n is a, c, g, or t
  misc_feature (812)..(812): n is a, c, g, or t
  misc_feature (879)..(879): n is a, c, g, or t
  misc_feature (891)..(891): n is a, c, g, or t
  misc_feature (1060)..(1060): n is a, c, g, or t
  misc_feature (1128)..(1128): n is a, c, g, or t
  misc_feature (1216)..(1216): n is a, c, g, or t
  misc_feature (1249)..(1249): n is a, c, g, or t
  misc_feature (1472)..(1472): n is a, c, g, or t
  misc_feature (1533)..(1533): n is a, c, g, or t
  misc_feature (1607)..(1607): n is a, c, g, or t
  Peptide Sequence Number=SeqID_9640
  Probeset Number=SeqID_11886
ggtggtgtgctccccgggtgtgtgtggtgtgttnnttttatattnttacttctacaccacacaccacaacacaatcgctacatnagagtatggagaagtgatatactctgtatggngagacgacgtttgagtgtntagagagttgtagagttgtaggccaccccgccgtnagcactgcgcgcactctcggtggtgtgtggtggggatgggggaacccagacgcgcacgccagagggacagccgaggctgagccacggcagccgcacacacactctagttgacgatcggatgggtgatgtgcgagtatgagactgtcgtggctggtgagctgtcatgctatgttcttcatcccgtcctctctctccctggattctcgcccctcttgtgtgttatcctctcgctcctcgcctcgcgcgcgacgcggtgggtgcgtgtgacgtgtctgccctatcatctagcgcctctnactgcacattgtaatanactaataanaatagagannaaatgaccgtatagtactattaaataagaaaggaaaagagagagatgcngagtagagangagtgaggaacagccaggcacatctctattatganctgggcttgtgtcgcgcgagttctgaatcgcacgccacaaacaacgccncagcatcttcacatcgtacgcgccgtacgtcgctcagtgtgcagcggctcgtgattctgtgtctggcgtcactccagacccgtcctgcgtttgtggtggcgatgatgatagcgatgcaagtcatatactcnttctagtagtatatgtgtgttcggctcacacagagnagcattactgcgatcattgcatatctagtccagtgacaggacagtgtgtatagtatatatgtatatnatgtctgattanaaacaccacactcatctcactactcgtctataaacgcgacgagtgatgagtatatggtctggcacattccgctcgctctctcgtgtatctgtgtgagtttctaccacacgacagatacgtggcggtgtcatagtcttgttcttctcattttctcattcactctcagtcngccgactgtcgctggcacaggtgcattggtcgtgatatgcttgtaagatataacgggagaaagtcggngtagcgccgagcgagatagcgaaatgaagatcgtttcgctccgcgccacgtgagcgccatatgtggttgtgccacagctcttggaganggagatgtctcttgaagatgactgaagctagangtccgacacataagatgtcccgatgcgcgtggatgtcgcctcgcttaagtctgtggtgatgaccgcatctgcttagtagacacacgacgtcgcgcctgacgactacctacagatgttgtgtcgcgcgctaattaattgtcttctcatctcatctctacgcttcgacgttccccaacacaatgatgcgtgtatccatctctgacgcgtcctacctcaaatagtnctagcactcactgtctctctgtgcctgtactcctatgatcagtcgttattgtcttgtgtcnacactagtctctatatatattatataatatgatgtatatatgtcgtacatcttatcatcactgtatcgtgaganctacacg

SEQ ID NO: 2108 - DNA, 313 bp, Glycine max
  Probeset Number=SeqID_11887
cccctgcaccagcgacccctggttcttctgttgataaaccaagacaagtgcttattgatgaagaaacaagggatgtatgagcgctatgcagctctttttgcacttcgtaatgacggtggaaatgatgctgttgctgctattattgattccttgggctcaaaaagtgctctactgtgccatgaggttcgatatgggataaggcgttgccagagtaatgttaaggtaatatccgttgcattaatgcccccgacagtatcctcggtcaattgggtaaaacacctgtagtattctgtcaggggctcgggggcaggca

SEQ ID NO: 2109 - DNA, 1684 bp, Glycine max
  misc_feature (21)..(21): n is a, c, g, or t
  misc_feature (66)..(66): n is a, c, g, or t
  misc_feature (83)..(83): n is a, c, g, or t
  misc_feature (85)..(85): n is a, c, g, or t
  misc_feature (87)..(87): n is a, c, g, or t
  misc_feature (89)..(89): n is a, c, g, or t
  misc_feature (284)..(284): n is a, c, g, or t
  misc_feature (306)..(306): n is a, c, g, or t
  misc_feature (493)..(493): n is a, c, g, or t
  misc_feature (635)..(635): n is a, c, g, or t
  misc_feature (674)..(674): n is a, c, g, or t
  misc_feature (690)..(690): n is a, c, g, or t
  misc_feature (695)..(695): n is a, c, g, or t
  misc_feature (737)..(737): n is a, c, g, or t
  misc_feature (788)..(789): n is a, c, g, or t
  misc_feature (814)..(814): n is a, c, g, or t
  misc_feature (819)..(822): n is a, c, g, or t
  misc_feature (826)..(827): n is a, c, g, or t
  misc_feature (829)..(829): n is a, c, g, or t
  misc_feature (832)..(833): n is a, c, g, or t
  misc_feature (837)..(838): n is a, c, g, or t
  misc_feature (851)..(851): n is a, c, g, or t
  misc_feature (880)..(880): n is a, c, g, or t
  misc_feature (974)..(974): n is a, c, g, or t
  misc_feature (988)..(988): n is a, c, g, or t
  misc_feature (1009)..(1009): n is a, c, g, or t
  misc_feature (1037)..(1037): n is a, c, g, or t
  misc_feature (1075)..(1075): n is a, c, g, or t
  misc_feature (1112)..(1112): n is a, c, g, or t
  misc_feature (1121)..(1121): n is a, c, g, or t
  misc_feature (1157)..(1157): n is a, c, g, or t
  misc_feature (1163)..(1163): n is a, c, g, or t
  misc_feature (1168)..(1168): n is a, c, g, or t
  misc_feature (1230)..(1230): n is a, c, g, or t
  misc_feature (1318)..(1318): n is a, c, g, or t
  misc_feature (1391)..(1391): n is a, c, g, or t
  misc_feature (1405)..(1405): n is a, c, g, or t
  misc_feature (1549)..(1549): n is a, c, g, or t
  misc_feature (1580)..(1580): n is a, c, g, or t
  misc_feature (1603)..(1603): n is a, c, g, or t
  misc_feature (1611)..(1611): n is a, c, g, or t
  misc_feature (1634)..(1634): n is a, c, g, or t
  misc_feature (1648)..(1651): n is a, c, g, or t
  misc_feature (1653)..(1653): n is a, c, g, or t
  misc_feature (1655)..(1655): n is a, c, g, or t
  misc_feature (1665)..(1665): n is a, c, g, or t
  misc_feature (1684)..(1684): n is a, c, g, or t
  Peptide Sequence Number=SeqID_9641
  Probeset Number=SeqID_11888
tgttgttgtgcgttcggcgcncttctatcttctcttttctcatcatctaccggctcatacctcgcncgggagggagtgaggtntntnantcttacagcatcatgattatgtcggtgagaggccgctcgcacatcgagtagaggtagggatagagataagatagattctactcactcacccccacgagtcagaatcggagtatatcatattcatcaattgctactattcattatattgtttgctttatcgtgtagtatctctggtgaacgatgcgatatggcagngtggcccgcgccgtcgctccancattactttgttatatcaatgtagtagtgttatgtctgcctatcgaatgcgccgcgcatcgttacataacggcgcagttcgtggactagaagaataaatagaatcatctagggaggtgtacggcgatacatcttgtacgtatggtctatacgcggcagtccccgaggcgagtcgcagctgcgcgctntcccgtgtcgctctctcctctagtctgattgcgcagggtggtgcctcgctacccttgtccctagtgtcattgtcgatcacgcacatccgcgtgccctttacgtagtgatcggtcctcttgtgcagtgttcgcaagaagcacnacggaatgtgtaaccgcgccctgtattcggcgtctgagngtgcacagagataganggagnacagacagaatgaggtaggagtagctctgcatgcccgtgtcncctgtcactggaagaataatagtgtgagattgtgttgcgacggagaattanncgagtgggtattagattttgatatnttatnnnncatnnanaanngagnnagggtgggaagancgagcacacccgaccacacccctccgcgntgtagtgagggtgattctgactagactatcaccagccgccgcatagcgtagtgatgcgtgtgtgagagtgtgtgaggatgtagatgggagagtngagtaaacggaacncacagcgccaacgtcgtcatnctgccagtccatccatctgcgcacgatncacatgactgtgatatctcctcgcacgcgtctctcttntcttattgacttgtcactttcacgtcacgcgcactcntctgtagcngatatggtcactcctcgtcctatctcgtgccgtatnattgancacanatagagcaactgcaccgtacagtcagatctcactcacatcagctgactcgcacgaggcctgntgtgtgcttgtcgcgtctgccacacagtcactcggagcctctacagttcgagcgtgtccttatgtagacctcagacttctaactcatnctcgtgccgcgaacttagatagcgcataacctccatagctcacgccgaacgcgtgtctcgttattgcagtgtntgcgatcagtgacntacatgatactgtcgtcatatcatacgcacgtatgatatgtgacatatgctgttcactcgcgatacacgcatatcttcgcatcacaccacatgcgagcccgtagactgcgcgctgccagtcgcagtcccttttcttagtgcacntacgtatatacacattcagtgccagtatacngactctttgcagtactactgacntgagccgncgtcgacgtgatcgacgtccatnatatgctctctacnnnntngntgtcgctctngcggcgcgactaatcccgn

SEQ ID NO: 2110 - DNA, 1980 bp, Glycine max
  misc_feature (1)..(37): n is a, c, g, or t
  misc_feature (45)..(48): n is a, c, g, or t
  misc_feature (60)..(61): n is a, c, g, or t
  misc_feature (110)..(110): n is a, c, g, or t
  misc_feature (200)..(200): n is a, c, g, or t
  misc_feature (202)..(202): n is a, c, g, or t
  misc_feature (220)..(220): n is a, c, g, or t
  misc_feature (224)..(224): n is a, c, g, or t
  misc_feature (409)..(409): n is a, c, g, or t
  misc_feature (573)..(573): n is a, c, g, or t
  misc_feature (750)..(750): n is a, c, g, or t
  misc_feature (752)..(752): n is a, c, g, or t
  misc_feature (817)..(817): n is a, c, g, or t
  misc_feature (871)..(871): n is a, c, g, or t
  misc_feature (1020)..(1020): n is a, c, g, or t
  misc_feature (1027)..(1027): n is a, c, g, or t
  misc_feature (1054)..(1054): n is a, c, g, or t
  misc_feature (1057)..(1057): n is a, c, g, or t
  misc_feature (1163)..(1163): n is a, c, g, or t
  misc_feature (1220)..(1220): n is a, c, g, or t
  misc_feature (1338)..(1338): n is a, c, g, or t
  misc_feature (1376)..(1376): n is a, c, g, or t
  misc_feature (1378)..(1378): n is a, c, g, or t
  misc_feature (1460)..(1460): n is a, c, g, or t
  misc_feature (1501)..(1501): n is a, c, g, or t
  misc_feature (1607)..(1607): n is a, c, g, or t
  misc_feature (1700)..(1700): n is a, c, g, or t
  misc_feature (1736)..(1736): n is a, c, g, or t
  misc_feature (1742)..(1742): n is a, c, g, or t
  misc_feature (1775)..(1775): n is a, c, g, or t
  misc_feature (1807)..(1807): n is a, c, g, or t
  misc_feature (1867)..(1867): n is a, c, g, or t
  misc_feature (1883)..(1883): n is a, c, g, or t
  misc_feature (1939)..(1939): n is a, c, g, or t
  misc_feature (1948)..(1948): n is a, c, g, or t
  misc_feature (1980)..(1980): n is a, c, g, or t
  Probeset Number=SeqID_11889
nnnnnnnnnnnnnnnnnnnnnnnnnnnnnnnnnnnnnccctaggnnnngggacgccggcnngggggcggcgaacacccacaaacaagcttgcgcagccatacacacacgncggcgctgcggcgcgccacgacgtacgtcagagaaactacgcaagcgcatcgctcgcgcgcgagcacgtggcgcgcggaccatgtcggcncnacccgccgccaccgcctntggnggcgtgatagaatatatctgtacatattatcttatacataatctattctctttatatctgcataagttgacatattatcgagtcttgtctactattgatatctatatacatatctgccttattatagggcgtacatgtgagagagatagagtgaatcacgtagggagctatgtagatgatatcanctaatatcttatcagtctactcgagcatcgatatacatcaaattatatcctctactcgtgtgtctatctgtagctggtgatgtgctgcttcatctcttgcgtcatgattagtcatattgtctgttgtctatctcggccctcttctgtctcgtgtcgtgcgtcgngactgtgactgcaagcagcatcttctctgcgcttctcgtactgtgattatgttcaaccacgatatggacgtatcacgcagcgtgtgtagacgtatcgatataatgatacagtacatgtagtacacactgaaccatacgcaacatgaccgcataaagcactatcataagacatctcananaccgtatcatacgtgcgtgacggctactccagtctgctgtgcgtgacttgtatgatagagcacgntgcactacactagtcactctaacagaattatatactatctaatatacacaatanatagttatgatagtagatagatgcataagctaagaataacacagcacatataacatatgtctgagagtatcgctgtgttataatctctctgtcgcgcacacgacgtgccggtgtgctgtgactgtctctggcgatcagcaacctctgancttagantcgcgcaccaccaactcagatcggggncgntcaacacacgcaacaggctatcactacgcactcgcatctgtgctatgatagtcaatataatactgatcttcagcgcgcgcgagttacttctctctctctctacttnttcctactctatcatgcgcttcttactctcgtacttattaattgatatctctctctncgcgctgtctcgctgctgtctcgtcgttatacgcgcgtgctgcgcgcgacgatgtcagagatagtgtggtaatagacggagcacaatgtatacgtcggaccggtcgcacttatatacntagtattcgtgctagtctatgtatcgtgctgatcatancnactccacgtgtgcgtgctcgcgctgaaatactctcacagacaacacacagtctcatccatctgtcttataaatgttctacgngtactatatacactacactatacgtatctacactctacgancacaactaatgtactctatatacacgacatgacacgcacacgtactaccacacagactatcagtatatcatgatactatatgaatgcagtaacattacaaagcgtnatacgacatcaataatgactaattatatctgccgtaatctaacactactattgaaagtattgtgctatttgactgcgttctatacgacgtacncacctcacacagcatagcgctgatagtgctgcgccncgatcncatctgtctacttctcgctcgctgtatgatcgncgccgcgcggcatcacgacgctactcatccgngacgcgaccgcacgacgaccagtacgcgttaggcatgatgtcatgtctactcacttcttnatccaatgctgcgaangacggaccggtcgccagtgatgaatgcataagtgctgttacgcagtcatgaacacntacgagtgngtgatgacacagaagaacacataaactagcan

SEQ ID NO: 2111 - DNA, 1427 bp, Glycine max
  misc_feature (49)..(49): n is a, c, g, or t
  misc_feature (62)..(62): n is a, c, g, or t
  misc_feature (64)..(64): n is a, c, g, or t
  misc_feature (84)..(84): n is a, c, g, or t
  misc_feature (99)..(99): n is a, c, g, or t
  misc_feature (112)..(112): n is a, c, g, or t
  misc_feature (128)..(128): n is a, c, g, or t
  misc_feature (148)..(148): n is a, c, g, or t
  misc_feature (157)..(159): n is a, c, g, or t
  misc_feature (161)..(161): n is a, c, g, or t
  misc_feature (166)..(167): n is a, c, g, or t
  misc_feature (169)..(169): n is a, c, g, or t
  misc_feature (203)..(203): n is a, c, g, or t
  misc_feature (211)..(211): n is a, c, g, or t
  misc_feature (214)..(215): n is a, c, g, or t
  misc_feature (261)..(262): n is a, c, g, or t
  misc_feature (273)..(274): n is a, c, g, or t
  misc_feature (276)..(276): n is a, c, g, or t
  misc_feature (285)..(285): n is a, c, g, or t
  misc_feature (293)..(293): n is a, c, g, or t
  misc_feature (299)..(299): n is a, c, g, or t
  misc_feature (302)..(302): n is a, c, g, or t
  misc_feature (309)..(310): n is a, c, g, or t
  misc_feature (348)..(348): n is a, c, g, or t
  misc_feature (356)..(356): n is a, c, g, or t
  misc_feature (369)..(369): n is a, c, g, or t
  misc_feature (395)..(395): n is a, c, g, or t
  misc_feature (416)..(416): n is a, c, g, or t
  misc_feature (419)..(420): n is a, c, g, or t
  misc_feature (427)..(427): n is a, c, g, or t
  misc_feature (431)..(431): n is a, c, g, or t
  misc_feature (445)..(445): n is a, c, g, or t
  misc_feature (447)..(447): n is a, c, g, or t
  misc_feature (480)..(480): n is a, c, g, or t
  misc_feature (491)..(491): n is a, c, g, or t
  misc_feature (560)..(560): n is a, c, g, or t
  misc_feature (567)..(567): n is a, c, g, or t
  misc_feature (592)..(592): n is a, c, g, or t
  misc_feature (659)..(659): n is a, c, g, or t
  misc_feature (1300)..(1300): n is a, c, g, or t
  misc_feature (1308)..(1308): n is a, c, g, or t
  misc_feature (1320)..(1321): n is a, c, g, or t
  misc_feature (1365)..(1366): n is a, c, g, or t
  misc_feature (1395)..(1395): n is a, c, g, or t
  Peptide Sequence Number=SeqID_9642
  Probeset Number=SeqID_11890
tctgatataatatatggaatcgagatagacagaagacgcacataggccncgagatatcattnantagcaatagcgtcacagtancacattacagcgagnggcgttgtatatnttgatgcgcgcagagntgcgaaaaacattgcaccantgggttagnnnancagtnngngtgtcgcgtgccgcatgaggcccgcgtcgagcgnctcttcgnccnncgcatgtcgggtgccggtgtgtattacgctgttgccgagcgggganngaatgtatttnngncgcccgcgngcggctantagcgnagnattattnngggctgctcgctcgcggagcgaaagaacgtctggcgtngggccgcntcaggcggagaanagagcgggcgcatcccgcacaaacangcctgtcgcgcgtgtgctagncgnngaaagangaanacacacctgtgcgngngtgttataactcaacggtactaagagtagcggnggtccaagagnaagaagagcgcgcggccgacacataggctggcagaatattcgctctctctcaccgcgcacaccctcggntctttcnccctgcgcgcgcgacgtatcagcanaacaccgaaatagaacaccgctcccatgtctcaacagctgtatcgttactccgtgaaaatacatganaatagaagaagcagcatgcgcatcaagatcggactcccgatataagcttacttaactaccttcgcaacgtgtcctccggcgcgattttctgcgctgtgtaggaacccctctgacgaattcgctcatcatgaggaggtgtcctcttcaattaatgtgggtaagataacagcactcaggacgctagaccgggtggtataagtaatgggatttagaaatttccactatacagatgaattaagtctcttttcagataactataactagttaagcctatccgtctatgagcttggtatatttatatagaacctaattacttataactttactgtgttaatgatagtagaggcgatcgtctgcacgatgatcagggctttttcttctctgttaactgacactacatagttacttgcactgaaaaacactactcttataacgaggttttagttatatggtgtgatatattcgacgctacttacacaccacaagaccatatactctttctatgctataaatcctatatgtgttgtcctttagacttcttagtatcaacctttatagaggggggggggggcgcgccttctcctccttcccgctaccttcgatggggagagggctcctcgttatctctcaattttgggganttcatttnatgatgggtggnnggccacgcaatacataaatatcacaacattaaataaataaaaannaagataaaggataaaaagaaacagagatngaagaaacggaaaaaaagcccaaaaacaacac

SEQ ID NO: 2112 - DNA, 365 bp, Glycine max
  Probeset Number=SeqID_11891
tgggaatgggaatttgctgctccaaatatgcgaaataagtcccttttatgacgtgtgagggtccatctcactctcagatccctaagcccccaaaagtgatccaaagggtatggccctcataatggtcaatggagttctgcccaatggtgctgacacactcagttgcatcgaagagctcatcaagcagacctcgggtggacaattagagcaacacgttggctatctgtgctgagtcatacatcccagttgtggagtacattctcccacaagcagctgatgccataaaccaaggtcgatgtgggtttgccagttactgcatagttgatgctcagaaggcagtaaatgcttgcgacaagagcttctcg

SEQ ID NO: 2113 - DNA, 1474 bp, Glycine max
  misc_feature (23)..(27): n is a, c, g, or t
  misc_feature (31)..(31): n is a, c, g, or t
  misc_feature (33)..(33): n is a, c, g, or t
  misc_feature (35)..(36): n is a, c, g, or t
  misc_feature (38)..(40): n is a, c, g, or t
  misc_feature (46)..(50): n is a, c, g, or t
  misc_feature (54)..(54): n is a, c, g, or t
  misc_feature (61)..(61): n is a, c, g, or t
  misc_feature (63)..(64): n is a, c, g, or t
  misc_feature (69)..(69): n is a, c, g, or t
  misc_feature (71)..(72): n is a, c, g, or t
  misc_feature (88)..(88): n is a, c, g, or t
  misc_feature (97)..(97): n is a, c, g, or t
  misc_feature (101)..(101): n is a, c, g, or t
  misc_feature (137)..(137): n is a, c, g, or t
  misc_feature (237)..(237): n is a, c, g, or t
  misc_feature (241)..(241): n is a, c, g, or t
  misc_feature (245)..(245): n is a, c, g, or t
  misc_feature (270)..(270): n is a, c, g, or t
  misc_feature (283)..(283): n is a, c, g, or t
  misc_feature (285)..(285): n is a, c, g, or t
  misc_feature (298)..(298): n is a, c, g, or t
  misc_feature (528)..(528): n is a, c, g, or t
  misc_feature (568)..(568): n is a, c, g, or t
  misc_feature (744)..(744): n is a, c, g, or t
  misc_feature (1388)..(1388): n is a, c, g, or t
  Peptide Sequence Number=SeqID_9643
  Probeset Number=SeqID_11892
gtggggttggtggggtgggtttnnnnntctntntnntnnntttttnnnnngcancggcgtnannaattncnntgcttgcatgtcgtgngagttgttngacngtaggtctctatataggtgaatgagatgatacaaanctcccagatgaacggcgatgatgacgtgcggagagactgggataaaaaatcatcgaaaagagcaatagacaaaatagatcgttgtgggtgggtgtatggntgantgtnatgatggatgagtggagcttaccantaatcccgaacananagacattatagtnttatagtttattatattatatctgagagtgaggcgcgatgtgatgttacttatctacgtcctatacatattaatattagaatttcgatagataataatatattgtgcaagacgagtatacctgccatatatatatgtgttgttgtctcatccgttctcttgttgccatctgcgccgggtgtgtgtgggggctgtgtcttctcttcttctctacccttctgccgcctctancttgcctacgtgatctttgttgtatggtctaaataaattntaatgagagtatagcaaatccatacacaatcagaagaacgagcaagtatctcctaaagttgataatattcgtcttatgtaatgcgagatctcgtagctgctgtgaagttacggtcagggtaagacagttcgtttttgacggtaattggtcactacagcgtgaaacacacatatcanactatttaattcactattcaaccgcggctgctctctccctcatgtgtccgcgatgatgtgctccgcactgacgtcttgaagtcttattgtatatatcagatattcacactatctaagaaaatgatatctctaaacacagaccgcgcacatccagtacgtgtctcctcctctagatatggtggtgcctctccgatcatatgcttgtttgtgatatacgcgttacttgtgcatatctggtacctctgccatgttcttgcttgtatcttgcatagacatgtgattactaccgtcatgccatacgcagctcctcggtcgccgtcctgtctctcgcctcgtgtagtgtcgatttcctatgagatacagagtacgtggacacatacacatcctaactccacctcttgctcgtgtgctgtacgccagactcgatcgagccctatcgctgagctcacacgctaacacgcacgatgctggacttatgcgtcgtatactcccacacctcatccttgtgccagtgcggtgtctcgcgtattatctacaatcatatgcacgcgcagtgaatgtctcatactccaggaacacgcgcgagtctctgcctcgctcaccgttacatacaactctctcgtacgcttctcagatccctatcnacactacacacactacttcatttgtctatgcctatctcctgattctcgacatatatacatttacaacatatttatatatgtgctgt

SEQ ID NO: 2114 - DNA, 465 bp, Glycine max
  Probeset Number=SeqID_11893
atatgcgctgccggactagtcgtcgttgtaagggagcaagtaggtggcggagcatccaggttccaaatcggtgcagggcgaggctccgccgtggaaccgcaggctcgctcacctcaactcactttttaggcgaacgactcgtcggcgtgcttctgcagcagcaggagcggcggacgctgctgctctgttgcggtcggcggtcggcggcgacgtgctttgatgcaagcaacatgctagttatttctacaatgcaaccgttgtttcaggaattgtttttgcaacccggccgttgtttcagaaattgttcctgcaatctctaaatttttgcaacatggtagttgtttctgcagcaatctggccgttgtttcaggaattgttcctgcaatcttcaattttttgcaagataatggtagttgtttgtgcaacacagtcattgtttcaggaattgcaacgcaactgttgttt

SEQ ID NO: 2115 - DNA, 1590 bp, Glycine max
  misc_feature (108)..(108): n is a, c, g, or t
  misc_feature (140)..(140): n is a, c, g, or t
  misc_feature (263)..(263): n is a, c, g, or t
  misc_feature (353)..(353): n is a, c, g, or t
  misc_feature (397)..(397): n is a, c, g, or t
  misc_feature (417)..(417): n is a, c, g, or t
  misc_feature (455)..(455): n is a, c, g, or t
  misc_feature (703)..(703): n is a, c, g, or t
  Peptide Sequence Number=SeqID_9644
  Probeset Number=SeqID_11894
attgtatgtgatgggtgcagtatactctgtgggggatccgaacatggaagctccacatgcagtgccgatgcacatcagttcagatgcgtaaacactactcgcatagancgcgccattgcgatgcgcgcatatagacggcnaataagtcatgatactcatatatacagagtagtcgcgttcaacataactcatgatagcagtatatagtgtgtgacatatatccagatacagtcgcgcgagtgtactcgatcgctctatcaagnttcgtggagcgagcagtcaaacatatcacaactgcgcgagtagcaaacagatactgcgaatcaatcacgattcctgagtagcatcacatntgagtctattatcgcatctagccgtcagtgtcgagtcatcgagncgtccgagactcctctatancgagcgatgtccagccagtataaatgtaagtaatatgnacatcatcgcagtatcgagctgacgtgcatgactccaacgcacatatatgtgatacacctgacgatggcgcgtacgcgagtaagtcaaccgcatccgaatactacgtctgctcagtctattgtagccatgcactcacgcataacaccagcgctaggagatgttattatacacgtacaccgactctaatagcggacggtgctaaacgtccacggcgcaactcattcgtcgtcagtgtcgagacctcgtncttgacgtcgcgtgatcgctttttaatgtatatactcatccgcaatatcgagtgtatactcgacgtggcgggggctctagaaatacatcggcgtgcgtcgagctgggtatatggctcagtagcgaccaggcggggcgagaagagaagctatagttaacgaacgctcaggtgatgatctaatcaggcgatgcatggctcatctctacagcgccgtcgctacggtataaaccgaatacagccggcgtgcgcggagccattggccatatatcaatggccgaatggccgttaccttcggagacacagctgtcattacccggtctcaaaccacactagccagccaccaaacataagtatcagacgcgtgctactaagaagttggtggatagaacaaactataactatatcatcaggtcaaagcatataaggcaatgcgttatatcttgacactatacctattgagataaattgcgtcgggcagcgacatacgagtgcttagtgaggcacttatgtggggctagaatatactgcgcctcgctgcgcggcgctccacaaactacttgctgtatcattctgtccggagtattaatactaatcgttgttcagagtctcgtcggcctcctatttataatatgaattttgaggtgttgcgtggatgtatgagcaacacatttgaggagcagatcaacggtaggcggcgccgctaatgctgagaagtgacgcacgtagatagagaaaaaagcacgtaacgcgtgggttattctgttctctctcgttcgacctgatcgcgcattctcgcgcgtgcatattgcgcgcactgatatgagacgcggcgaggaaggggaggcggcgacgaaaaatatgaggagcagatcataacccagagaatg

SEQ ID NO: 2116 - DNA, 1541 bp, Glycine max
  misc_feature (25)..(25): n is a, c, g, or t
  misc_feature (53)..(53): n is a, c, g, or t
  misc_feature (220)..(220): n is a, c, g, or t
  misc_feature (1207)..(1207): n is a, c, g, or t
  Probeset Number=SeqID_11895
tcggcataaacccgtgtatcttatnactcctatcaacaactgtatataaccgngcctggtctcggtgcgtcatactactagacacctcctctgtccctctgctgcaaatcgccagctcatacttaaaaacccctgacaagtccgtggccgtaatgtctttccgcgttcacattccgcactgttcaatcatcatggccgcggtatctctcaattgggtgantgttgctacaacactacccatatttggccatatagttacactccactgtacgcgtgtgtgccattaccgcatattggcgtcacaacaaaatacgaggaggaacaaaatacattggatattaaaagtacatagcggcggctagaaaccgctgcgcgttcgcaacaaagacgctagtccagtctgggctttgtgtgcaaatatgctccggtgttctgcgcggcaccttcatcacatactacatccaagcgatctacagctgagatatggataatcgaaccggactaatcgacgggtataaatttgttacggatcctagattaacggtccagatgtcgcgggataacgctttcacgggctataaatgcggggcagaactgtgtcacacacatgcgagcaataaacaatacgcgatcactcgcgtctaccaataatcgactatcgcttattttgtctaacgtgcggcctacattcgtctcgccacaaccatgtgcccagcacgttcgcgtcgtggtactcacgcctctctcttcctctcttttctctctcctcggtgtcattatcttgatttaatctcacaaacgcggacattgtggggcctatatgcggtgtcaaatcggcgtataccatatgtctgtaaacaaccgtcgcgctatctttgtttatcacacctccgctctctcgcgccaaaaactctgtcataaaactcgtcgataaatacactcaatcgtcggggcaaacacggttccacacttgcagaatcactctgtataaaaatatactcacattctattaacacgctggtcccaggcggccgcacaaccacgcggtcggcgaagttcctctcgtccttcacaatatggccttatcactcatgtggcgaaacagtggcgacaccacgcctcaaaaacccactcaacactacgtgcgtctaaaactacttgattataaatttgcgtgatcagtctatcatgcgcactatgtgacatnttgataataattattataatgaaaatagtctggcatatgtcaccttctttaaacccgctcggatatactgtgtttaaaaaaataataaaaaatatacaaacgtgtgaaaaagtgggtgaacaaacggtggtataagatggttagaaattgggttccatggtacaatggtgtcaacagtgctgtaaaatggtgtacactgggggcgcatggaggcggacacacctgcgtcatagggggttccctcgatacccgcaatgttcgagattgttgttgtccgcacccgcttgttcgttctgtaaggttctggatgagacaaactggttgttatacgtat

SEQ ID NO: 2117 - DNA, 605 bp, Glycine max
  misc_feature (257)..(257): n is a, c, g, or t
  Peptide Sequence Number=SeqID_9645
  Probeset Number=SeqID_11896
ggctgcgagaagactacagaagggggatatgcttcactggtgattactattattattattattattattattattaggcaatcctttaatataattcggttttgctctgctatgcagaatcgttgacgagagcagccaaagaaggtgcggtggtggaccctgtagagcctcagaaagttctagaagctgccaattctcatggggtcaataatctcaagcttgtcctcaccacacatcatcacgggggatcatgctgngtggaaatgaaaagataaagcaattgctgcttggaatgaaggtctatggtggttcaatggataacattccaagggtttgcactgataaggttgaaaatggggataaaatggtccccttgggcgctgatattaataatatttggggtcttcaccacacctttgccccccccaaagggccaccataagcctatttggtgttactgggcaaagaaggagggagtgaaccctgcttgttttttactgggaacaaaacccttggaatggcaggggaggcgaacttttgctatttttctccctggaacaaattggaggcccagaaaaacttttgggaggctctcccaccccccg

SEQ ID NO: 2118 - DNA, 1514 bp, Glycine max
  misc_feature (15)..(15): n is a, c, g, or t
  misc_feature (22)..(37): n is a, c, g, or t
  misc_feature (40)..(42): n is a, c, g, or t
  misc_feature (47)..(48): n is a, c, g, or t
  misc_feature (51)..(51): n is a, c, g, or t
  misc_feature (56)..(57): n is a, c, g, or t
  misc_feature (72)..(78): n is a, c, g, or t
  misc_feature (80)..(83): n is a, c, g, or t
  misc_feature (241)..(241): n is a, c, g, or t
  misc_feature (247)..(247): n is a, c, g, or t
  misc_feature (262)..(262): n is a, c, g, or t
  misc_feature (357)..(357): n is a, c, g, or t
  misc_feature (397)..(397): n is a, c, g, or t
  misc_feature (461)..(461): n is a, c, g, or t
  misc_feature (488)..(488): n is a, c, g, or t
  misc_feature (613)..(613): n is a, c, g, or t
  misc_feature (726)..(726): n is a, c, g, or t
  misc_feature (765)..(765): n is a, c, g, or t
  misc_feature (770)..(770): n is a, c, g, or t
  misc_feature (794)..(794): n is a, c, g, or t
  misc_feature (813)..(813): n is a, c, g, or t
  misc_feature (821)..(821): n is a, c, g, or t
  misc_feature (830)..(830): n is a, c, g, or t
  misc_feature (838)..(838): n is a, c, g, or t
  misc_feature (872)..(872): n is a, c, g, or t
  misc_feature (964)..(964): n is a, c, g, or t
  misc_feature (1424)..(1424): n is a, c, g, or t
  misc_feature (1514)..(1514): n is a, c, g, or t
  Peptide Sequence Number=SeqID_9646
  Probeset Number=SeqID_11897
gagtttggagggatnggttgtnnnnnnnnnnnnnnnngcnnnggtannagncacannactctgcaacttgcnnnnnnncnnnnacgcaccgacaaatcagtgatcgacgcagacaacccacaccgctggcgtgcaacatctcacagctcactacacacacccacaccgataaaacacactcatcacgacacgataacgcggtgcagtcacgtcgctcccccactcccctctactgacgatncagtgntgctctatcctcctntcgtctactactatctggactcctctagaactcgtcggtcgtgcgtgtcgcgtgcctcgcgtatgtacgcatcgggtcgtctggctaacagtccnctagctccacgcgtatctctcttgtgacacacatgccgtnctgccctcatactaccacctccattagaatacacacatcatgttaacatccgtatctatccagnagctgtcgtacactcctctctccacanctcaaaaataggtggtgtgcgactctgatctatatgctcacctcttcacacacgtcgctcgcgtgtgtgtcacacgcactcatctcccgcgtactcgcacatcatactcgcacgctcactctctntctctctcgtttgtgctcgtacttgttcttcttcgctcacacatacacagctgcgcgcgtcgcgtcgcgatacactacgcatcatacatgtttatctcgttctgcttctatantgatctaatatatagtctgcgcgaggtttgtctctatantgagntatggtgtatcatatataataaanataatagtgaaatatactnactgaaantatataatnatatgagncataaaacaaaactactaaaacattttggtgtanaaaccaaactgtctctacatctactccatcaagcgtggtgtgcacaataagatgtttggagatgtataatgcatatactcaactgtctgggnacaacaaaaccacatgcgcctcgctattactcttgctcgattcgtcagtgctgcaacagctgcgtcacaactctgtgccacactcaattcacgctcgcgtctatatggactctcatactaaacacatacatctgcgagtgggcatcagacattacacacactaccaaccacaactcggctacttttgtggtgagcgtgcgaaacgtggatgtgagagcgctcctcctgctgccacttatattatgtgtacctattgtgctgaggacatactactgaattgtgttgttgatcgaattagcagtcatcaatccctcttccccgctcgggaatcgtggtgcgtccatctccctgctcgcatatgcaccgctcctgcgtgtataccatcatacggtgttactcgatttctgctgtgtgttatctctaaccacactatgcatgtcatcactatggcgtggagtgnatgctaactacctgtctgttgtatgcgcataccacacgccgacacgttatacactgtatgcttgtgtcacatcacaatcaccaacatccn

SEQ ID NO: 2119 - DNA, 1561 bp, Glycine max
  misc_feature (8)..(8): n is a, c, g, or t
  misc_feature (33)..(33): n is a, c, g, or t
  misc_feature (273)..(273): n is a, c, g, or t
  misc_feature (321)..(321): n is a, c, g, or t
  misc_feature (409)..(409): n is a, c, g, or t
  misc_feature (431)..(431): n is a, c, g, or t
  misc_feature (510)..(510): n is a, c, g, or t
  misc_feature (573)..(573): n is a, c, g, or t
  misc_feature (609)..(609): n is a, c, g, or t
  misc_feature (1280)..(1280): n is a, c, g, or t
  misc_feature (1288)..(1288): n is a, c, g, or t
  misc_feature (1308)..(1308): n is a, c, g, or t
  misc_feature (1485)..(1485): n is a, c, g, or t
  misc_feature (1516)..(1518): n is a, c, g, or t
  misc_feature (1522)..(1522): n is a, c, g, or t
  misc_feature (1524)..(1525): n is a, c, g, or t
  misc_feature (1527)..(1527): n is a, c, g, or t
  misc_feature (1529)..(1530): n is a, c, g, or t
  misc_feature (1535)..(1535): n is a, c, g, or t
  misc_feature (1545)..(1545): n is a, c, g, or t
  misc_feature (1547)..(1547): n is a, c, g, or t
  Probeset Number=SeqID_11898
gtagggantagatgcgctggagcgtgtcgttgngtggtcgctgttatgctctttgttcactctgatattatagtctgtatgcacacttgtgtgtgctatgcgggtctgcatagtccgtctcaccggcttactcttgcgatcgcgtcggtggtaccgaggcgtcgcgtgcgattacgtgtggtgtagctctatgatatactagttgtgacagatagtgtaagacgtactgagcgagtatcatgcgtagtagagtacacgaggcagcgtgtgaancataccgacgcgatgagaggggcgtagagatacgcaggcgactcgcanttgcgtccgccctcagatacgtataggcttgcgaggagagtactcgcacgcaccattactcgtccatcgatggcgacggtacacgtgntcacgcgctacaaggcaggtanttcattgtatgtgtgtggtggtgagtggtataatatcgactacgctatgctaccgtatacttagatcacagcaccactngcgcgagcagtgagatgagtgctgctctccgcaccgctagcagcgagccactgatatcacatnatcaggttgttatctgatagagtgtcgcgcggcgcngaggcgcgaggtagagtctatatcatatgttcgacggaggcatgtggctaggtgatggtgagcatctccgagagaagtggctcttttctatgtccgagtcgatcctacgcacatcaggtctacatctatggtagagcggtgaccagactataattctctatgtcacgtgatcacgtattgacaattcgtactcgtgtagaggagtagtcgtccctctcgagtccattacgtctttgactgacgctagatcgcaatagacactatataatatctcataaatatcaggtgagagaaagtgtgcgtttggtagtgctcacacctcatcccaggtcgagctgtgttgggtagtgcgattccgcagggtgcgcgggtggccggctgtgcgtggctccgtgcagaccggaagtatgagtaaagttaccatacgctcctccctccaccgcaggtccctgcagtctgtacgctattacataaatcatttctcgcttctttgtagggtcggtcgtgcggcggcgtgtcgctcgttggtgagtacctgaataacacagtaagagtggcagtagcaagacgggatactatcaagttaaactaatttctggataacgaagatgaggagatgcgagcacggatggagcatatgtgagtatctgtaagcgttggtccttgcgtcncacccagncagttgtgttgatgcctcgnggtgaacaagacataggtaacacagaatgatgccgccatatgaccctcatcagactaagagaaagaatgaggtgtggagtggtttatatcacatatataaatatgcggaagcgtaggagaggagggggtgtggcacatatatacattttaaaggtgggtggagagtggcgcggggtngctcccacctcagacgcggagggggcgttannngtgngnngngnnggggnaggaagaagnanccaccacccacaat

SEQ ID NO: 2120 - DNA, 469 bp, Glycine max
  misc_feature (459)..(459): n is a, c, g, or t
  Peptide Sequence Number=SeqID_9647
  Probeset Number=SeqID_11899
acgtctcgcctgtcgctggctcgctggccgctgccagacccttgctgccgccgtcgccgtcgccgtcgcctcctcttccccaactccgatcagtctcaggtcgacacgcgcgggcggctgggtccaggtttctccggccgcggctcgcttccaccacggcagcagcagaatatctcgtggaacatgagaatagagcagtgaggttgtgttgatcgataggtttggatctcggttgcggtttgtgatactagcagtgcacaccaaggaagatattgcgggcgccttggaattttgttggcgatggatgatagtagctctagcaagagaaagcctgaagcgcagcgagagggtgagagcagcgccaagaggctcaatgtcaccttggggctggagtcccttgactgccccatctgctttgtgcccctcagtcctccgatattccagtgctccgtggggcanttcatatgcg

SEQ ID NO: 2121 - DNA, 1363 bp, Glycine max
  misc_feature (13)..(13): n is a, c, g, or t
  misc_feature (19)..(19): n is a, c, g, or t
  misc_feature (33)..(33): n is a, c, g, or t
  misc_feature (44)..(44): n is a, c, g, or t
  misc_feature (1226)..(1226): n is a, c, g, or t
  misc_feature (1302)..(1302): n is a, c, g, or t
  misc_feature (1363)..(1363): n is a, c, g, or t
  Peptide Sequence Number=SeqID_9648
  Probeset Number=SeqID_11900
ccactcgcccacnagctgnaaagtggtcacaanaatctaaacanccactatttcctaattcgggttccggtccccccccctccacgctcgacggccatacgatcaacgtctccctctctttttctttttttccgaccctgtgcgaatagactgttaactattataggaaagactgttctcttctccggtaaatggtctcgctctctcagcattatacgtatgatgtattcgtggtagatccacatttagaacaaggatcgccctgcataggagagtagagagcagggcaacagcctagatactcagtctttaatataccacagcagttaggagggacgttacttcacgcttacttgtcatctcctcgattgcagcataccctcccacagttctgtaacctctcatgggcatgataatgcgcttcagcttgaatttaatcacaccgatcagcagttttgtcgcccaagccacaaaatcgactgtggatacttaccttgaccctcccgtggcaataagacccctgcatacacttcgccttgatctttttgacgctgtctctacgcgagcccccccggtagcttacgacggacagagagtgtctcattatagcgtattgcttacgcatataccactgacataagtatctccgtctcactgccaaatggaacagtatctcaccaagaaagagccgcccaaagctcagattggaacaattgtcttcctctatatggacatcgtcccgcacttggtaatctcacaatatcctaacaagacgccgcgcgcttttggccgagctcattgggggtggtgtgatccatgtagttcttcatggggcctcttcctcctactgcgcccgttagcataaaacttgccattacggtctatgtgtaataagacagtactccacaaccttccgacaacgcgacccccttcagactcgcatctatatgctcaccgctttgcgcagcagcgattcactctgctgcatgcgcacttatattctcacatcagaatacctgacagattagagactacaagccgcgtgctcgctataggcgccatcaccacgcaacagagctcataaacgcactacagacctgacacgccactcctcgtcttcgtcgtgtgctacatcacggctatgtgacgctattaccattctccgacataggagtcgctcagcgaaggagactaatagacgcatgtatcggagggatcacagagancatgagatctacagcatctgcaagtaggacggtatatagaggttaatacgtctcatcacattatacgaagcgtagntcacaactatcgacggaatactcataattcgccatcgacatactacgctacatactccctn

SEQ ID NO: 2122 - DNA, 2449 bp, Glycine max
  misc_feature (1)..(9): n is a, c, g, or t
  misc_feature (2449)..(2449): n is a, c, g, or t
  Probeset Number=SeqID_11901
nnnnnnnnnttatgcatctgatctttcctcatagattcctctcctatattgacctcccatctctcttaacgaaacacacacagagagcaaaatagtaaaaatgtcaaaggacaaagtttccggtgatccaagacgtgcagtgtgcacaggtatcaccatcttcctcctcttagccggcgtcactctcctcgtcctctggctggtctaccgtccccacaagccgcgcttcagggtcatcggcgccgccatctactgcctcaacaccatcacgtcgtcgctcatgtcaacgaccatgtagttctccaacctgttaaaggacccgaataaacgtgtctacatctactgcggcaggttctccgcgtttatctcgtacaggaaccaagctataacgctgaaggaactttatgttgccactgttatgggtgacgagtagtccggcatcattgtacaccgcgaacgggtacacggcccgaaagcgttttattaagcccgactatgattaggaattcggactataacacttcgtggtttgttggatcttatacaccaagaaaagtgaaggatggtatcctgtagccgtaaatgaaaggggtgctgttctagggggatttagaggcgtgatgatacatggcgaggaagaacagaattggatcgtgatgcattttttggggattgtgaatatggatacaatcacaccacgccgtgccaatagtcttgcaatgtccatcatggggatcatgtggccttgtagccattaggaggaaaccaaatatgaagtgagtgattaatgtttgtttggaaaaccatggctactaaaagaggcaaatgaaataagaattagtacgtagcatacgtagtattacattatgctactttttctcgattttgcaaatcgagtttttattctaatgaagtttgtcattctttttgcatgtaggtttatgcaatgacaagctgtttcaaaacgaacatctgcaatgactacaggaattctttgatctgagtccatagaaggtcaaagcacatgtttcaaggtgcctacatgtgatgatatgttttcagtgggaaggcgcccatgtggaaatattaacatcgaaactaagttggaaaggtctatccgataagttggcaaattgctcttaaaaggcaattttatgaatttactttgccctcagtatgctattagatatacaaactgatattagccttgcggataatagttgagatctacaattatgctgaaaaaaagcaaggatggcaggatgaaattcgaaataataaaaaaaatcaagtttataattggatgttttttgagaacataaataaatgatgatagacaaagaagcgtgcttatgataatggtggatattgaccactacaaatttattttatgagcatttttcaacgtggttgagatggctttttgttgttaaatatacagactaccccacgcacaatattactcagtagacatggtgaaagtcagtatattgtgagaggcaaaattggaggggggaattcaataaatgaggcaggagaacttaatagaatgaagttagctaagaatgattgaaagcgtctcaaaccagagcgggcagtttcaagctggaatagttcactactacgaacaattctggcagccagtctaattgttggatatacctagaaaacaaggcgtaaaattaatgagataaactgaagggggtctgaaggtatgaagtgtgcaaaaatgaagagaaactggcctcaggagctcgcacaaaaactgtaagaacagatttgtcaaggttgtgagttagcttttctattcaggacaaacggccacgaaatggaatagagtaatctagggagaaagtttgaaaggacatctgtttgtgagatttcctaagatacaattgctagcgcttgatgaaaaaaaagccggtgtgtgtgatgggaagacatatgaagaaatcaaaaattacatgccagaggagtattaatccagcaataaggataaacttaggtatcgttatcctcgtggagagtcttacttagatgttattcaaaggttagaacctgtaattattgagcttgagcgacaacgagcacctgttgttgtgatatctcaccaggctgttttgagggcattatatgcttattttactgacaggcctttgaaagaaattgcagatattgagatgcccctccatacgataatagagatacaattgggagttactggtgttgaagagaaaagatacaaactaatggactgaaatgaactgaagggaaagaatagatttaaatgaacatttttgtttttatgaggggaaaaaatgatgattatcaatttatcgtgtatattgtaatcttctaaaaccaccccttttaataatttttatgagcattccttagcttccaatttgaagaattttgaacatcaaaacaaaaacaatacttattactn

SEQ ID NO: 2123 - DNA, 495 bp, Glycine max
  Peptide Sequence Number=SeqID_9649
  Probeset Number=SeqID_11902
tcttttagcagtgttaacagctgctgatattgctgtacaatatccgttgtcgggctgaacatggtttacgccgctagttaattaacatcatgatccgtatgctagctgtacaaagcgaatgccctggccaggaactatcatttttgacccatcttttgataatcctttggcaagggtccacttttggatccactcaaaattttgagtcattaagtaaaataatactccctccgtcccacaatgtaagacgtttttgcaagctagtttagcttgcaaaaacatcttatattatgtgatggagggagtagtaaattcagttgtgtttctatagaaatatgaaaacggccctgaaattattggttgactcattttggtttgtttacttccgtgtgcaaggctgcgaataattttgagctcggaacactctgtttgtggcttgccgcctttcttttttcggctgtgtggaccttttacagcttctgatttttctcgcat

SEQ ID NO: 2124 - DNA, 207 bp, Glycine max
  misc_feature (49)..(55): n is a, c, g, or t
  misc_feature (70)..(74): n is a, c, g, or t
  Probeset Number=SeqID_11903
ggcaggacagaaatgaattttggtctttgtaatttacttgtgagtcaannnnnnnatgagtagtctttgnnnnnactttgtaggttgtttcttgtccatgtgcattgggtcttgctacgcccacagcaatcttagttggcacctcacttggagtgtttgctagcattctcattgctcaaatattgattcattttatctgttaccaat

SEQ ID NO: 2125 - DNA, 1570 bp, Glycine max
  misc_feature (27)..(27): n is a, c, g, or t
  misc_feature (129)..(129): n is a, c, g, or t
  misc_feature (164)..(164): n is a, c, g, or t
  misc_feature (235)..(235): n is a, c, g, or t
  misc_feature (243)..(243): n is a, c, g, or t
  misc_feature (486)..(486): n is a, c, g, or t
  misc_feature (636)..(636): n is a, c, g, or t
  misc_feature (1058)..(1058): n is a, c, g, or t
  misc_feature (1072)..(1072): n is a, c, g, or t
  misc_feature (1110)..(1110): n is a, c, g, or t
  misc_feature (1265)..(1265): n is a, c, g, or t
  misc_feature (1313)..(1313): n is a, c, g, or t
  misc_feature (1540)..(1540): n is a, c, g, or t
  misc_feature (1570)..(1570): n is a, c, g, or t
  Peptide Sequence Number=SeqID_9650
  Probeset Number=SeqID_11904
cgcgcacgcgcgacgtcgcagtatccncgtctagacatgctagtactagtatcgatctcagctcgcgtctctacacactcacagtatctcagcacacgccacgcacacaccacctctcgcagccttcanatatgttctatcgagcatagacgcaatcagacccntgtacgcggcatagaggcttatatcactgtcatgtctctactggaactcaatactctcacatagcgagatnacaagttnaatacatctcaccacatgcatgaactacgcgcttgtcctgatgtgactcgttcggctccacgatagtgaatcgtgacgacgcgtaatctatgttgtgtgaagtgaagacgtagtgtagatatgtctgtagatatatagtctgttgcttttattccgcctgctgctcaatccgctctactcactatatactatatcataatgagataagacgacgagagcactctactacgcactgcacgatcngactcgatgcgtggtgtccgcacatatacaagtgacgcagatatatattagccagagagaagtcatactacgtagcttatacaatattctatattaatagtagatcactctatagacacttcgatagcgtactatatagacactaaatanactacttacacaccgtaccgaaatagtcttattaagcgaacctaatatgatgatgaatgcattctccgttcgtagattctctagcgtatgcctacactagatgcattcattactatggcacagagccccgcctctcctctcacctgcttgttcgctgtctgttgtctatgatgatgcgcgtcgatatgatggcgccgtgcgacagcgatagtgctggtgatgtagtaatatatatgatgattagtggatccggcagatggacgtagcgacatcataatctacgtaactgagtcacggcatatcttcgcgcgctgagaccccgtgtccatcacactatctgctagagacgatgcgcgtgtactggatagcgacatcgtgcatcgtagcgatacacatgacgatatgtacgtcactatcttgancgctgcgccgcacnaggtatgtattactctctatctcaagtgtagcacagtntcgattacgcattacgtctaatctaaattcgcatggatatatcgaacctacatatactgttagacagataagcatcttagagatacgcgatcagattatcaccgacagagcgaaccgcgccgcgcagcgatacgtgttatcatatgagtcactcncgccgacgctatgcgcacgtcacagtctacgcggttgtcgatgatagngcactaatagcgcttattgaagaacagtatatgtagcatatcatcgcacactattatcgacatataatgtcgtgcatcgcgaatactcactatctaattcaactcgatcgcatctagtctgattcgatagtgtcacgatgtgatgtgtgtatacgaatctacgcatcactcttacctcttcactcactctagtcgtgcacctttatactccgtatatgtcatgtcantgatgctgtgcacgacgtagtactgtgcgn

SEQ ID NO: 2126 - DNA, 488 bp, Glycine max
  Probeset Number=SeqID_11905
aaaaaaccctaaaagaaatcatttgacggcgcctctccacactccacaaccatgcctcctaagttggacccgagccagatcgtcgacgtctacgtccgtgtaaccggaggagaagtcggagccgccagctccctcgctcccaagatcggtcccctcggtctcgcccccaagaagatcggagaagacatcgccaaagagaccgccaaggagtggaaagggctccgcgtcaccgtcaagctaacggttcagaatcgtcaggctaaggtcacggtggttccatctgccgcggcgcttgtcatcaaggccttgaaggagccggagagggaccgtaagaaggtgaagaacatcaagcacaatggtaacatttcgtttgatgatgtgattgagatcgctaggatcatgaggcctagatctattgctaaggagctgagtgggactgttagggagattcttgggacttgtgtctctgttgggtgcactgttgatgg

SEQ ID NO: 2127 - DNA, 496 bp, Glycine max
  misc_feature (2)..(2): n is a, c, g, or t
  misc_feature (12)..(12): n is a, c, g, or t
  misc_feature (15)..(16): n is a, c, g, or t
  misc_feature (47)..(48): n is a, c, g, or t
  misc_feature (50)..(50): n is a, c, g, or t
  misc_feature (55)..(55): n is a, c, g, or t
  misc_feature (57)..(58): n is a, c, g, or t
  misc_feature (60)..(60): n is a, c, g, or t
  misc_feature (63)..(64): n is a, c, g, or t
  misc_feature (68)..(68): n is a, c, g, or t
  misc_feature (70)..(70): n is a, c, g, or t
  misc_feature (74)..(75): n is a, c, g, or t
  misc_feature (82)..(82): n is a, c, g, or t
  misc_feature (85)..(85): n is a, c, g, or t
  misc_feature (95)..(95): n is a, c, g, or t
  misc_feature (98)..(98): n is a, c, g, or t
  misc_feature (108)..(108): n is a, c, g, or t
  misc_feature (113)..(113): n is a, c, g, or t
  misc_feature (115)..(115): n is a, c, g, or t
  misc_feature (122)..(122): n is a, c, g, or t
  misc_feature (159)..(159): n is a, c, g, or t
  misc_feature (167)..(167): n is a, c, g, or t
  misc_feature (171)..(172): n is a, c, g, or t
  misc_feature (176)..(176): n is a, c, g, or t
  misc_feature (188)..(188): n is a, c, g, or t
  misc_feature (193)..(193): n is a, c, g, or t
  misc_feature (222)..(222): n is a, c, g, or t
  misc_feature (237)..(237): n is a, c, g, or t
  misc_feature (321)..(321): n is a, c, g, or t
  misc_feature (333)..(333): n is a, c, g, or t
  misc_feature (347)..(347): n is a, c, g, or t
  misc_feature (352)..(352): n is a, c, g, or t
  misc_feature (355)..(355): n is a, c, g, or t
  misc_feature (379)..(379): n is a, c, g, or t
  misc_feature (385)..(385): n is a, c, g, or t
  misc_feature (390)..(390): n is a, c, g, or t
  misc_feature (393)..(393): n is a, c, g, or t
  misc_feature (395)..(396): n is a, c, g, or t
  misc_feature (401)..(401): n is a, c, g, or t
  misc_feature (416)..(416): n is a, c, g, or t
  misc_feature (419)..(419): n is a, c, g, or t
  misc_feature (421)..(423): n is a, c, g, or t
  misc_feature (428)..(428): n is a, c, g, or t
  misc_feature (432)..(433): n is a, c, g, or t
  misc_feature (439)..(439): n is a, c, g, or t
  misc_feature (441)..(441): n is a, c, g, or t
  misc_feature (447)..(447): n is a, c, g, or t
  misc_feature (454)..(455): n is a, c, g, or t
  misc_feature (458)..(458): n is a, c, g, or t
  misc_feature (464)..(464): n is a, c, g, or t
  misc_feature (476)..(477): n is a, c, g, or t
  misc_feature (483)..(483): n is a, c, g, or t
  misc_feature (492)..(492): n is a, c, g, or t
  Peptide Sequence Number=SeqID_9651
  Probeset Number=SeqID_11906
antagagaaaanacnnaaagttctgttctttttcccacccaattcgnntntctcnanngnctnngatnantttnncttctcngangttccaccgntgntaaggagccncgtangnagctgancaccaaggtcggctcggaagtctgctccggctaccgngggggtgnatannacgnacatgattccgntcggnaaccgtagcgctccgcgagatccgcaagnaccaaaatgagcacntgaacttctgatgcggaagctcccgcgtccatgagattggaccgcgagatcgcgcaggacttctcgaccgaccattcgatttcngagtatccgccnaactccgtcctccngaaantcnacgaggactacttggcatggtacnctgctnagacnccnanntctgnactattcgcgccganggngnnnctatnatgnncaaggntnttgaantcgatannggnattatngacgagcgcgcnnaaatcnaattattgnttct

SEQ ID NO: 2128 - DNA, 1686 bp, Glycine max
  misc_feature (1)..(1): n is a, c, g, or t
  misc_feature (92)..(92): n is a, c, g, or t
  misc_feature (218)..(218): n is a, c, g, or t
  misc_feature (223)..(223): n is a, c, g, or t
  misc_feature (244)..(244): n is a, c, g, or t
  misc_feature (575)..(575): n is a, c, g, or t
  misc_feature (589)..(589): n is a, c, g, or t
  misc_feature (719)..(719): n is a, c, g, or t
  misc_feature (905)..(905): n is a, c, g, or t
  misc_feature (1010)..(1010): n is a, c, g, or t
  Probeset Number=SeqID_11907
ngagctgcgagatatgtctacgcagcgagaccgcatctacactgagcgtgcgtgcttggtctatacgctactgccattcgtatcgtgtgatnccatactgtaatcgcatacgtcgtctgcagcgttcataccgtctctctctcttcgctatgtctttttacgccctctcagctgcgagcatataagtgcgggagcagtactcaagacgtgtcatagtngatgncaacgatgacatatctctcgnttgtgctatcattcgagcgcgctacacgctgcgcgatgacgcgcagggcgccgtctagagatagtactagagagcgcatgacaccatatttcgtagcatatctgtataatcagactgtgcagaaggcagcagcattgttcaactgtgcatcactctcttacatacagacagatacagatacgctacatgcgacttacccgctcgtaatactgaagtcgatagtcatagtattattccgtgtacaacgtatcactttctcgcgatcagtcgtgcagccgtgcgtacataactatttgttactcacgcccgtgtacaaatatacgcgcggtanatataactgcgacngtctacacgcagacacatccccatcatcacgcgaccgcgacctcatacgcactcgtggcgacggcgatatatatataggtgctatcgtaccgccgcacccccagtgtagcggggtggtgtttgaaatgtngccactgtcacgcgcacacaataacaacagtaatgtaactcgcacctctcctgtcacgtctacgtgctgtcttcacaaccgtgactcatatacagaacatttgtgttgtctggttgtatattactataaaagaaggcggaataacatatatcgccgctaacccctgctcgctagctaaggacaacngcgacacagtggcgcgagtacacgtacgatatgatagcgtcgtgattccctcttatcatgacgcgatgatatacttgttactctcgcatataccaacaactcgcnccaccgcggcgcaatatgtgtgtgctcacagcactatcgttatagacgacaggcggtgtccgcgatgtgtggagaactctacatatctatgtttatgtcgatatcctccctcagagtttacatagtagagtctcataagtatacgcgttatagtacccgcgccgtgcatctgttaatataccgcggcgacgcacgcgcgcgccgagtcggaacgccaccatatatctccgcaaaattcgcggaatacgcccgcaggcgtcgaataataagctggcgcgcacacgatagacgcgcggcgtcgcgcggcatcggtacagataatatgatagacgacgggcggaggaggccggtgctgggatattatgactggtgtgtcagcgtgcgatattacgtacgggcccggcggcgtcgcacggaatattcggaaaggtgggtgcacatactcgtcgaacacgtcgagcgcgcagtcgcgttatatcatctctacacttcgtccatcgtggtagatcacgatgaatatagtgtaggcagatgtgtagatgggtgtgcggtgtatactactaagaatgtgctgcagtgtcatagtcaataactccagacatcgactatatagcgagaggtgataaaattaacggtaaactagcacggagtaagagatgagatgtgagaatcgtaa

SEQ ID NO: 2129 - DNA, 2198 bp, Glycine max
  misc_feature (1)..(1): n is a, c, g, or t
  misc_feature (28)..(28): n is a, c, g, or t
  misc_feature (82)..(82): n is a, c, g, or t
  misc_feature (118)..(118): n is a, c, g, or t
  misc_feature (126)..(127): n is a, c, g, or t
  misc_feature (136)..(136): n is a, c, g, or t
  misc_feature (139)..(139): n is a, c, g, or t
  misc_feature (150)..(150): n is a, c, g, or t
  misc_feature (209)..(209): n is a, c, g, or t
  misc_feature (219)..(219): n is a, c, g, or t
  misc_feature (248)..(248): n is a, c, g, or t
  misc_feature (255)..(255): n is a, c, g, or t
  misc_feature (262)..(262): n is a, c, g, or t
  misc_feature (315)..(315): n is a, c, g, or t
  misc_feature (337)..(337): n is a, c, g, or t
  misc_feature (342)..(342): n is a, c, g, or t
  misc_feature (349)..(349): n is a, c, g, or t
  misc_feature (363)..(363): n is a, c, g, or t
  misc_feature (423)..(423): n is a, c, g, or t
  misc_feature (426)..(426): n is a, c, g, or t
  misc_feature (505)..(505): n is a, c, g, or t
  misc_feature (521)..(521): n is a, c, g, or t
  misc_feature (615)..(615): n is a, c, g, or t
  misc_feature (632)..(632): n is a, c, g, or t
  misc_feature (634)..(634): n is a, c, g, or t
  misc_feature (663)..(663): n is a, c, g, or t
  misc_feature (688)..(688): n is a, c, g, or t
  misc_feature (695)..(695): n is a, c, g, or t
  misc_feature (737)..(737): n is a, c, g, or t
  misc_feature (740)..(740): n is a, c, g, or t
  misc_feature (759)..(759): n is a, c, g, or t
  misc_feature (793)..(793): n is a, c, g, or t
  misc_feature (798)..(798): n is a, c, g, or t
  misc_feature (863)..(863): n is a, c, g, or t
  misc_feature (889)..(889): n is a, c, g, or t
  misc_feature (926)..(926): n is a, c, g, or t
  misc_feature (953)..(953): n is a, c, g, or t
  misc_feature (997)..(997): n is a, c, g, or t
  misc_feature (1023)..(1023): n is a, c, g, or t
  misc_feature (1050)..(1050): n is a, c, g, or t
  misc_feature (1060)..(1060): n is a, c, g, or t
  misc_feature (1064)..(1064): n is a, c, g, or t
  misc_feature (1076)..(1076): n is a, c, g, or t
  misc_feature (1094)..(1094): n is a, c, g, or t
  misc_feature (1099)..(1099): n is a, c, g, or t
  misc_feature (1107)..(1107): n is a, c, g, or t
  misc_feature (1121)..(1121): n is a, c, g, or t
  misc_feature (1129)..(1129): n is a, c, g, or t
  misc_feature (1131)..(1131): n is a, c, g, or t
  misc_feature (1134)..(1134): n is a, c, g, or t
  misc_feature (1144)..(1144): n is a, c, g, or t
  misc_feature (1180)..(1180): n is a, c, g, or t
  misc_feature (1184)..(1184): n is a, c, g, or t
  misc_feature (1206)..(1206): n is a, c, g, or t
  misc_feature (1224)..(1224): n is a, c, g, or t
  misc_feature (1230)..(1230): n is a, c, g, or t
  misc_feature (1251)..(1251): n is a, c, g, or t
  misc_feature (1256)..(1256): n is a, c, g, or t
  misc_feature (1261)..(1262): n is a, c, g, or t
  misc_feature (1330)..(1330): n is a, c, g, or t
  misc_feature (1332)..(1332): n is a, c, g, or t
  misc_feature (1357)..(1357): n is a, c, g, or t
  misc_feature (1368)..(1368): n is a, c, g, or t
  misc_feature (1401)..(1401): n is a, c, g, or t
  misc_feature (1533)..(1533): n is a, c, g, or t
  misc_feature (1577)..(1577): n is a, c, g, or t
  misc_feature (1586)..(1586): n is a, c, g, or t
  misc_feature (1625)..(1625): n is a, c, g, or t
  misc_feature (1630)..(1630): n is a, c, g, or t
  misc_feature (1632)..(1632): n is a, c, g, or t
  misc_feature (1647)..(1647): n is a, c, g, or t
  misc_feature (1677)..(1677): n is a, c, g, or t
  misc_feature (1679)..(1679): n is a, c, g, or t
  misc_feature (1685)..(1685): n is a, c, g, or t
  misc_feature (1704)..(1704): n is a, c, g, or t
  misc_feature (1740)..(1740): n is a, c, g, or t
  misc_feature (1764)..(1765): n is a, c, g, or t
  misc_feature (1768)..(1768): n is a, c, g, or t
  misc_feature (1777)..(1777): n is a, c, g, or t
  misc_feature (1845)..(1847): n is a, c, g, or t
  misc_feature (1850)..(1850): n is a, c, g, or t
  misc_feature (1856)..(1856): n is a, c, g, or t
  misc_feature (1859)..(1859): n is a, c, g, or t
  misc_feature (1882)..(1882): n is a, c, g, or t
  misc_feature (1884)..(1884): n is a, c, g, or t
  misc_feature (1913)..(1913): n is a, c, g, or t
  misc_feature (1926)..(1926): n is a, c, g, or t
  misc_feature (1940)..(1940): n is a, c, g, or t
  misc_feature (1959)..(1959): n is a, c, g, or t
  misc_feature (1964)..(1964): n is a, c, g, or t
  misc_feature (1991)..(1991): n is a, c, g, or t
  misc_feature (2005)..(2005): n is a, c, g, or t
  misc_feature (2011)..(2012): n is a, c, g, or t
  misc_feature (2015)..(2016): n is a, c, g, or t
  misc_feature (2029)..(2029): n is a, c, g, or t
  misc_feature (2033)..(2034): n is a, c, g, or t
  misc_feature (2037)..(2037): n is a, c, g, or t
  misc_feature (2041)..(2041): n is a, c, g, or t
  misc_feature (2043)..(2043): n is a, c, g, or t
  misc_feature (2079)..(2080): n is a, c, g, or t
  misc_feature (2090)..(2090): n is a, c, g, or t
  misc_feature (2093)..(2093): n is a, c, g, or t
  misc_feature (2098)..(2098): n is a, c, g, or t
  misc_feature (2102)..(2102): n is a, c, g, or t
  misc_feature (2107)..(2107): n is a, c, g, or t
  misc_feature (2117)..(2117): n is a, c, g, or t
  misc_feature (2119)..(2120): n is a, c, g, or t
  misc_feature (2125)..(2126): n is a, c, g, or t
  misc_feature (2151)..(2151): n is a, c, g, or t
  misc_feature (2155)..(2158): n is a, c, g, or t
  misc_feature (2160)..(2161): n is a, c, g, or t
  misc_feature (2163)..(2164): n is a, c, g, or t
  misc_feature (2166)..(2166): n is a, c, g, or t
  misc_feature (2169)..(2171): n is a, c, g, or t
  misc_feature (2173)..(2173): n is a, c, g, or t
  misc_feature (2175)..(2175): n is a, c, g, or t
  misc_feature (2179)..(2179): n is a, c, g, or t
  misc_feature (2184)..(2184): n is a, c, g, or t
  Peptide Sequence Number=SeqID_9652
  Probeset Number=SeqID_11908
ncgacatgtggagctcgatgagcgactntgtgttcactcatccacgtctacgctaacatcatcgtgtgacgactagtagacnagcacactcagtcctctcgtaagacagcacgacgtnacatccannagagatgtnatncgttgcatcancgctgcagctaacgactagattatgactgctactatcatgcagtgtcgtgatgtcgagntgtatataantatcgacagcagtaacgagatcgagcgantacggcngcgtcgngagtcgtagtagactacagagcagtgagcgagacgcagcatacatacttcgtntcatctgtcactacacactctnactcnacgatgntgtctcgtatcatnacgtcacatatgagctgacgatcgtgagtgcacgtgagtagagctgtagagtgtgtagcntgnattcatgaccatgtagatgaaagatgagtatagtcgtcggagctgatctagacagtttgtgctaattatagtaagtttnaatactatgtggctgntgatctagagagcgatgcgtatgatgctgctgtcgagtagacgatacaactacgtagtcggtcacgagtgcagcgacatcgtcatatgtatcgngcgtcatgacagatagnangtgcatcatatctactaacacaagaatgntagacaagacacggtgcgtcggtantgaagcngactatgatgtgcgtcgtcgacggcgcgtagtgtgtgtttgntgntcgtactagtagtgaagtntacgtaaccacatacgcacacacgtcgatgacangagantacgcagtcctgcgtcgatcgttggtcactgcagacacccaattatcgatcagtacgatcatcangtcacgttcatcacactcgtgtttantatgatcactcagctgatttatgctgttgtctctttntacacactcttcatatcactgtatgtncagatgacgcgacctataatcatatatgtaagtatatagatgtngtgtgagagatagcgtgagacgatgnagccacagggtagagtgcttgcacctnaccagtgacntgcngctaccccgtcnattcacttaagatcatantatgncgagatcngcgactagtactgnatcgctgngngtnactcactcancacgaagacacgccgtcgcactaatctcaatcatcnaatnagatacatagtgtgacagagcntcgtactatctgtaagcntagacntgtggacgtccgacacaccanacacnaactnncgtcgacgagagtatcactgacatatacatcatgctacatcacatatatatcactgatcatgagtagngntagttgtggatactactacatcgcnagtgtgtacantagtagtgtctggatgtcatgaatatagtgtgntgtgtagtgtgcgttgatatatagtgatatgctagagagtgagatgggaagtatatcaagtaatgtacgaactatatcagaatagcgtcgtaccataatatagatatctcgacgatgacacgaagacagcancagtctcatacgcgtcatctacgcaatcgcatgcacgcgtctangagcgcagntctactaacagtagtagagtatagtagtagtgacagtanacgcngncttatatcacacgtngcttgccacgcgtcgctacagagattgggntntgatgngttgtggtttagtatatcntctctcagtcagaatacatcactcatcagagcgtancatcatacgattcatgactatatnnatntactacatnatccgtcacttattacttgcttcatcgtcgctattgctactgctactatatgatcatactgaatcatnnntanatcatnatncactaatactaaattcatacatnanaacatagtacgacaacgagaacaattcanatatagataatanagtacagatcgacngatcgtcaaatgatatggngatgnatagtatagtacgtactagcgtgttcnggtgtgtttatgtntggttnnttnntgggtggcacatnacanncanctancncactcatcaccaaccagacacccccccgccgagtcnnaaggacgacnganacgangtangacanagagggacgnanngagannacgactacggatgacgcgccaccgnccgnnnncnngnnanacnnnancnaaancaaanaaaacaaaaaaaaa

SEQ ID NO: 2130 - DNA, 477 bp, Glycine max
  Probeset Number=SeqID_11909
attaatcccattgctcctaatccaatgtcgtcccggccagccgtcgaccccgagtcgtccccggcggcgcagcaggctccactgctcggcaacgctgacggccggacacaaacaacaaccgttgtaggcaaggccctgagcagcaccgctgacctcgcgaagcacctacccaccggagccgtgctggccttcgaattcctctcgccgaccttcaccgccgacggcagctgcacggccgccaaccgcgcgctcaccggctgcctcatcggcgcctgtgccctctcgtgcttcctcctctgcttcaccgacagctaccgcgacgagacgggcaccgtgcgctacggcttcgtcacgcccagcggtcgcctgagactcatcgacggcgcccagcagatgccgccgcgggacgagagataccggctccgcgcgagggacgtgctgcacggggtgctgtcgttcgtggtgttcctggccgtg

SEQ ID NO: 2131 - DNA, 1366 bp, Glycine max
  misc_feature (126)..(128): n is a, c, g, or t
  misc_feature (130)..(130): n is a, c, g, or t
  misc_feature (136)..(136): n is a, c, g, or t
  misc_feature (365)..(365): n is a, c, g, or t
  misc_feature (423)..(423): n is a, c, g, or t
  misc_feature (644)..(644): n is a, c, g, or t
  misc_feature (672)..(675): n is a, c, g, or t
  misc_feature (820)..(820): n is a, c, g, or t
  misc_feature (825)..(825): n is a, c, g, or t
  misc_feature (1097)..(1097): n is a, c, g, or t
  misc_feature (1166)..(1166): n is a, c, g, or t
  misc_feature (1178)..(1178): n is a, c, g, or t
  Peptide Sequence Number=SeqID_9653
  Probeset Number=SeqID_11910
gggtggtggtggtttgtgggtgtgaggtgttgtatcttattgtggatattactcgtaggtattcaaccatcataccaccacgacatactgtcgtcgcgtgcttccgtccgggtgggtggccggccnnntncttccncacatagactagacaccccactcgacgtgtggggggtgggaatgtgtcgttttctatgctttcttgcttgtgtcgtgaggtgtatcaatatacaacatcaaagtagttacacatatataggtgggtgatgctcccctattctctttgactatggtgtgaatttgtagtcatataagacatccaattgttccaaaaacaacagaacaccaacatcagcaattaggaaaantgtagtccttggaggtatggcgtcctcactcatacatctttcatactctctaagaacntgagtggagcacacaacccatacacccttgccgtctgatgttatgtgatatctaagttgtaggctgggggcgggcgcgtattcggccgctggaccaacgtgcgtggtggcggccgtgccctcccaccacgctctatccctccccaaggtgacacaactatcgctagaatggatttacagtagagttgttggtagtagaatatggtatagtatataatagtnattagtaattaatataatttaataagtnnnnttgagtatgataataataataactaactataaataataagcgatatcattgttacacccaccacctcacgtgtccctccgcccccctcaacctacatctagtgggaagagggagacgtacgtctctctctgctctctcactcccncaccncgcgtcactcggtggaagcactactgcataattcttataagattactgatacactacgacaacactttgtgtcctgtcgacgagcacgaaataataccggtataactaatataacagaatatagggatgtagcctacacctagttctacgatatacagtatggtaagacgcgagactcgatcgatttgtgacgataatatcactcagtctcactcagaccaccacatctcgataacatatcagcactgtgttcaatgactatgatatttcgnggtgttgtcaaatgacaagtcacgcgtagctacacaccaagaaacaacaaggtgacagaagctggcgcncccgccgtgtgngttggtggtgaggctcatactacatattaatatgctgatctctctcgctacaccatgatgcgtgttgttgttgttcgcttcgcgttctgtcgacactacatacagtggatcgacacacctgcacatccacaccgtgtccgcggagacagatgttcacctagacatcatctgtgtgcctgctgtgcgcc

SEQ ID NO: 2132 - DNA, 459 bp, Glycine max
  Probeset Number=SeqID_11911
agatcaagggaagaagcgaaagctctggcgagcaagcaagaaagcaaccatgtcgtggatgaaaggagatttactttccaaaaccaggaggcttgttggtggactcgctacaagagagcccgtttggcttaaagccatggaagcatcacctcctcctgtctttcctcgctctaatgggaacctcaagaagattgttctccctgaagatccctacgttcgtaggttcgcccgtaagcatcctgaagctaaactcgtcgagcccaacaaggtttcggcgtttattcctgatccagcacgggtatatggctgccgagtccttgaactgacgaagaatggcatcagcgaggatgacgccatgtctgtagctaatatggagtatcttgcagagagaaaggaaaagaagaaagcatacaaacgcctaaaggagcttgctgtactgcaggacaaggctcctcctcc

SEQ ID NO: 2133 - DNA, 1106 bp, Glycine max
  misc_feature (1)..(453): n is a, c, g, or t
  misc_feature (1054)..(1106): n is a, c, g, or t
  Peptide Sequence Number=SeqID_9654
  Probeset Number=SeqID_11912
nnnnnnnnnnnnnnnnnnnnnnnnnnnnnnnnnnnnnnnnnnnnnnnnnnnnnnnnnnnnnnnnnnnnnnnnnnnnnnnnnnnnnnnnnnnnnnnnnnnnnnnnnnnnnnnnnnnnnnnnnnnnnnnnnnnnnnnnnnnnnnnnnnnnnnnnnnnnnnnnnnnnnnnnnnnnnnnnnnnnnnnnnnnnnnnnnnnnnnnnnnnnnnnnnnnnnnnnnnnnnnnnnnnnnnnnnnnnnnnnnnnnnnnnnnnnnnnnnnnnnnnnnnnnnnnnnnnnnnnnnnnnnnnnnnnnnnnnnnnnnnnnnnnnnnnnnnnnnnnnnnnnnnnnnnnnnnnnnnnnnnnnnnnnnnnnnnnnnnnnnnnnnnnnnnnnnnnnnnnnnnnnnnnnnnnnnnnnnnnnnnnnnnnnnnnnnnnnnnnnnnnnnnnnnnnnnnnnnnnnnnnnnnnnnnnnnggttgaagacgacacccaagatcaatcccaggaagccgacggctggaaaaccttggggacgtggacgacgaggtgggcagggtctgggtcgtgggcgtggtggcggacgttgattcggacgttgttgtgggtttttggtagaagattataagatatgcagcaagtgcttgtgcttgtttttaaggcagtctttggagcagatgttttattcctgtaattttcttgtatgagtttatatgcattcttgtttcatgatgctcttttcttgaatcaataatctgaaattatcttgcttaatttgtttcttttgaattgttgacatatctttctagtcgccaatgaaaaaaaatgccatgtttgtgttaagttgcacatcacaaaatttgtggcatttgcttgtacctttattgtagggaatttttcggagagaagttttaaagacgttgcaggagtgctgttgttagttagtcatgcagactttgttcatgttgccattttcttgcatcaataatttgaagttctcgtgtataattccttcctgttggataattgtcatatctctcaagtctccactgaaagaaactgcctatgtatgtgtagnnnnnnnnnnnnnnnnnnnnnnnnnnnnnnnnnnnnnnnnnnnnnnnnnnnnn

SEQ ID NO: 2134 - DNA, 1616 bp, Glycine max
  misc_feature (47)..(47): n is a, c, g, or t
  misc_feature (99)..(99): n is a, c, g, or t
  misc_feature (197)..(197): n is a, c, g, or t
  misc_feature (278)..(278): n is a, c, g, or t
  misc_feature (329)..(329): n is a, c, g, or t
  misc_feature (379)..(379): n is a, c, g, or t
  misc_feature (462)..(462): n is a, c, g, or t
  misc_feature (517)..(518): n is a, c, g, or t
  misc_feature (520)..(520): n is a, c, g, or t
  misc_feature (536)..(536): n is a, c, g, or t
  misc_feature (553)..(553): n is a, c, g, or t
  misc_feature (602)..(602): n is a, c, g, or t
  misc_feature (635)..(635): n is a, c, g, or t
  misc_feature (651)..(651): n is a, c, g, or t
  misc_feature (740)..(740): n is a, c, g, or t
  misc_feature (767)..(767): n is a, c, g, or t
  misc_feature (770)..(770): n is a, c, g, or t
  misc_feature (776)..(776): n is a, c, g, or t
  misc_feature (797)..(797): n is a, c, g, or t
  misc_feature (812)..(812): n is a, c, g, or t
  misc_feature (815)..(815): n is a, c, g, or t
  misc_feature (880)..(880): n is a, c, g, or t
  misc_feature (904)..(904): n is a, c, g, or t
  misc_feature (1029)..(1029): n is a, c, g, or t
  misc_feature (1040)..(1040): n is a, c, g, or t
  misc_feature (1130)..(1130): n is a, c, g, or t
  misc_feature (1181)..(1181): n is a, c, g, or t
  misc_feature (1221)..(1222): n is a, c, g, or t
  misc_feature (1225)..(1225): n is a, c, g, or t
  misc_feature (1408)..(1408): n is a, c, g, or t
  misc_feature (1445)..(1445): n is a, c, g, or t
  misc_feature (1464)..(1464): n is a, c, g, or t
  misc_feature (1466)..(1466): n is a, c, g, or t
  misc_feature (1498)..(1498): n is a, c, g, or t
  misc_feature (1502)..(1502): n is a, c, g, or t
  misc_feature (1506)..(1509): n is a, c, g, or t
  misc_feature (1515)..(1520): n is a, c, g, or t
  misc_feature (1566)..(1569): n is a, c, g, or t
  misc_feature (1574)..(1574): n is a, c, g, or t
  misc_feature (1583)..(1583): n is a, c, g, or t
  misc_feature (1588)..(1588): n is a, c, g, or t
  misc_feature (1591)..(1591): n is a, c, g, or t
  misc_feature (1594)..(1595): n is a, c, g, or t
  misc_feature (1600)..(1600): n is a, c, g, or t
  Probeset Number=SeqID_11913
aatagatatacgagatatagagagcagaacgcacaatgaggcgtggngggttgtgctatgtagcccgcgcgcacacagatggtgacgctgtagtgtcgngaatgatgaatgagtcagacacacagaagagaggagaagagcgtgaccacgaccaacagccacactattctcacgcgcgtcgccccatcgagcagagnaggagacacggatcgagaacaagtcgaatatgtcacagcacacaagagaagagtacggagactctgttatacagacaaatntaggagtgggatgtcaccgcacgctgtgtggggtgtgaggcgggggggtgnaggtgcagagagcgaagagagtgtacgcaggccgcgaatgatgctctctncatatttatacgcacaagacaacagattgagacgaatacaagacagacagacataagatacaaataaagagacgacagaaganagagagtaaatgatatatatattattatgacgcatgcgcagtgtccgtggggtgnngnggttgttggggttttnctcacgcacactctagnagctctatacatatatcatgcggacggtgatggaggtggtggtgcgcgncgaccgtactctagatctgctcacatcacaganaggagtaggtgacagnagagcgagagagagagatgtaacacactaaacataagacagcgacgacgctgcgcgcggtagtgtgtatatatacacggaggagtggtngacgattgtcttccctctgttatatcnctntctacncattctccaccatatatgcgnaccgcgcgccgtgtnatntgtttagtagtatcgatcggtcgtttcgtcgtatgtgttgtacttacgccgacacgcgaagaganagtgagagcgaggcagtgttagtnagcacagccccatgtatagtatcgagtatttggcgtggcagcaactcgattactacgtaacacaacatcacgcacgcgtgtggtctctcaacgacgttcggcgtggacaacgtgtgtgtatgcanaacatataagnaaatatgtgcaacgcgtacagcaatcaccaacgaagacatcgtcgcagcggcgcacgcgtaagagacgcacgcgcattcatacgtgctcnttacacaacaccacaaacaaaatgagtcatacaaaccacatgttcatactntccgcgcgctactgtcgcacgatgtgtagcacgacgagcnngtntgtatagagatgtatatgaaaggcgatgcatagtagacgagccgtcatagacgcgacgccccgcgcgtgttgtgtgccgtcgccaccagattttattcagattgcgacatgaccgcataactcgcgctcattcatagttatgtcacacctcgctacctctattctgcgctccgttgttggtanataaattctaactcaattacaaacaagaattatgtangtgatttaaggagatatantngcatcgcgacgtgtttgtatactatgaatgcntttnccgnnnngttttnnnnnngttaatcacacccactatacaatctctctcctttctttcactctcnnnntactnttcctcttnccctnttnttnnacacnaaacataactattcat

SEQ ID NO: 2135 - DNA, 701 bp, Glycine max
  Peptide Sequence Number=SeqID_9655
  Probeset Number=SeqID_11914
agattagcccactttgcttggcttaggattgttcttgcatcatcttaaaaaaatggcttcgctttctttactcagcggcggtgctctccaggctcgttgcgcaagacatgcacatgttagcccacgcgcggcgcatgctaccaaagccgcgcctccgtcctactctctaaccggcgcctctcgcaggaacctgctgttttccctgacggcagcgacggtggtgacgggactgcagcctgcatcaatggcggagactattccgttattcgggatcagaaagaagctgaagaaggcagaagaagaagcggtggagatcgtgaaggaaggcttcgagacggcggagaaaggactagagacggcggagaaaggaatagaggcggcggagaagggagtagagacggcggagaaagaaatcgagacggcggttagttacaacggattgacacaggcgggagcagtcgtggctgctgagttcgtgggagttcttgtcgcaacttcggtcgtcaacggcattttaggacctgaagcccagaagtcgtagacttttatcatttcaagactgaaagacatttgatctttaagtgtaatattgtgtctaaaagtgttgttcattacgcgttgaacgtatcgtaattttgtttgagttttatatataatatattttaaatttattttcatttggaataagtgaactcgtgtgg

SEQ ID NO: 2136 - DNA, 1730 bp, Glycine max
  misc_feature (13)..(13): n is a, c, g, or t
  misc_feature (56)..(56): n is a, c, g, or t
  misc_feature (170)..(170): n is a, c, g, or t
  misc_feature (649)..(649): n is a, c, g, or t
  misc_feature (899)..(899): n is a, c, g, or t
  misc_feature (1002)..(1002): n is a, c, g, or t
  misc_feature (1055)..(1055): n is a, c, g, or t
  misc_feature (1195)..(1195): n is a, c, g, or t
  misc_feature (1227)..(1227): n is a, c, g, or t
  misc_feature (1242)..(1242): n is a, c, g, or t
  misc_feature (1302)..(1302): n is a, c, g, or t
  misc_feature (1318)..(1318): n is a, c, g, or t
  misc_feature (1403)..(1403): n is a, c, g, or t
  misc_feature (1442)..(1442): n is a, c, g, or t
  misc_feature (1464)..(1464): n is a, c, g, or t
  misc_feature (1520)..(1520): n is a, c, g, or t
  misc_feature (1686)..(1686): n is a, c, g, or t
  misc_feature (1704)..(1704): n is a, c, g, or t
  misc_feature (1730)..(1730): n is a, c, g, or t
  Peptide Sequence Number=SeqID_9656
  Probeset Number=SeqID_11915
gcttccctttccntcctacacaccgggatcgataagttggtgagtcaggcgtacgnaccagcgaaattgaaggtatccgtgggtcatccctcatcgaaggtgcgtatgtgctcaatagaatgaaaacttattgttgatagcacagaatactttgcgcaccgataagaganatcgagtagcgggctcgatatacatcgtagtagtatcatgtgctcggggcgagcgagcggtttctttcttcctctactttattgacgatcgacaggtaccctattaaataatacacttatactatgattaatgtcttgacttcggagggcgtgatagcgccgtgcaacctgcctagcgatatctagatcgtacactgtgactgctgtccctggactattcgtcgtggactgccacgtatactgtgctggcgcgagtatacgcgcacacactagcatatacgttgtctccacgacagcgcgagacaaatcgactcttatcacaactcagacacaacctgctgtctatgtatattcggcttcgtgactctgaatcgtactctctgcttagcgcatgttatattggatggtgcacagactcacgcacagtcctcgttatgcgctcagatggctatactgcggccggctcgtgtggtgtgtgnctatcgcactcagcgcctccgcaacggcttagacgccagggtacatggtgaccgaatctcgacatgaagatgagatgtagccctctaccacgtcctgacggccggcttggtaacttgctatatcgaatctacgtagtatgctcacctgcctgatactcgtgaagtagtaccgcgctggcatctctatgtgctccgtgaagagacagggtgttaacacgagaatgtgcctgtggccaataagctatgaggnggatgtgctgggcagatacgtctgtgcgctctgtatgtgactgtatcgaggtgtacggatacactgtctgctcacgcgctgatggcattacgctcgatacccnactagacttactcatcgctgacgtttctatatatgtagccagctgtatgtatnatcacgtagcatcgccatgcgtgtatgacaacacgtatagaactatcgtccgaggtgtgtagtatgatcgatcgagtgacgcctcgcgcgacatgtagcagtgctacttgacgcgtgttgtctggactcctccatcttgngactcactaccgatagcactagttcactggtnctcgaacaatagcantaagctagctgtctcagtcaaagctcgcatcaatacacatcatagatatatagaaatttnatgatatgacatcgantacatgcactgaacgtctactctcacggctctacggcacttatatgcgcggtgatctcaactctagtcgtcacagcgattgtccntgtgataagcgcatcctgagtcgcaactctgtatgtgantatacgcacgcatgactaatcncaccgataggtcgcatatgagagtaacgatgcaactagaactaacgtgcgcacatntagagcgacacactctagtatatcatgaagcgtcgtcaagtatatcgaccgaagatgacatgactagcgatgatttacgtctgagtatatactcattcgcgcgtgacaactgcgacagtacgacgatcgcgcaggtcacgcgatgtgacatagcgtcacacagtcnacactgcagctgagctgnatcgatctgtatacgcatctcacctn

SEQ ID NO: 2137 - DNA, 629 bp, Glycine max
  misc_feature (452)..(452): n is a, c, g, or t
  Peptide Sequence Number=SeqID_9657
  Probeset Number=SeqID_11916
actcactcacttcagggtgattttttcttattctcttcctctctctctactctgagacacaaaggaaaattataagaaattatggctggctattcaagagcttcagatctttggatcctttttcttgtctgtggcttctctgaagataaggaaattttggttgaaggtaagactgatgaatggaaggattcagtctctgaatcagattgactcgaccaatgggcagaatagtctcgtgttccagatgccgactatcttgattggatatatgatgcttgaaaagactcagtgctgcgagtgagctgagaggactatgttgattgaagtgtctgatgccccctagaggagtctatgatgataccacagtggttgagcttgataatccagggacattctacttcatcagtcgctgaaagggtcactgtgagaatgctcagaagcttggtagcggnggctctagactgccaggaaaggcaccaggctcgctgactcttgctgatcttcaccagctgcttcctgctcctgctgatcttgaaggcctggctgctgctacccaccaatacttggcaagggtttttatatggggggaaatttttggggggacccctggggattctctcctttttggg

SEQ ID NO: 2138 - DNA, 421 bp, Glycine max
  Peptide Sequence Number=SeqID_9658
  Probeset Number=SeqID_11917
gttttcctgttcttctccaccatggccacgaagctccaactgtttcgattcatcttcttcctcagagcttgattttcaccggttacgcattcatcttcttaaagtcgtccttgatttcatcatccacgatctccatttattgtatgtttcgctcttgcaaggcggtggagaaatctcagtataaaaagcccggttgatgttcctacacgattgaggtgatgttgcttcgtttctgggaggctaggaatgttaggcagggtgatgaactcaaaacgatgaagatcaaggcttaaaattaggtgtaatcagaatttagacttttagactctcctctgttgatacggttcagtgattcgatccgtttttatgagaaatacagtaatgttctatgagtgaaatcaattaaaacttttcgttgaga

SEQ ID NO: 2139 - DNA, 827 bp, Glycine max
  misc_feature (781)..(781): n is a, c, g, or t
  Probeset Number=SeqID_11918
gaaagagtatattcgattctttttcggaataatacagtaaaataataatattcaatgatacataaaaatcttttaatataaaatacaataatttatcttagatttctagaactatttcttgcactataaactggttcagatttatatgctgacactggggttgaaggctcttgcttagcttgtgtataatgtttataaattcgatgtgtaagttctctgaactcgttatttttcatgagagttattgccagcttattactttgaactaatcctctttaacattcaagccccaaaagaattgttccctaaaaacccgcaatctctggaaaaacactttccagggatattattccccctaatcccgggggaaaaaaccttcctccccctgtaaaaaaaagaaaaccccaaaccccccttttcaaaaatcccccccccttttttgggtgccccttttcgctccccccaactctgtttacgccgcaaaattggcggatatttctcccccccccaaaaaaaatttgcccgccactttttttatctccccccacaacaaaaaattttttttttttttttcagaagaaaaaaatttttcggcggaaaaaaaaccccctctcgttagaatatctcccccaacaacaccccccccccccctcctttgcggcaaaaacttctcccccccaggagttcttttttcaccccccctctccccccaaattgtgggcggggcacaccccaccaaagttctcatcatcatatcacccctcccccctcctgacgcccngccccccagacgacacaaaacaaacactcccccccagccacaaacc

SEQ ID NO: 2140 - DNA, 677 bp, Glycine max
  misc_feature (611)..(611): n is a, c, g, or t
  misc_feature (677)..(677): n is a, c, g, or t
  Peptide Sequence Number=SeqID_9659
  Probeset Number=SeqID_11919
tcagctacgtaggcccccccccctcaattcccttttgtgtcgcttagagacctctctcgttcttgtttgtcagtccaaacacaaggttctatataccaaattgaaggaaatttagtatagatttcagaaacaatgttaatgacaacataaaggactaagggggtgtttcagattctactaaaaggagacatcattttgaaattttgatcacgccaatgtgaccggggttcagtgaaggtcacaaaaataacatcaattttataaaaagataacttttacaacatttcattttcaagggttctacaaaggaagtgtaaaaacaccttattacaatacacaaaacacaagagacactaagataaactcaaactagctaagagaaaaacttagaagtcaagattacctcagaaaagctacaaaagaaaggattgatgggtttttctccactaaatccttgaggtggattctgaggattccgctctgaatccttgaggtggttcggcggcaagctatgacggctcgtggtggctaccggtggtcgtggtgggtggcggagaagaaggtgtttgggtttgggtgggtgtttggagatgatgagagtgaaaaaaatngtgtttttcacactgaagaacatatttataatttgtagatctcgcttagcgtgctcgtctcactan

SEQ ID NO: 2141 - DNA, 1335 bp, Glycine max
  misc_feature (24)..(24): n is a, c, g, or t
  misc_feature (27)..(27): n is a, c, g, or t
  misc_feature (45)..(45): n is a, c, g, or t
  misc_feature (318)..(318): n is a, c, g, or t
  misc_feature (378)..(378): n is a, c, g, or t
  misc_feature (775)..(775): n is a, c, g, or t
  misc_feature (906)..(906): n is a, c, g, or t
  misc_feature (1056)..(1056): n is a, c, g, or t
  misc_feature (1129)..(1129): n is a, c, g, or t
  misc_feature (1211)..(1211): n is a, c, g, or t
  misc_feature (1224)..(1224): n is a, c, g, or t
  misc_feature (1280)..(1280): n is a, c, g, or t
  Probeset Number=SeqID_11920
tttttttttttctctgcttttttnttnaaacatcacactatcaantagaatatcacccccacaataacaacaggaatatataaaaagataaacatacttaaactctctctgacgaaagggcgaggccggcgctaataccctcgaaggcagccagagtccccgcagcccaccccctccttttactatttttatgtagacttcacaacaggccgtacgcgccgcaaggaatatcttaaagtaagatagaataatataggattaacatacatcacgtaaagtagtagatacatagacacaaagggtacgtgattgacaagnatgcgctcacctttctatatgtacgcgtcaaaactctctgcctagaatgtctagataatnggacaacaatagtaaggtgtacgctcgtgtgggtaatgtatacaaacgggccctggacatacatattagttttgataaaccaacacattgtcttattcacaatcagaacccctaacgtgtgaaatctccagacaaatcgtcatacgacgcatagcgcacatcttattgtatatgttttgcaatacaccaccacataatactcttgttcttttctctcgccccacgtcgccctatatcgtatttactctggcgcatacttgatactcgccacgtgaaactcaacctcctgatacttgtagcgacgttgctaaggaataataagcggctcatgttgtcctcgcgcatccactcctctgtgtttggccatctaccttctactaagaggcactgggaaatnattatacatactcggcacaagtagaatatcctaacaccacctttgcggcgacacaacaccctctcgactatctaatcatgtgatgagcgcgtgcgatactaatcacgcctatagtaatacttcaatagttnacactatcgatagtactataaacgtgccaccacaccccatacgtcaacaactctatctctccctcactcactgaatacgaagataccagcgtaactatatcatctggtacatcgacacacctctctctggcgacacttacactacataantcatatgacgacaacaaaggccacataatcgatgatggcacacataactattctaatacaaacgcgctacatntcgccttgagacggtatataagcatccacacaacctttgacaaattttccctcgtattctgcatacttgactatgtcacctncactatctaaccncacacagacacatcatctctacagtgctgaaaaaatatctatcctcttctttctcnccatctatactaatcggtctgttctcctcataagcgacgtgatgttgtgtctatg

SEQ ID NO: 2142 - DNA, 408 bp, Glycine max
  Peptide Sequence Number=SeqID_9660
  Probeset Number=SeqID_11921
cggtggtgactgtgttgttgagggttggatcttttgctggacgaaatggctctcgtaatacctgaaaaatttcaacacattcctccgtattatgaatacaaacatagatggtaaaagaaaagtgatgtttgctatgacagcaattaagggagttggtcgaagatatgccaacattgttttgaagaaagcagacattgatttagacaaaagagctggagaatgttcagaggaggaggttgagaaaattttaacaatcatgtcacatccccgtcagtacaaaattccagactggtttctaaacagacagaaggacattcaggatggtaaatattcccagctaacttcaagctcactggacagtaagcttcgagatgacctcgagaggcttaagaagataagggcacacag

SEQ ID NO: 2143 - DNA, 1403 bp, Glycine max
  misc_feature (236)..(236): n is a, c, g, or t
  misc_feature (277)..(277): n is a, c, g, or t
  misc_feature (327)..(327): n is a, c, g, or t
  misc_feature (378)..(378): n is a, c, g, or t
  misc_feature (498)..(498): n is a, c, g, or t
  misc_feature (566)..(567): n is a, c, g, or t
  misc_feature (570)..(570): n is a, c, g, or t
  misc_feature (684)..(684): n is a, c, g, or t
  misc_feature (729)..(729): n is a, c, g, or t
  misc_feature (865)..(865): n is a, c, g, or t
  misc_feature (968)..(968): n is a, c, g, or t
  misc_feature (1171)..(1171): n is a, c, g, or t
  misc_feature (1368)..(1368): n is a, c, g, or t
  misc_feature (1371)..(1371): n is a, c, g, or t
  misc_feature (1403)..(1403): n is a, c, g, or t
  Peptide Sequence Number=SeqID_9661
  Probeset Number=SeqID_11922
tatcataatctgccttattatagagagtatacagtattctattgcttatatatatatgacttacagcgcagctagtgtagtagattataggtgatcacacgaggaatcctcagtcgaaggattgttctgtatagacaaggtactgtgctatatactcactatatggatttgtctctatactcatctcacgctctctgctcggcacacatcgcgtgtatgtatctatgcgacgaagntactgaaccaccgcgagcttcgtgatagcatgcttgacgancagagagtgtatgtgtgctcacgcttctccctttcgtcgcgcggtagtancggttcgtagtcatgtatctggtcgtagtacgtcttacgagtgctgtctcncacgcggtgcactacagtgtatacgatgatcatagcgcggcacgagagattctagtatgatgggcacacgagtagaggatgacggcagactagtaagtatagatcattcatgatgcgacngcagagagtgacgggcagagtgagtgtggtgatattatagataccatcgacaatagcacgaagttganngcnatatgagatactgtctactatatcaatgtagtcacgactttccatcaccgagcaattctacttaacgccacacgacacaacgcttgaggcgaagtcggtatcgagcgttgacgntaaccgtctcgcatgttctcgttgattctgctctaacggacgctnctgccggccatcgtgcgctgatgtattatgtatcagtcatctatcgatacgcactgtatagatattattctactacacccccatagcggtggatcatactggaatgatgtacgtatcgtactcactgatacgagcncgctatgcatgccggctgttccaactccgatgaagtcagcgtgtatgagcactcacatgctaatatactgtaaatagatagttatcgatcattctaccaccgncgcacagcaggattatactcatacgagatagaacaatggatgagagagacgacagcatcgcacgagtcatactcgcgccaccatatgtcctatccgcgaacacgcatgcactccgtgacatatatacgctggagtctgtatagattaatatgaccgacatagtcacgatatatatgatactctacctactgtacgtatcattnctacaacacatgattcggcgaacgagtgtgcgtcagttcgcgtagttgccgatatcgcagcgcgctgagatcatgatgcgtcgtatacgtacgagcgcagtgcttgtgctcagtcaatatcgcgacagagcgctcgctacaactaatgtgatgctgtactctgcatatctcatattactctcgtgcgatctcatgcnatntgtatgttcctacttatatgaagacatagatn

SEQ ID NO: 2144 - DNA, 1559 bp, Glycine max
  misc_feature (19)..(19): n is a, c, g, or t
  misc_feature (55)..(55): n is a, c, g, or t
  misc_feature (100)..(100): n is a, c, g, or t
  misc_feature (202)..(202): n is a, c, g, or t
  misc_feature (238)..(238): n is a, c, g, or t
  misc_feature (255)..(255): n is a, c, g, or t
  misc_feature (490)..(490): n is a, c, g, or t
  misc_feature (626)..(626): n is a, c, g, or t
  misc_feature (668)..(668): n is a, c, g, or t
  misc_feature (720)..(720): n is a, c, g, or t
  misc_feature (999)..(999): n is a, c, g, or t
  misc_feature (1027)..(1027): n is a, c, g, or t
  misc_feature (1029)..(1029): n is a, c, g, or t
  misc_feature (1038)..(1038): n is a, c, g, or t
  misc_feature (1045)..(1045): n is a, c, g, or t
  misc_feature (1113)..(1113): n is a, c, g, or t
  misc_feature (1116)..(1116): n is a, c, g, or t
  misc_feature (1320)..(1320): n is a, c, g, or t
  misc_feature (1356)..(1356): n is a, c, g, or t
  misc_feature (1366)..(1366): n is a, c, g, or t
  misc_feature (1408)..(1408): n is a, c, g, or t
  misc_feature (1438)..(1438): n is a, c, g, or t
  misc_feature (1460)..(1461): n is a, c, g, or t
  misc_feature (1465)..(1465): n is a, c, g, or t
  misc_feature (1471)..(1471): n is a, c, g, or t
  misc_feature (1477)..(1477): n is a, c, g, or t
  misc_feature (1485)..(1487): n is a, c, g, or t
  misc_feature (1496)..(1497): n is a, c, g, or t
  misc_feature (1506)..(1506): n is a, c, g, or t
  misc_feature (1518)..(1519): n is a, c, g, or t
  misc_feature (1524)..(1540): n is a, c, g, or t
  Probeset Number=SeqID_11923
ccctatcgtgtgtcgggtngttagcgtgctgttggtgtcatgcgcgatgtagggntggagatgtattatatagtctactgctcgatgtagctcaatatcntatctcatacgacacacatagcccgtacgtcgttatgcatacacactatacatatcattatatgacttatgacgggtcgaggcgcgcgcagcggatgctgtnatatgtactctagtcgtctcgtgtcattgttcttgntatcgtctctctgtctngatgtgtgtctttctctctatcttgattggcacgcatcgctagtgctgtgcgtaaagatgagtagtcgtgtcgtgcggacacacgactcgtgtaggatgatcatgtactgtcatgcagacgagcgcgagtcggtaggttgcgtgacgacgtgagaaggttagggagaagatatactgaaggtatgagtctgtttaagtatgtaggcagtgtcagtcagattgtgttagtctgatntactctagtgtgttgtagagtcgggagcgtgatgtgcgctaagacgtagatgaggagggcgtcggacgcatcgcgtatgtgtgtgatcgcatctgatgttttgttcgctcgttgctatggtgtgggacttgtcgtnactccgtttgttgtcgcgtgttgtggtcatttcttcaacacngttatgcgcaagatcagctgcagccgcgcgctcgaacacgagccgctcgcgncgcccgctccggctttgtggtggtgtctccctgtaatcatgttaataatgatgtattacaagttcgatacgcggtacgacgtgatgttgattgatcatcctgttctatcatctgtaagacacgtcgacttaagtgcaccgcggctcagccgtggagagagagagatgaggatagatgagatgtagtaggaagagatgttggcggttgtgcacagaagagaggagaacatacgcgagcgaggactcagagagaggtagaggctgtctgtggcgcgcgcgncttagttttgtgtttctctgctcccgcncngcacgcgcnggcgtantccctcatctagagccgcgtagccagaggtggggtgattgcactgtcgtacgtatatcacatcgatgnganggatgagagagcgaggcttgggtgaggatgtggatacggcgaagatgatatatagtatagagatagagaacgcgggaaaaataacatactcctccatcgcatacatgcactacgaatatatgagagacttgcgtgtcttcgcgatcttgtcctccactctccacataactcccaatcggaggggggcagagagagagctgtgangttggagataagtgtatggtatatacttcatattangtattattanctatctatataatcagttgagagtgtgagtcagatgttggantcgtattgatactctcgtcctctccctatngaccactacctcttctattcannccanacaagntagggngttgggcnnntgaaacctnnccaccaccnacacacaccccnnccatnnnnnnnnnnnnnnnnnccaaaaaaccccccccccc

SEQ ID NO: 2145 - DNA, 424 bp, Glycine max
  Peptide Sequence Number=SeqID_9662
  Probeset Number=SeqID_11924
agcgtgcaaggaccccaagatagacaaaaaaaaagatatatacagacataaagaaacagagaaaaatgacaacccactaggtacaaacgtgactcaagtgtatgtagaacaactacagggaaaaaacattttttagataagtcaggctcacatagagatagatacaaagagatagaaagcgacacacacacacactcgagagacagagatacatatagagatagagagaactatataggaagaatgagtgactacaaaaaaagatggaaatcgcctcctcaccaaagagcagaacaagggggaagtgtgagtgtgcacaaatgcgcacattcatttacaagtgaatgagagaaatagaaaggctgcaggcatggcgggacgaaccacacaaaaacaaagaggtatcactatcgagaatgcttta

SEQ ID NO: 2146 - DNA, 235 bp, Glycine max
  Probeset Number=SeqID_11925
cggatgtctataatgtgtcacagggcaaggattatgccttggagaactttaagattcaatgaatctgtatgtaacccatataatgctgactttgatggtgatgagatgaacttacatgtcccacagactgaggaggctaggacagaggctattttgttgatgggggtaaaaattactggatgcatagagaagaaacaagagtgattgacgttgaattccatgagtgtgaatacac

SEQ ID NO: 2147 - DNA, 1645 bp, Glycine max
  misc_feature (149)..(149): n is a, c, g, or t
  misc_feature (369)..(369): n is a, c, g, or t
  misc_feature (474)..(474): n is a, c, g, or t
  misc_feature (496)..(496): n is a, c, g, or t
  misc_feature (554)..(554): n is a, c, g, or t
  misc_feature (1221)..(1221): n is a, c, g, or t
  misc_feature (1268)..(1268): n is a, c, g, or t
  misc_feature (1423)..(1423): n is a, c, g, or t
  misc_feature (1573)..(1574): n is a, c, g, or t
  misc_feature (1601)..(1602): n is a, c, g, or t
  misc_feature (1612)..(1612): n is a, c, g, or t
  misc_feature (1620)..(1620): n is a, c, g, or t
  misc_feature (1622)..(1622): n is a, c, g, or t
  misc_feature (1630)..(1630): n is a, c, g, or t
  misc_feature (1632)..(1634): n is a, c, g, or t
  Peptide Sequence Number=SeqID_9663
  Probeset Number=SeqID_11926
ctaaatacgtctgatgccaaagctcgtatcagcgtgtatgttgttacatgtgcgtgtcatttttgtcactcacatgtcgaatatacaatacaagaatgtacgatcagacataactcagatcctcacacacgtctactcgagatttcganacaaccacacgcctctcaacacacgttcagaccgagaacacatgacggacgaggttcaactgcagcataacgcactgcgcagcgccatacatcaacacacatcagtgtggacacacgacaccaaatgtcgctacaccagcacccacaccaaacatcacacaaccacagtttacacacactaaacaactctcacacgatccacactctctctagcaaatanaagagtcaacgaacggtgcgtagtgacatgtggtagtcatgctatatgacagagaatataaagaaacagcacaagacactatcaatgcacatatcacatgatatntgtgcaggccaatatacacganccagacgtctctggtcggcagcaccacagcggcgcagcggcgtcctccgacacatcanttatcgcacgtagccactacctcgggcgggagcgagagagcgagccagaacgacattattaggcggcagaatagccatcacgacgcacaaacatacattcagattgtcgtgccaatatcgtccacatacgcgacatataatgagactaatcaatggagacatgatgtgtatgccaccactacaacacagagcagagagcaaacagtgatgttggtgtagtgcatttcatcatatagagtatgtaagcataactatccgctcattatcttctcgtcggtggtagtgttgattgtgtatagacggcacttactacgtgctatgtctgaacggttgtttgagagcgtagctctgatgaacacaaataagacgtgtatgacatattaagagagaaaacacactccgcaagacttacgggactctcagtaatgatactaaggtatgtagagcgaacagagaaaagacatgacgaacaacaatactcaattaattagtatgtacaacacacacaacaattatataataataacaaagagacaaaataaatataatataacgacaagaaatatagataagtaaaatgacaagtgagagagaggtgcacttactgtcgagacactccgcgcggatatattcacgcacacgtgcgaggtatttgcgcggcggatgnaggtatattgagagttgtgatggagtaccaccgggcgagcggcgcgnggcgttcatatataatattattattagataaatatacgtgggtgaggcagacggtagagttaattatgggtaaatgccactactcgcgtcacagtatctgcactagtttagcgtgatacatgtgtaaagtttagtgtggttcaacacacttgttntggataggtgggaggacgtaaaggggagtcacccacatggcgtgctcgcggtgcgtcatcgacagtgcgccacgtgcgggtcgaaacgcgcggcgtgccgcgggcggcccacccaaccacggtgacaaacacgcacaactctcgcgctcnnctttgtcaaaaatataaccagttcagnnaaataagttnttagaaananacaaaaanannntcagagccggg

SEQ ID NO: 2148 - DNA, 2326 bp, Glycine max
  misc_feature (48)..(48): n is a, c, g, or t
  misc_feature (51)..(51): n is a, c, g, or t
  misc_feature (67)..(67): n is a, c, g, or t
  misc_feature (78)..(78): n is a, c, g, or t
  misc_feature (82)..(82): n is a, c, g, or t
  misc_feature (95)..(95): n is a, c, g, or t
  misc_feature (141)..(141): n is a, c, g, or t
  misc_feature (162)..(162): n is a, c, g, or t
  misc_feature (183)..(183): n is a, c, g, or t
  misc_feature (195)..(195): n is a, c, g, or t
  misc_feature (197)..(197): n is a, c, g, or t
  misc_feature (202)..(202): n is a, c, g, or t
  misc_feature (224)..(224): n is a, c, g, or t
  misc_feature (245)..(245): n is a, c, g, or t
  misc_feature (321)..(321): n is a, c, g, or t
  misc_feature (486)..(486): n is a, c, g, or t
  misc_feature (512)..(512): n is a, c, g, or t
  misc_feature (588)..(588): n is a, c, g, or t
  misc_feature (591)..(591): n is a, c, g, or t
  misc_feature (620)..(620): n is a, c, g, or t
  misc_feature (695)..(695): n is a, c, g, or t
  misc_feature (698)..(698): n is a, c, g, or t
  misc_feature (704)..(704): n is a, c, g, or t
  misc_feature (727)..(727): n is a, c, g, or t
  misc_feature (759)..(759): n is a, c, g, or t
  misc_feature (775)..(775): n is a, c, g, or t
  misc_feature (824)..(824): n is a, c, g, or t
  misc_feature (826)..(826): n is a, c, g, or t
  misc_feature (860)..(860): n is a, c, g, or t
  misc_feature (879)..(879): n is a, c, g, or t
  misc_feature (881)..(881): n is a, c, g, or t
  misc_feature (883)..(883): n is a, c, g, or t
  misc_feature (913)..(913): n is a, c, g, or t
  misc_feature (926)..(926): n is a, c, g, or t
  misc_feature (933)..(933): n is a, c, g, or t
  misc_feature (971)..(971): n is a, c, g, or t
  misc_feature (1008)..(1008): n is a, c, g, or t
  misc_feature (1056)..(1056): n is a, c, g, or t
  misc_feature (1058)..(1058): n is a, c, g, or t
  misc_feature (1078)..(1078): n is a, c, g, or t
  misc_feature (1083)..(1083): n is a, c, g, or t
  misc_feature (1108)..(1108): n is a, c, g, or t
  misc_feature (1161)..(1161): n is a, c, g, or t
  misc_feature (1173)..(1173): n is a, c, g, or t
  misc_feature (1195)..(1195): n is a, c, g, or t
  misc_feature (1197)..(1197): n is a, c, g, or t
  misc_feature (1212)..(1212): n is a, c, g, or t
  misc_feature (1214)..(1214): n is a, c, g, or t
  misc_feature (1243)..(1243): n is a, c, g, or t
  misc_feature (1292)..(1292): n is a, c, g, or t
  misc_feature (1399)..(1399): n is a, c, g, or t
  misc_feature (1401)..(1401): n is a, c, g, or t
  misc_feature (1403)..(1403): n is a, c, g, or t
  misc_feature (1420)..(1420): n is a, c, g, or t
  misc_feature (1456)..(1456): n is a, c, g, or t
  misc_feature (1487)..(1487): n is a, c, g, or t
  misc_feature (1561)..(1561): n is a, c, g, or t
  misc_feature (1576)..(1576): n is a, c, g, or t
  misc_feature (1584)..(1584): n is a, c, g, or t
  misc_feature (1597)..(1597): n is a, c, g, or t
  misc_feature (1604)..(1604): n is a, c, g, or t
  misc_feature (1611)..(1611): n is a, c, g, or t
  misc_feature (1641)..(1641): n is a, c, g, or t
  misc_feature (1694)..(1694): n is a, c, g, or t
  misc_feature (1748)..(1748): n is a, c, g, or t
  misc_feature (1773)..(1773): n is a, c, g, or t
  misc_feature (1794)..(1794): n is a, c, g, or t
  misc_feature (1829)..(1829): n is a, c, g, or t
  misc_feature (1858)..(1858): n is a, c, g, or t
  misc_feature (1866)..(1866): n is a, c, g, or t
  misc_feature (1872)..(1872): n is a, c, g, or t
  misc_feature (1908)..(1908): n is a, c, g, or t
  misc_feature (1928)..(1928): n is a, c, g, or t
  misc_feature (1940)..(1940): n is a, c, g, or t
  misc_feature (1948)..(1948): n is a, c, g, or t
  misc_feature (1977)..(1977): n is a, c, g, or t
  misc_feature (2028)..(2028): n is a, c, g, or t
  misc_feature (2048)..(2048): n is a, c, g, or t
  misc_feature (2066)..(2066): n is a, c, g, or t
  misc_feature (2087)..(2087): n is a, c, g, or t
  misc_feature (2118)..(2118): n is a, c, g, or t
  misc_feature (2164)..(2164): n is a, c, g, or t
  misc_feature (2172)..(2172): n is a, c, g, or t
  misc_feature (2222)..(2222): n is a, c, g, or t
  misc_feature (2231)..(2231): n is a, c, g, or t
  misc_feature (2238)..(2238): n is a, c, g, or t
  misc_feature (2248)..(2248): n is a, c, g, or t
  misc_feature (2271)..(2271): n is a, c, g, or t
  misc_feature (2313)..(2313): n is a, c, g, or t
  Probeset Number=SeqID_11927
tatagaagacgtgcgcatagcacaagcagctccgatagactcacagcnaantactatatagatgcgncgacagccgancgancgaggagtctggnagagttagagtaaggaattggtaggggtagagggcggcgtagactnacacactacacagcaagagangttttctcccttcaagaacanaggacgagcgangncacgngcacgacaaagcacaggcggangtatatcgtactcacccaganacacacacacacacagcataagatttaatatacgtgatgctgctatatacgagagagacgacatcgcatcgcatcncagatagcgagaacatgatctgcgcaatataatctatcgacacactcgcgccacatcacacgtatatacagtgacacatctatgtgtgacgagctgacgacagcctgcgtgcgctcacgacgtcaacgtcaacggttgttatatcgttcatagagatagttatgngctagatagactagtgacacctgctngatcatgctgtgtctgcacatgtacagcagtgcgtacatgatgattagactgtacgaagtttctcgccatctgacngangagagcacgatgtgtagatatgctcgggngagcgcggagacatacgtgactattgatgacgaccgtcgagcacttgagcgcgtcgtgtctgccggcagactctnagngcatancagaactgtaccgcagcatctgnaactcgtcgactctatcgatcattgatgacgnagtatcgactcaacgncgtcggacgcacgtgatgtagagtctggtagagtagaccagaagtccanancatcatatgacgactagtgctatatcgctcgtanccaggatatccatactgantngnacgacagatcacactctgcgcggctgcccngtacgacacactnattactngacgtctgctgacagcatgtcgtcgtagcatgcttgcncgtcgcagatactacattagattagttaccagcggcngtaggccacgctgtatatatagtgctgatatactagatgactgcattnantcaacgtacgctgatgacgnactancgacgataaccactagacgagagtngtatcgctgtaagagcgccgagaagagcctcactgctcgtagttgattagaancgtgcggagctntatatgatactaacttacagangncatcgcgtcagatgntncataacgtcattcgattctggcgagcaancgcacgatatctactcacgacgcgtcgagccatatgatgactgatgagnctcccgcagaatatagctagtatcgatgtgacgatacacgacttagcatctatggcacgtcgacgatctactgatgtgcactacgttcgagcactcgtgacgtcgangngntactcgacgacatactnctcatatgcatgtcacgtagcgcgcacgtgcacgcnatcaacgcactcgatcatgatactacgtgcngtcacgtatctagcgcgagtcgagaacgtgatgacgggagcgagtcgatcgttcgcgctgcaagtctgtagtantgccgtagatattancgagtgtnacgaacgagacancagatgntacgctngacaggtaatgtatagacggcgcatacgcntcagtcagcgcatcgcgcacgcgtatatgttatatactctacgatcttcgctncactacagatgacgtcgcacaggcgatctcaggaatgacacgcggcgtgaggcnatgcgctgtagtctctgtgaataanactagcgacagtgagatgccnacgacgtgagagcacacatgctatatatcagcagngacgtgtatgatagagtgcgactaaatgnagcggtgntgagangatatgtgcatctagaacactatcgtgtgtgagatnaataagtagtattgagccangcatcgataccnagcgagangctagatgtgtacgcgactacgattgtancatgtgatagttgtatctgtgtcgacgcacgatatatatatcctagtcgcngcacattactgagcgactancgaattagcgttcatatngatgtatcgtctcgtatgaangatgctagttgctcagtgcagtctcgatgantagcgtcatgcacacgatgctgacacgtgcgatcactcgaacgcgntgtgctgnctgctacgatatttacatggtatcactatacgtcgatgagagcatcctgnagatgttgntaatgtngcaagtcctnacagctcgtcactcgactcgacntgacgtattagataatgacgatggtcgatggagtgacggggnatgagacacgacg

SEQ ID NO: 2149 - DNA, 1424 bp, Glycine max
  misc_feature (6)..(6): n is a, c, g, or t
  misc_feature (25)..(25): n is a, c, g, or t
  misc_feature (89)..(89): n is a, c, g, or t
  misc_feature (121)..(121): n is a, c, g, or t
  misc_feature (223)..(223): n is a, c, g, or t
  misc_feature (333)..(333): n is a, c, g, or t
  misc_feature (509)..(509): n is a, c, g, or t
  misc_feature (1221)..(1221): n is a, c, g, or t
  misc_feature (1308)..(1308): n is a, c, g, or t
  misc_feature (1316)..(1316): n is a, c, g, or t
  misc_feature (1356)..(1356): n is a, c, g, or t
  misc_feature (1374)..(1374): n is a, c, g, or t
  misc_feature (1396)..(1424): n is a, c, g, or t
  Peptide Sequence Number=SeqID_9671
  Probeset Number=SeqID_11928
gcgcanttgcctgtctcgcatcagnattatgtcgtgctgcctacccactcgacaccgcgcgagacgcgatatagcgagctgcggggtcngcgacgactgcaacatcctagccactccgtangcaatcacgccaagagacgaacaggagagtgcaatgcgcacaggatctgatgccgcctcgcggcagcgcgcgccgcgcgcctcgaccgcccatccgcaccgncttcctatcctccggtcgactttccatctgctctctcgatctctttcgtgtgctcctcgcttaccacactcgaccgtgctaccggacggcgttatgacgttatggcgcangcggctcgcaacgaatagtgtcagctgagcgtccgttgtaacatgtccttgcatcatgcatgcgtagatatcactatgacataaattataatatgcagttaggcgagacatcatacaccatctatctgacgcatccccactcatactcgcgtcctccatcctctctactacacgtnctacatcacctcacaataccctcccacaacacgcgcattcgagcaccatccctcataacctccgtccacgctcgcttctactggctcctcgactccctcggccagctcctcatctctcacactgtcgacttcctcctgctctccttcctatctcgtctgctcccgcactgctcctctccgccgccgtcggtatcgcgcgcttggtgtgtggctgcactgcgctctccaccgctccctctctcttctcttcctccgatgttgttccgtgcttcttccatcgttgcatcctcttctttctgttctcccctcttcatctctctgccacctctctctccggggcttctccctctctcccgtcgccctcctcatctctcacttgcctccgtctctccacgctcacaccctctctcctctcctcctcactctcttctacttccacaccactcctatctctatcatgactgtgcgaaccgcaaccgtatctcaccccacgaaacgcacccacacccctcccaccttactctccccttcatctgctactccattccaccctcatgttcagacccctcctcacccgctctcacaccccatcccctaccttctctacaacctctccctctccctccccacatcccctcccaccgacatcgcaccctctacctctaccaactcgccctccacccatcagctcaaatcaacccccgcccccctntcatacctcacccccgcaaattatatatcccataatttctctctcctcctacactctaaacaacccaccacccctaaccacaccacncagacacnacaaaaacacactaacacaacaacaccctcaacccctganccccccacatccctcctncatccctcattcttacaccttnnnnnnnnnnnnnnnnnnnnnnnnnnnnn

SEQ ID NO: 2150 - DNA, 735 bp, Glycine max
  Probeset Number=SeqID_11929
ttgttggaggtataagtgggaatcaacggggcccaaccgatcgttcatccgcaagggctcctatgaggcgccctgtaaggtggtattaaggcccggggaggtgtggacagccaactatcacctagcttgaggatgacgggttaaaggcagccgctgagcgaggagagcagtcaacatgttaagcagatgtttgctgtgatgggccatctggaagaggcttttcgccagtggttaagtgggaagacttttttcgccgttgaaggcatcgagaacgtatacattggcgttgagatgcaatctgctcttgtttgaggtgttacgcagtaggtatggggtggagttagtccacaccagggagtcttcttctcttgaaagcatgcgaggaagggtatcggggaatctgatgcgtcgagggaggtgataccctgacggacggatccccgtggagtactccaagaagcgtcaggcttattgggcggggacggcgtctgcaaagaaacatgattcagatcagatcagtgagagtttttcggcgggaaaattatatcaagtccatacgaggctcatccagcaataaagatgtcaaatcatggatccggcatattaaacaagatgattaacctgcctcacggggttatccaacactcgttgaattcattagagatcctagtagtagtctcaatccacatagaagtggcatttttttctaaatgttcgacaaaaaaaaaaaaaaaa

SEQ ID NO: 2151 - DNA, 390 bp, Glycine max
  Peptide Sequence Number=SeqID_9672
  Probeset Number=SeqID_11930
gaggaaaaatcaccaatggctattgaacacttttactttctcaaagacgagaagaaccgtcgaggcgtcttctaggatgacatccccctcctcaaaacctactgtttttgaccttattccacaagcatataaaaggcggatatagaaatcaaagatatggccaagaaagtgaatgacttatgtggtatcaaagagtctgatactggattatcagcaccaatccagtgggatcttgtttctgtttagcaaatgatgcacgaagagcagcctctttatgtggcacgatgcacaataattataaatccaaactctaaagattccaaaaatgttatcaatgtgaattagatagcaataatttgaagtttggctaaaaaacatatgttcccccac

SEQ ID NO: 2152 - DNA, 427 bp, Glycine max
  misc_feature (320)..(320): n is a, c, g, or t
  Peptide Sequence Number=SeqID_9673
  Probeset Number=SeqID_11931
aagaaattcattctctcaaccatttttactttcacatgagtcagggtggacggcggttcgggccctgaccgagccgtcgtttggaccggccggcggcggaccggaccgggcagcaccgcggtccccttttcaggcaccggaccggtggccgaaaagctcgggccagaccgtaggaccgaggcgggggcgaggtggtgatcaccgaggcggcgagagacagctccaggtgctaatcggagggaataacataatggaaaggcagggtggctcacggtgaactccatggaggggtcggggaggctgaggaagcagcgacgacnacataatggacgacgaacgacggcagcaggagttggggaaggaggacgatggcgacagcttcggggcgaatccggtcgattcattgcgtggggaaggagatctcacg

SEQ ID NO: 2153 - DNA, 1628 bp, Glycine max
  misc_feature (35)..(35): n is a, c, g, or t
  misc_feature (283)..(283): n is a, c, g, or t
  misc_feature (287)..(287): n is a, c, g, or t
  misc_feature (931)..(931): n is a, c, g, or t
  misc_feature (1155)..(1155): n is a, c, g, or t
  misc_feature (1204)..(1204): n is a, c, g, or t
  misc_feature (1216)..(1216): n is a, c, g, or t
  misc_feature (1261)..(1261): n is a, c, g, or t
  misc_feature (1429)..(1429): n is a, c, g, or t
  misc_feature (1432)..(1432): n is a, c, g, or t
  misc_feature (1530)..(1531): n is a, c, g, or t
  misc_feature (1557)..(1557): n is a, c, g, or t
  misc_feature (1601)..(1601): n is a, c, g, or t
  misc_feature (1628)..(1628): n is a, c, g, or t
  Probeset Number=SeqID_11932
ttaacccgcaacctcagtgtggtagtgtgaggtgntcagcgactgactacggcatatctggcggtgtatcatctggagggaagatatatactctattatctaatacatcagcttgtctcatatatttataacataaatctacactacatgtgtgcggtggtgataggtggttgtaatattgtagtgaatatggagtttattgatgtattctaagtatgtctgcagattgtatataataaatatgatcggaggccggggacacgtgacgacacgcggccgcacnggcncgcaccggagggcagacttgttcctacgggagttcaccggctcgactcgtgagttatataactacggattaggacatcgacggtgcgcggtgagataccggtctgtactctgttgagcctagacgatgactggttagtatcgtgtacgctgacacgccatcgatctgttcgtgtccactataatataatcataatgattgaagcagaagtactaagaggaaagaatatcagacagtaaagatacaatattgtcgtgtggaccgctggacgctactcggtgtgacaatacaatcagatacgataaccacagaaacggcgcaactccacggatgactattagtcatgaggataggacattcatatccatgaacatactaatagaggatatggatgtgatgacaggcattaattgaatgacagcctaggatcatgtagcatgttgtggatatatagttctcgatatgtaggggcttatatgcttctcacgcctctactcacatactattctcttatatgtgtctgcataacacctcgcttcgagcagatacgtcatcacggcgacgacgatggtgacagtgattgtatccgagtcgcaccggtgcagtggtcgcttgtgtggtagtgtcgtgttatgtgatgttgtnctagatatatccgtgtgatacggcgtgacgtctgacgtgtagcgtacgtatgttggttactcgtagtagatgcttcgttaattgtgactaacgtcgcgcgcagcgacgcaagcatactaatgattgaacattgtcgagaatagaataatcgacgatagtaatacaggcaagagaggcgctgttatagtgcgcgaggttgagatatctattacatacaaacacanagagcgcgatgatatgttatggtgggagatgagacgcacagagatcgangtaactagtaancaactgctcaatgtacctaacgacaccgacatgtatctgtatggnactatgtagagtgtctatctctagcttaccagcactgtttggtcaatacaatcacgagacagcatgcacgacacaatagcttgtctgctcagatgacattcgacgggctagtctcactcagcatacacacagatcatgagatacataggtatagatatagatcgatcntanacaagaatatatgagtagtacgatacttgactcgttatatgttccggtagacactacctctctgttagacgatcactgtcatacatacgtcgatcganntttactatcactctatcattcatatnagagcgactccgtgtcatcttcatgtagcatagtattcatgcgnatgtatacatcgagtcgttcactgagn

SEQ ID NO: 2154 - DNA, 1939 bp, Glycine max
  misc_feature (1)..(10): n is a, c, g, or t
  misc_feature (25)..(27): n is a, c, g, or t
  misc_feature (33)..(34): n is a, c, g, or t
  misc_feature (37)..(37): n is a, c, g, or t
  misc_feature (44)..(45): n is a, c, g, or t
  misc_feature (62)..(62): n is a, c, g, or t
  misc_feature (86)..(86): n is a, c, g, or t
  misc_feature (105)..(116): n is a, c, g, or t
  misc_feature (118)..(122): n is a, c, g, or t
  misc_feature (132)..(132): n is a, c, g, or t
  misc_feature (160)..(160): n is a, c, g, or t
  misc_feature (191)..(191): n is a, c, g, or t
  misc_feature (206)..(206): n is a, c, g, or t
  misc_feature (210)..(213): n is a, c, g, or t
  misc_feature (215)..(215): n is a, c, g, or t
  misc_feature (233)..(234): n is a, c, g, or t
  misc_feature (247)..(248): n is a, c, g, or t
  misc_feature (251)..(251): n is a, c, g, or t
  misc_feature (253)..(253): n is a, c, g, or t
  misc_feature (256)..(256): n is a, c, g, or t
  misc_feature (259)..(259): n is a, c, g, or t
  misc_feature (266)..(266): n is a, c, g, or t
  misc_feature (292)..(292): n is a, c, g, or t
  misc_feature (296)..(296): n is a, c, g, or t
  misc_feature (335)..(335): n is a, c, g, or t
  misc_feature (356)..(358): n is a, c, g, or t
  misc_feature (367)..(367): n is a, c, g, or t
  misc_feature (491)..(492): n is a, c, g, or t
  misc_feature (510)..(510): n is a, c, g, or t
  misc_feature (512)..(512): n is a, c, g, or t
  misc_feature (515)..(515): n is a, c, g, or t
  misc_feature (519)..(520): n is a, c, g, or t
  misc_feature (543)..(543): n is a, c, g, or t
  misc_feature (550)..(550): n is a, c, g, or t
  misc_feature (561)..(561): n is a, c, g, or t
  misc_feature (569)..(569): n is a, c, g, or t
  misc_feature (576)..(577): n is a, c, g, or t
  misc_feature (579)..(579): n is a, c, g, or t
  misc_feature (583)..(583): n is a, c, g, or t
  misc_feature (604)..(604): n is a, c, g, or t
  misc_feature (630)..(630): n is a, c, g, or t
  misc_feature (647)..(647): n is a, c, g, or t
  misc_feature (655)..(656): n is a, c, g, or t
  misc_feature (670)..(670): n is a, c, g, or t
  misc_feature (698)..(698): n is a, c, g, or t
  misc_feature (758)..(758): n is a, c, g, or t
  misc_feature (780)..(780): n is a, c, g, or t
  misc_feature (782)..(782): n is a, c, g, or t
  misc_feature (794)..(794): n is a, c, g, or t
  misc_feature (800)..(800): n is a, c, g, or t
  misc_feature (892)..(892): n is a, c, g, or t
  misc_feature (927)..(927): n is a, c, g, or t
  misc_feature (937)..(937): n is a, c, g, or t
  misc_feature (993)..(993): n is a, c, g, or t
  misc_feature (1064)..(1064): n is a, c, g, or t
  misc_feature (1067)..(1067): n is a, c, g, or t
  misc_feature (1101)..(1101): n is a, c, g, or t
  misc_feature (1167)..(1167): n is a, c, g, or t
  misc_feature (1171)..(1171): n is a, c, g, or t
  misc_feature (1241)..(1241): n is a, c, g, or t
  misc_feature (1243)..(1243): n is a, c, g, or t
  misc_feature (1249)..(1249): n is a, c, g, or t
  misc_feature (1463)..(1463): n is a, c, g, or t
  misc_feature (1482)..(1482): n is a, c, g, or t
  misc_feature (1487)..(1487): n is a, c, g, or t
  misc_feature (1526)..(1526): n is a, c, g, or t
  misc_feature (1557)..(1557): n is a, c, g, or t
  misc_feature (1564)..(1564): n is a, c, g, or t
  misc_feature (1573)..(1573): n is a, c, g, or t
  misc_feature (1577)..(1578): n is a, c, g, or t
  misc_feature (1581)..(1583): n is a, c, g, or t
  misc_feature (1596)..(1596): n is a, c, g, or t
  misc_feature (1642)..(1642): n is a, c, g, or t
  misc_feature (1650)..(1650): n is a, c, g, or t
  misc_feature (1653)..(1653): n is a, c, g, or t
  misc_feature (1658)..(1658): n is a, c, g, or t
  misc_feature (1660)..(1660): n is a, c, g, or t
  misc_feature (1702)..(1702): n is a, c, g, or t
  misc_feature (1721)..(1721): n is a, c, g, or t
  misc_feature (1729)..(1729): n is a, c, g, or t
  misc_feature (1859)..(1859): n is a, c, g, or t
  misc_feature (1871)..(1871): n is a, c, g, or t
  misc_feature (1900)..(1900): n is a, c, g, or t
  misc_feature (1939)..(1939): n is a, c, g, or t
  Peptide Sequence Number=SeqID_9674
  Probeset Number=SeqID_11933
nnnnnnnnnngggtggtagggacgnnncgcggnnccnatactgnnctgggcgcggcgtacgntctagagggcgcggttgtgtgccnccccccgctccactgtgtnnnnnnnnnnnngnnnnntggctagaangcgcggcgcggcccctcgcgcgggtggntttcttcatgggtgtggttgggtgctgtgtncgctcacttatctcnaccnnnntntattttgttatatatatnnagtgtatgaattnnacnanacnaantatatancacgtgacacacgtagtattgtttgnggtngtatgcgtgtcagaagcagagaagagagtacggatagangacacagattcacattaacgnnntactgtgtnccgactcccacacatacccaacgacacagctggtactctatgatacacacggcgagatgtatactatgatgcgtatgtcgtagtgtatgtatagaggagatgcgtgagataatatgagggtggnngttaggatttcagggatngngancgcnncgagcatgaagtacacatctagntagatantatatcggaangaatatgnggtggtnngngaanatgttgatatgtgtgtgacgntagaatgtagagtacaatcacacctngtaggtggaattgtggngtctccannacaagcgacagaanagagagagagaagcaagaacagatcatncagcgtgatggagataaaactacagactcccttctctcacacactctaatgtatcgattntgtatattgacatatgagtcgnancggatagagatntcattngacaagtgatgtgggcggcgtgatagggatgaacgccacatatgttgaggacgcgggatacatttgtctacagtatataaataaaagagacngcgagaagagagatgagagatgagagtcgccgatntctagtatgntggcgtagttactaaacaagccatacgccatatctataaagatgatgtatagacanacgacgcagagtaagagcgagggacacactgcatgcacgcgagcatacacctctatctatatgatactgtntgnctactagagcgtataagtatatatccagatgctntctcgtctaatgacgtcgtatgatgtgtgctcgtctctcatattatgaatgtaccaaacaccatcnagtngataatctactaactcatcaatcatcacacatactcctgacatgtcatggcgcatatcgtgatatgcatngntggtangatatcgtacatgaacatctaggctcgtgtggtgtatatgagtaagaagagcgactcgtggcgctgatgtgtgatggatgtatgtggatcgtgcgctagctgtgtagtgtcgtagtgtatggttgattatgttactaccacacctacacgcacggtgtgtgtgtgtgctcacactcacgcacgataatagcaggcgtgtgtgcagtggctgtcncgcgtcggctgtggtcgcngtgtngttgtgtgtgcgacctatgcgaccgcgtatggtgttgantgccgccagacgacgctggtattactgtgtntatattngattctttntccnngtnnncatacgaaaaaanacagaccatatatgatagagtgacgcgtgatattgtgcactagtantcgttgtngantttgngngcagatacacaccactactagataattgcacgtaccagaccncacgacgacctctactccncggtattngtgtgtgactacacacagtgtgtcgctgtcggatacacatccgtgtgatcgatagcgcacctgcgctgccatagtgattgctgtgcccatctctgtatgtgctgatgcctgcgcgccgttgatgatatangacgcacgcaanctacagacactgacacatgtctagagggnggcactcacacaatgatgtagatgactgtgtcgcacctn

SEQ ID NO: 2155 - DNA, 840 bp, Glycine max
  misc_feature (1)..(1): n is a, c, g, or t
  misc_feature (840)..(840): n is a, c, g, or t
  Probeset Number=SeqID_11934
nggtatggataagcttttttttttttttttggcataacgccgcattgtcagctcgatatagcagttgaatcatattcaaacagaatataggagtttcacataatgatgaaattaacataggtcggagcaagttttgacgtgattatgtgctcgcgtgcattctgtcgagcaccgtgtgcgcgccattctatcgagcaccttgtgtgcgccaacgccggcttcctcttcggcatgagcacggatggcacgaacgaggcatgcctgctcatgcccgtccgggagcacgagcagccgcacacacgcccacacgctctgcagcaggtgctcgatggggtggctacgggcccgccagccagacaccgacggcccccggacacagagagaggagcggtcgaaggttactgtcacgcgtacgccggcaaaggagctcgcgtacggcaaggaagagcaaccgcagccgccagccgctccaggctcgggcttgccggccgtggtcagctggccacggtgacgctccagcaggtggtccacgcagacgcaggttctgtgatcctcgcgttgcgcgtgccagtttccggccgccgtccgtccgcgctcgcgctcctcctccgtggactgagcatacatctcttgccgacctggtcctcgcctgcatccctcctaacctcagcttcatccgcatcgccgtcaatgacttcggccgtcaccaccgcctccaccatgctcgccaccgtaagccgcccaacacgccgcgcctcattcaggccgtcaccaggtgcaggtaggtgccgttttggcattgagagagttttcgattaggatccaccccggggggggggn

SEQ ID NO: 2156 - DNA, 2108 bp, Glycine max
  misc_feature (2094)..(2108): n is a, c, g, or t
  Peptide Sequence Number=SeqID_9675
  Probeset Number=SeqID_11935
cgagaaatgagatagaaaggggaagtggcactggcgaatgagaatgagtgtagaaaagaaagtccatggccatgagtgtgggcgtggcattgccatccaccaccaccagtctcagtttccttcgctaccgctctcgctctccaattcaaaataaaatccgttttccccgtcaaattgtttctaaattaaacagtgcagaggtccaggttcaaacctggccttgtattgtagcgtgtgggattggaggggttactctattcgctatcaacattctggaaatattggccctgcactagttttagtccacggttttggagctaacagtgaccactggaggaataatatttcagttcttgcacaatcccaccgggtgtactccatcgatcttattggatatggatattcagataaaccaaatcctcgtcaaatcggagaccattccttttacacttttgagacctgggccactcaactaaatgagttttgtcttgatgtcatcaaggacgaagcattctttatatgcaattctattggaggagttgttggtcttcaagcggctgtgttagcaccacacatttgccagggtattatccttctcaatatatctctgcgtatgcttcatataaagaagcagccttggtatggaaaacctttcatcagatcgctccagagattgcttagggatactgatgttggcaaattcttctttaaaactatagccacaaaagaatctgtgaggaacattctttgccagtgctatcatgacacctccaaggttacagatgagctagtgcagatcatccttggtccaggtctggaacctggagcagcagaggtctttctcgagtttatttgttactctggtggccctcttcctgaggaactactacctcaagtaaagtgcccgattttgatagcatggggtgacaaggatccttgggaaccaattgatattggaagaaattatgaaaatttcgattctgttgaagacttcattgtccttcccaatgttggacattgcccccaggatgaagcacctcatctcgtgaacccacttgttgagtcatttgtggcacgccatgctaaatcctcaactagtacatcgcattgttaattgattcgccaacagttttttgatgctgcttaactcattgaaattgtgtacatttctccatttgcttccattaagaccgagtttcattttctgttcagtataagcattatgtccttgtatggttacaaattatgagcggttgatacaagaccctgtttccaacatgaatgccagccttagaaccctacatagttttgtaattgtctcctgtttcaatggaatcgtatttctcaatcaaaaaaaaaaaaaaaaaaaaaaaaaaaaaaaaaaaaaaaaaaaaaaaaaaaaaaaaaaaaaaaaaaaaaaaaaaaaaaaaaaaaaaaaaaaaaaaaaaaaaaaaaaaaaaaaaaaaaaaaaaaaaaaaaaaaaaaaaaaaaaaaaaaaaaaaaaaaaaaaaaaaaaaaaagagaaaaaaaaaaaggggggaaaaaaggaaaaaagataaaaaaagggggggggggggcatttccacacgtgtgacgaggggggggatataaagggcaaaaagggggggagcacaaaggggggcgctaactggaataaattaacttgggggggagagggcggtattgcccgggggaaaccccagaaaaaaagcggggtgaaagaaattggccaacacccggcgcagaggggggagagggttataaagccaaaaggggggggtgggctttaaaagaccttacacaggagagagagagagagccccacaacgctttgtcccagagagatgtccaccagggggggaaaaggggggttaccgcggcgggccaaaagggggttttttttgggtttaacgggggggaaaatatcttttatttttttagggaagatcgggggaaaagaaatgtgtataatagccggaaaaaggggcgttttcaggaggagcgaaatgcgcccttctttggggcccacccacccccggaaaatatttaaaacccttgggtttggcgggggagaagaaaaaccaaaaagaaacnnnnnnnnnnnnnnn

SEQ ID NO: 2157 - DNA, 550 bp, Glycine max
  Peptide Sequence Number=SeqID_9676
  Probeset Number=SeqID_11936
tcagctacgtaggccccccccccttaagtttgttccacctgatgtctcagggaacacactgggcaagaaggggaaacgatcttcgaaaggagaacttcacgttttagtgaaggaggcaaagaatttgacagcaaataaagccaatggctctacagatgcattctgcaaaagttatcttctcccagacaaagggaaaagctcaaaacaaaagacagcagtcatccgtagatcctgcaatcctgcttggaaccacacttttatctacccagatataagcctacaggagctttctgaaagatcgttagagctgactgtgtgggaccatgatagaattgctagcaatgaattccttgggggaatgagatttaatttaggcacaggcaagcactatggcaagtcagttgactggatggactcatctggaaaggagctcacattatggcagcgcatgctggaaaggccgaacctttgggttgagagctcgattaccctcaggccttcattggacagaacagctttctcaaccaactctactacttaaatgaatgct

SEQ ID NO: 2158 - DNA, 499 bp, Glycine max
  Peptide Sequence Number=SeqID_9677
  Probeset Number=SeqID_11937
acaattcacactctctctcactctcagcttaaagagcatatcatcatcatgactaccgaagagaaagagatcctcgccgccaaattggaagaacagaagatcgatcttgataagcctgaagtcgaggacgctgatgacaatgatgaggatgactctgacgatgatgacgacgctgagggacaagagggagagaccggaggcaagtcaaagcaaagcagaagtgagaagaagagtcgcaaagctatgctgaagctcggaatgaaacccatcactggtgtcagccgtgtcaccgtcaaaaagagcaagaatgtcatgtttgtcatatcaaaacctgatgtgttcaagagccctgcatcggacacatacgtgatcttcggagaggccaagatcgaggacttgagctcgcagatccagtctcaagctgcagagcagttcaaggctccggatctcagcagcatgatctcaaagggtgagtcgtcgtccagcgctgcagtggtgc

SEQ ID NO: 2159 - DNA, 1604 bp, Glycine max
  misc_feature (55)..(55): n is a, c, g, or t
  misc_feature (166)..(166): n is a, c, g, or t
  misc_feature (288)..(288): n is a, c, g, or t
  misc_feature (427)..(427): n is a, c, g, or t
  misc_feature (513)..(513): n is a, c, g, or t
  misc_feature (624)..(624): n is a, c, g, or t
  misc_feature (641)..(641): n is a, c, g, or t
  misc_feature (643)..(643): n is a, c, g, or t
  misc_feature (727)..(727): n is a, c, g, or t
  misc_feature (928)..(928): n is a, c, g, or t
  misc_feature (950)..(950): n is a, c, g, or t
  misc_feature (1216)..(1216): n is a, c, g, or t
  misc_feature (1246)..(1246): n is a, c, g, or t
  misc_feature (1352)..(1352): n is a, c, g, or t
  misc_feature (1356)..(1356): n is a, c, g, or t
  misc_feature (1362)..(1362): n is a, c, g, or t
  misc_feature (1525)..(1525): n is a, c, g, or t
  misc_feature (1527)..(1527): n is a, c, g, or t
  misc_feature (1532)..(1532): n is a, c, g, or t
  Peptide Sequence Number=SeqID_9678
  Probeset Number=SeqID_11938
gtggatagtatatgtgcttctggggttttgtatttgttgatcacactctcaccancacaccaccacacaaccacacacctcgtcgaaagaccacgactatcgcatcccactattcgcttcgcaagtctgctgctctctcacacctatcaccaatacgcaaggaaanagtagtatacgatccccacaccacactatacataatatatacaaatataattaattgatagaagaccaccacagttactcactacttacccttctcccctaattaacttaaggtactattcnatatatagacatatatgcgctataatatatatgtattatgatgatctacagcacatgagtcaatacaaaatacaacagagaggctatggactgatgcaagatcagtaattatagaatagcattaactatctacacatancaaacattattaaagaataatatataaatgcaatatatatgtatggagatatactttcttgttgcactttatatcctgtatactantatacgtgcatcttcgtattcattcttcgttgtacttcttctgttctttgacgtcgctcttatcgcccactgtccaatcactttgtacttttctcttcgcgcctgcgcgcnagcctgcgctccccccnanctctcgcgctccgtcctgcatatccgctcaccgcgcctacctgctctctgctcgtgtcctgcgtcgtctgcgacgtctctgccngcgttcgttcgctggtctgtcgtatgtagcatttctatcgccagtacgcataatgctactccaggccgtgattacagcgactgagtaatagtaggatatctatatgagttatagatagattagataagataattacaatcaaaacacatatatcaccattatatcaacatactattggatgtatattctgaccctacctancacgccccgcaccgcactacantgctaaccagtcgactatctagcgctgtgcagcgtgtaatgcgatatactacgatacaaacctcgcgtctcttctacgcgactgtgtctgctcacgcgagtccagtcgatctcatgccatcacagctctctacactctcctccccacaaccccacgacccacttcctccgctcttcatcgcttctatctgactgcgcacgacctcacgcgccctccctcgaccttctgccagccatctctcactgcgtggctgactatgaccgtgnttccatagagcatcacttccttgcctgtantgacgcttatactcactctacatctactcatcgcactcacaacgtctattgagactccgatctcttcacaggcgtctctctaggattatcttatctgcggacattntcanactacnactcactttctgatcactactcatcgtgtacggtgagatctgcttgaggttcaggtcttacattgtgccttatctgccatgtactagataacgacgcgcgataatactgctgctcattcggtgtgatactatcattgacacgaggcacgtctgcagtcttacncncactnaccatctctatatataacgcggtgcagtcttacacgactccgcacttctcttgtacctcctgtatctctaca

SEQ ID NO: 2160 - DNA, 1597 bp, Glycine max
  misc_feature (74)..(74): n is a, c, g, or t
  misc_feature (171)..(171): n is a, c, g, or t
  misc_feature (219)..(219): n is a, c, g, or t
  misc_feature (274)..(274): n is a, c, g, or t
  misc_feature (287)..(287): n is a, c, g, or t
  misc_feature (341)..(341): n is a, c, g, or t
  misc_feature (345)..(345): n is a, c, g, or t
  misc_feature (363)..(363): n is a, c, g, or t
  misc_feature (393)..(393): n is a, c, g, or t
  misc_feature (432)..(432): n is a, c, g, or t
  misc_feature (594)..(594): n is a, c, g, or t
  misc_feature (611)..(611): n is a, c, g, or t
  misc_feature (680)..(680): n is a, c, g, or t
  misc_feature (694)..(694): n is a, c, g, or t
  misc_feature (738)..(738): n is a, c, g, or t
  misc_feature (831)..(831): n is a, c, g, or t
  misc_feature (1002)..(1002): n is a, c, g, or t
  misc_feature (1219)..(1219): n is a, c, g, or t
  misc_feature (1300)..(1300): n is a, c, g, or t
  misc_feature (1527)..(1527): n is a, c, g, or t
  misc_feature (1530)..(1531): n is a, c, g, or t
  misc_feature (1537)..(1539): n is a, c, g, or t
  misc_feature (1546)..(1549): n is a, c, g, or t
  misc_feature (1551)..(1551): n is a, c, g, or t
  misc_feature (1554)..(1554): n is a, c, g, or t
  misc_feature (1556)..(1558): n is a, c, g, or t
  misc_feature (1560)..(1560): n is a, c, g, or t
  misc_feature (1562)..(1563): n is a, c, g, or t
  misc_feature (1565)..(1571): n is a, c, g, or t
  misc_feature (1573)..(1587): n is a, c, g, or t
  Probeset Number=SeqID_11939
ctacctacaactactaagcagcttatcatacacgataccttgtagctatagagctctggcctatctctcttctngcgtgtccagtctagctactgctctctgtggcgatcagactctagacgactgctacacatacttatctgatactacatacacgtctctcgtcgtctncacatcatcgctccacaggcacacacatatcttctcttcgcggtcttnatacatgcatcacagtaggactcacgtcctgactgacgtctagtgcctctcgagngatgcgtactagnagtcaactccaatctcacaagatgacacgtgcgcttggtcacagatagtatagntagncacgagtgtgaatccgcntcagctgaactctatctcagtcatcatcgncagcagccatgcttctatctcgtatcacgctcactattnttcacacttcgtgtgacaccggtccgttactactaactctatcgtgctcgcgcacaaccgagcactgcttccctcgcttcagcctgatggaatatatctctctggtagcattcatgtcactacaactcactgcgacagtcatttcaatacagtgtgcctcantcggatggactgcacangccgcgcgtctcacatggcgtgcgcgactcagggcactaggctgcggtggttgtgtcagtggtatgcangtctgtcaaccctnttatcatccgtcactatgctagtgactacggacttagcgtgtgnatgcatatacccactcggtggtgttaccgctgatagtatatcatacgagttgtctgcacggtcttcttacaggcagggtctgatagtataagnatgtcctgttgtataggaatcgccatggattgcccgccggatgcgtggacaggcgcagagacagcgataccaaaactgatatcttctcaaagagctagatattcatattttttttattacataataatatatattggtgttggtagtgatagtgcgagcgatttgcgtgcnctggttggttgttcgtgacccggcatcgcggggattgttattatattattaatcattttaatttctctggcggcggggaggcggaggcggtatcgttgagcgcaatgggtttgtttcctctctttgttttttatttcgcggcactgggtatttagagggaggaaggtttatgtaggtgttttggggggagaggtgttttgtggagttttgtatttanaaagtagggaggtgataaatatatatgtggagggtgcgggagggttaatatatttatcttctaggccgttgttatctttancgtccttttattatgtatataaagacgccctcacacggaattgcgacgcgccacgacgcgggacacgggcgggcactgagggccacacagaaaagcagtacaaggaggacaagtatagtcctgagcagtagaggagaaataatatcgggtgtgtgcgagtgttgtgagatcagatactatgtgtatcgtcttagtaccttgcgcgagacagaaattgagtcagaaangtnnaagaannnacgaaannnnangantnnngnannannnnnnnannnnnnnnnnnnnnnaacggggggg

SEQ ID NO: 2161 - DNA, 1550 bp, Glycine max
  misc_feature (427)..(427): n is a, c, g, or t
  misc_feature (731)..(731): n is a, c, g, or t
  misc_feature (842)..(842): n is a, c, g, or t
  misc_feature (845)..(845): n is a, c, g, or t
  misc_feature (949)..(949): n is a, c, g, or t
  misc_feature (967)..(967): n is a, c, g, or t
  misc_feature (994)..(994): n is a, c, g, or t
  misc_feature (1006)..(1006): n is a, c, g, or t
  misc_feature (1011)..(1011): n is a, c, g, or t
  misc_feature (1188)..(1188): n is a, c, g, or t
  misc_feature (1212)..(1212): n is a, c, g, or t
  misc_feature (1280)..(1280): n is a, c, g, or t
  misc_feature (1285)..(1285): n is a, c, g, or t
  misc_feature (1355)..(1355): n is a, c, g, or t
  misc_feature (1365)..(1365): n is a, c, g, or t
  misc_feature (1414)..(1414): n is a, c, g, or t
  misc_feature (1468)..(1468): n is a, c, g, or t
  misc_feature (1483)..(1483): n is a, c, g, or t
  misc_feature (1530)..(1530): n is a, c, g, or t
  misc_feature (1538)..(1538): n is a, c, g, or t
  misc_feature (1550)..(1550): n is a, c, g, or t
  Peptide Sequence Number=SeqID_9679
  Probeset Number=SeqID_11940
tcccctaataaagaacaaaacacataatactcatctataacaactgcttccctaccaccacccccaaaacaccaatcatattaccagggagggcccccccaccccgcccacacccacccacaccacaaaatatccacacagcagactactttttcattatggggtcggttgcaccatcttggggcacctaccattatataatactagctataacttattaggaataacaaactcaactgtattaccttgttactatccgaatccaccgcgcggccatcacttccctctctgttatttgcctccattcaccttaacattaaatctggtgacgccgcaaacccaacacacgatcggagcgccaatccatccttctccaacctaaaaaccgaaaacctatctcccaacacccgtgagacaaccctccacncggcaccattcaccttcaaccagagtcgcagagaacaaatagactacacctcatctagacataatactctttccataatacacacacaaccggaatttattcagaccccacgccctacaacttccccctaaacccgcggcgtaataagaagcacacacaaaaacaagagcctcctcactctaccctcctcttaccgtcaataaccaacggcggcctgacacaacaccgcaccaactaaacgctgcttcacatcaacttcttggtatatatatataatatacaacgcctccaccgaacacaccgntacgactgttaactcaacacataaatacgaaaatctgggatcaaatactctcgctgcgctgccgcgactgcggctcaattatattattctgatagatgtcgtatgatatangtntaaaatcacaatgagcgcccacacaactcgccgcaccatcgtacggcacgcaccacactcaccacatacttctctgccaacctacacgcgcagaggctcctctnttccacgacaggagatgntagtcaagagatagggcgcgaatatanataactgcaacnccccntccgcggcgcagtaggctacgggcaacagagataaacactacacacacacaatctattgtgacaccacctatacagagtggcgcaatacatacactcatctgcccatcccacacccctacccacgagtgactcaataatcagaggtacaacacagacgccgggtgtgcgcgccatanaatctcgtcgcgcacaatcaatanaactgcagatgaaaccagatcacgtcgacgacgacacatcgtgtgacgagtatctcctcctccataantgacnccactctaatacgcgaggatactacacgtctgagagatcattctcgcgcgacccaactcatcgcatatancagctacacngccacacggaaagataacggtcgccactgatacatcacacaaacgacgngcgtcatcatactagactacattattcatctctttcccttcacacaatgaacancgtctcacacatatngtccagactatacagtcacaatgcgatctgccgcatagtagtactcntcatccancctcacacactn

SEQ ID NO: 2162 - DNA, 1416 bp, Glycine max
  misc_feature (135)..(135): n is a, c, g, or t
  misc_feature (224)..(224): n is a, c, g, or t
  misc_feature (242)..(242): n is a, c, g, or t
  misc_feature (288)..(288): n is a, c, g, or t
  misc_feature (332)..(332): n is a, c, g, or t
  misc_feature (348)..(348): n is a, c, g, or t
  misc_feature (383)..(383): n is a, c, g, or t
  misc_feature (403)..(403): n is a, c, g, or t
  misc_feature (598)..(598): n is a, c, g, or t
  misc_feature (651)..(651): n is a, c, g, or t
  misc_feature (740)..(740): n is a, c, g, or t
  misc_feature (1125)..(1125): n is a, c, g, or t
  misc_feature (1221)..(1222): n is a, c, g, or t
  misc_feature (1226)..(1226): n is a, c, g, or t
  misc_feature (1356)..(1356): n is a, c, g, or t
  misc_feature (1365)..(1365): n is a, c, g, or t
  misc_feature (1369)..(1370): n is a, c, g, or t
  misc_feature (1380)..(1380): n is a, c, g, or t
  misc_feature (1383)..(1398): n is a, c, g, or t
  misc_feature (1400)..(1400): n is a, c, g, or t
  Probeset Number=SeqID_11941
cgcacactgatcatacttctcattagatgatcttcacatcctactatatatcttaccgtcgtggcaactccatgacccgagtcagagtgcagtagactattggtgcacactcatcagatacatgattgactacgntgcgccccgtcgtatactcgagcgcagaggcagagcgagtagtgacaggagacgagggacgaaagtgcagcgcggctgcgcattattangacgtagtgagtgatatngtgttattacgagcgtcgcgagtcgacaccggcatcgccgccgtgntggtgctgtgcgtctcatcagctcgcgagactgcaccgtctctnctcttcttgtgtcatngctcctgacagttacgctgcgtgtgtagacgtcangtcgattgtggtcgtctgantcttccactgacatgagataatataaatatacattgagtacaagattatactatataatacgagagttatcgcggtgcgagcgccacgataggtggagaagctagtgagaacagcggacgatgatgcgaggaggcaatagcgcgtagggatatcagaactatgtcttgcttagctgacgcctggagcgcacgcgncatcacacgggagtggtgagatcaccctcataagcgatcaaaccacctcactncagcagacagaaattattgcgatgacttgttacagtgtttctcgtggtgtcatcgcttcgcgcgcgttcagcacggctacctcctatanagggctatcgccattaccacgatctcaacatcacaaacacaacacgacagaacaccctaagactggcgacgccaaccgtcgccacaaacactagcaccgcaggatccgaactagacaaacctacgagtaccgtacatactcttctcccatccatacctcactcccatagtctctgcttatgtgagacagtcaggtcgagtggctgtatgttagtctgttttccggttactcttctctctatatttcggtgctttgtcatcctgttcttcataaaatccaatataaaccataaggcctccccaccacaaacccatcaaccgactccctcctccacctcgacacaccgaactcgaggcattctagatcacccgcgagcaagaccgcngccccaccccgcagaacggtctcacccagccatgaccaggcgtgtatcccacatgtcaggggatcgcttgctttatatatgaattttgtttatacnnttgntgaagattacccctcccaactcactcgcgaagaaagtcgacccatcacagaggaaaaaagagcgagcccgccgcgccacctctggagttagcgctagcctctaagatcaataagtaagcgtagtattaanggaaagcgncaanngagaaaaagnagnnnnnnnnnnnnnnnnangggggggagccacaca

SEQ ID NO: 2163 - DNA, 1849 bp, Glycine max
  misc_feature (1)..(1): n is a, c, g, or t
  misc_feature (19)..(19): n is a, c, g, or t
  misc_feature (104)..(104): n is a, c, g, or t
  misc_feature (132)..(132): n is a, c, g, or t
  misc_feature (174)..(174): n is a, c, g, or t
  misc_feature (179)..(179): n is a, c, g, or t
  misc_feature (196)..(196): n is a, c, g, or t
  misc_feature (220)..(220): n is a, c, g, or t
  misc_feature (227)..(227): n is a, c, g, or t
  misc_feature (233)..(233): n is a, c, g, or t
  misc_feature (256)..(256): n is a, c, g, or t
  misc_feature (328)..(328): n is a, c, g, or t
  misc_feature (489)..(489): n is a, c, g, or t
  misc_feature (508)..(508): n is a, c, g, or t
  misc_feature (841)..(841): n is a, c, g, or t
  misc_feature (1213)..(1213): n is a, c, g, or t
  misc_feature (1551)..(1551): n is a, c, g, or t
  misc_feature (1583)..(1583): n is a, c, g, or t
  misc_feature (1611)..(1611): n is a, c, g, or t
  misc_feature (1690)..(1690): n is a, c, g, or t
  misc_feature (1727)..(1727): n is a, c, g, or t
  misc_feature (1760)..(1760): n is a, c, g, or t
  misc_feature (1765)..(1765): n is a, c, g, or t
  misc_feature (1768)..(1769): n is a, c, g, or t
  misc_feature (1777)..(1777): n is a, c, g, or t
  misc_feature (1780)..(1780): n is a, c, g, or t
  misc_feature (1802)..(1802): n is a, c, g, or t
  misc_feature (1806)..(1808): n is a, c, g, or t
  misc_feature (1812)..(1813): n is a, c, g, or t
  misc_feature (1815)..(1815): n is a, c, g, or t
  misc_feature (1820)..(1822): n is a, c, g, or t
  misc_feature (1824)..(1826): n is a, c, g, or t
  misc_feature (1829)..(1831): n is a, c, g, or t
  misc_feature (1837)..(1838): n is a, c, g, or t
  Peptide Sequence Number=SeqID_9680
  Probeset Number=SeqID_11942
nctcttcacgtatcactgntcacggccgctgctcccactcacatcatcatcgcaccacacatcaccgcaaactctcacaccccacgtgtatgtcgtcgtatttngtcattcttcactcatgactcgtctcgnctcatatcctagtcgtgtctgctctccgtgtcttgatactgnctgcngcggtcgactacgtgcntgcgcactactctgtctaccgganccgtgcncggtgntaacgtgtcgtctgctccgtcgnctccgctctgtatatgtattgagcatagcgatatcttctttgatgtcaccgcttcgacacttcacactgtcngtggcttcgttgtactacattatgatattagagtggtctagtaagtctgtgtggcgctgatgcagttcatcacactcactatcactctcgatcctgcatcctcgtacaacatcctccacgctactagattctcttcatctcgctcagccgcgctctctcanctttcttgctgctgtcgtngcacgtcggattcctgtccgcgtctcgtgtagcatttggtatcacatcaagctacggtgcatatgacacatcctcgctccgtctctgccattgacgtctagcgtcacattaccctctctccgcatcacacgtcatatctctcgctatactcgccgatcagtcactcgtatcatctttcgcacatccgcctccggtactaatacatgtccaattcggaggagcgcttgtgtgtgagttagtggatgtgtattcgtatcgtacagttcatcatacctcatatcgtggtgtggatctaccactcgcacgtgtgtgtagccagacagagcagaatanttattgtctacatatcgtagtcatgcacttctctctttatttacctactctcctcgccacaagctccgactattcttccatctatcttcatgcattcacgtctcatcatatcgcaactttcctcgtatgcgctctcgtgctatactcgatgcagttacgagcgctgccgtccatactgtattcttaatatatgccatctaatctctgcctccgggatcactacgtagtgcttcgtcgtcgtatcgtcaccttgacatctcgcctctcctacatacgaacacatagtcttccgtactcatgcgtacagctcttgtgctccgtcgcgcgcccatctgaatactctactataacatatgatatgtattcactatnaatcacagtactctttttacttcatacacttcatatcgttgctgttgttttgttcttttcgttcattattatttctcgtattttgtgtgttttgttgtgtgtggtgttgcatttgttttatctattcttcgggtgtctattctcgctcatactccgcctcgctatcttctgcttccacgttcgcacgtatatctcgtaagatccactactgtcgcgctacgtcgtgaggctcagaacatcattcttagaagagcatagtggctaccgcgcgaggcggcacaaagagcacactgcgggcgaccacacagaccgatctacatagaccgtcgtcgcacggncgcgtgccacacacatatccggcacgcccgtnaattacacggaggggaaagacagagganttgtacgtattctcactgacaggctgttctctcaatcgcacttcatacatgctcgtgctgcatcgagtgcatctgaacntaggtcctattacacttcctgctgcatcttatgatgncacacgtcggtgagtatgatgtgatatcagcgnacgangannccagtgangtnatcctgtatctgaactccctanagannngaannanttaannnannnaannnaaaaannaaaaaaaattt

SEQ ID NO: 2164 - DNA, 480 bp, Glycine max
  Probeset Number=SeqID_11943
atacgaaaagtcgaactgaaagaaatggcttcgctcggtttcaacctcggattctccttctccggtgtgaagaatcgacaagtttccgtgaatggaagagctcgcgttatctcctgttgttcctcttcttcttcagaagcatctcagcaggggatttctaccacgaagcctcctcctgagatagagctcgagttcttcggtccgaagcctgggagcgacgggacgtatccgagggataaagcgaaagctgtgagcggagagaagcttctgagaagcatcatgcaggatagcaagatcgagctttacgctacttacgggaaagtgatgaactgtggaggtggaggaagctgtggaacttgcattgttgagattcttgatggcagagaacttctgaaccagagaacagatacagaaaacaagtatctgaaaaagaagcctgaatcttggaggctcgcgtgccaaacaatagtagggaacaaa

SEQ ID NO: 2165 - DNA, 1790 bp, Glycine max
  misc_feature (4)..(4): n is a, c, g, or t
  misc_feature (16)..(17): n is a, c, g, or t
  misc_feature (31)..(31): n is a, c, g, or t
  misc_feature (97)..(97): n is a, c, g, or t
  misc_feature (118)..(118): n is a, c, g, or t
  misc_feature (191)..(191): n is a, c, g, or t
  misc_feature (209)..(209): n is a, c, g, or t
  misc_feature (275)..(275): n is a, c, g, or t
  misc_feature (309)..(309): n is a, c, g, or t
  misc_feature (311)..(311): n is a, c, g, or t
  misc_feature (315)..(315): n is a, c, g, or t
  misc_feature (380)..(380): n is a, c, g, or t
  misc_feature (409)..(409): n is a, c, g, or t
  misc_feature (423)..(423): n is a, c, g, or t
  misc_feature (478)..(478): n is a, c, g, or t
  misc_feature (491)..(491): n is a, c, g, or t
  misc_feature (531)..(531): n is a, c, g, or t
  misc_feature (624)..(624): n is a, c, g, or t
  misc_feature (721)..(721): n is a, c, g, or t
  misc_feature (967)..(967): n is a, c, g, or t
  misc_feature (1116)..(1116): n is a, c, g, or t
  misc_feature (1194)..(1194): n is a, c, g, or t
  misc_feature (1368)..(1368): n is a, c, g, or t
  misc_feature (1531)..(1531): n is a, c, g, or t
  misc_feature (1535)..(1535): n is a, c, g, or t
  misc_feature (1670)..(1670): n is a, c, g, or t
  misc_feature (1721)..(1721): n is a, c, g, or t
  misc_feature (1742)..(1742): n is a, c, g, or t
  misc_feature (1750)..(1767): n is a, c, g, or t
  misc_feature (1772)..(1783): n is a, c, g, or t
  Peptide Sequence Number=SeqID_9681
  Probeset Number=SeqID_11944
ttgngtagtagtagannatgtaaattgtgtntgcagcgtcgtgaggaggaagcagcggatggtgacggtcgcgatgcgacgacatgcacaaaacatntcatgctatcagataccaccnatgactcctacatctacatctagcgtagtaagtgtgtgctcatgatgtctggtggtgacgttagcgtgttgtntcttgtacacgcgaagtntaccacacatcagtatatcgcatagtcatcgtatgtacactacagctatatcaatcatacttgtgntgctgatatacacggccacgcgcgtcatcatcancnctcnttcactattctctagtatatggtgttacgagctggcgctgtcgtgtgacgactcacatggctgtnctcagttacataggctgtgtcgcgggatntactcgtatcatcnctgtagtgatcgtcgatcagtgaatctggagagagacagtatagtgatgatacgncatatagtactgngactgatcgctagcactcaatagactggaatgtatgatgntacagtgtccgtatcagtgctacgagtagctacatcatgtcactatgaagtgcatacacacagctgagcataatctcatgagatatgaatagnactaagacggaatgcgcgtggatgtcggcgattccggtgacgtgtggcggttggctagcgtcgtcgacgaacgcgagcatacagacgcgcgacagcnctcacgcgaggtggtaaagaggaggcatggagagagagtagctgatgagtaacaatgagatcgacagaatgatagagctgtccgagaggagagatgagtacaaagagatagaggagtgaaatggaacagtacgatcgatgagcgcgtgcttcctcatcctatcgactcagcgtcagatcgggctcacgcaatagagcgagtagcgcacaggatgttacgcgtgcgaaggggtaggattagatcgantacaggacgagatatcatgtgctattatataagagtagagtaagaatagtatgattacgcgagcgtagagacacaggaagaaagtcaagagtgagggagatagatacacacaagacgacacgtacagagtcgcacacacaagcacctanatacactcgcgcgggcacctgatacacgagacacacacactacgcagacaacacaacgaaaatctcgattcaacatanataacacactaacacaatgctacaaacctggtgaagagaatatatacttctatagcataacagacgcgtagagcacacagtagacacgtgtgacgaccgacaagagagagagccgagacgagatgagtacactggttaacaagatagcacgaacaacagtcacgagacacagtncttgtattgtagttctctatttttcacacgcctggatgttcctctattatcgaattctctcactcaagaagactaagatctaaggcatataggcgaaatcagcacggctacgaatctattatgcatatgtcatcatattcgtgattatcttactagacagtanaacnaatatggagggtgagagagggcgaggcgagatgggcgatctgtttgtagtattaagttttagtatggagttatgtcctcagttttggtgatagatgtgagtggatcggtgcgtcgacgcgcgtcttgaggtgtgntagacgacactttcgggtaagtgctatatatgtagttttttttcttatttntatttgtcttatatcattctncctcgttnnnnnnnnnnnnnnnnnnttttnnnnnnnnnnnnccccccc

SEQ ID NO: 2166 - DNA, 1458 bp, Glycine max
  misc_feature (36)..(37): n is a, c, g, or t
  misc_feature (42)..(42): n is a, c, g, or t
  misc_feature (61)..(61): n is a, c, g, or t
  misc_feature (64)..(64): n is a, c, g, or t
  misc_feature (67)..(69): n is a, c, g, or t
  misc_feature (83)..(83): n is a, c, g, or t
  misc_feature (86)..(86): n is a, c, g, or t
  misc_feature (91)..(91): n is a, c, g, or t
  misc_feature (109)..(109): n is a, c, g, or t
  misc_feature (111)..(111): n is a, c, g, or t
  misc_feature (113)..(113): n is a, c, g, or t
  misc_feature (116)..(116): n is a, c, g, or t
  misc_feature (162)..(162): n is a, c, g, or t
  misc_feature (182)..(182): n is a, c, g, or t
  misc_feature (234)..(234): n is a, c, g, or t
  misc_feature (244)..(244): n is a, c, g, or t
  misc_feature (308)..(308): n is a, c, g, or t
  misc_feature (319)..(319): n is a, c, g, or t
  misc_feature (421)..(421): n is a, c, g, or t
  misc_feature (446)..(446): n is a, c, g, or t
  misc_feature (526)..(526): n is a, c, g, or t
  misc_feature (549)..(549): n is a, c, g, or t
  misc_feature (671)..(671): n is a, c, g, or t
  misc_feature (924)..(924): n is a, c, g, or t
  misc_feature (1010)..(1010): n is a, c, g, or t
  Probeset Number=SeqID_11945
gggggcgtgcgccctcccgtctcccccccccctcgnnttggntgtgtgttgtggttggtgntgntgnnntcttcccggcttcnttntattnattttatctggggagttntntnctnttgtcgcgttgggcggtgattcgtggtgcgctgtgcttctatctanccatctcaccctctcctcancatcgtcgccgcctgtataattgattacataacactcgcaaattactatcanccatatgctngctgtctctggtgagcgtcttactcttctgctgttgctctttgtcgttcgtgggggcgcccgcngacacgcccancctgctcccctccgcaccctgcgcgcgcaccgcgcgctgcttgtgtgttgttattatgaggattatgtatagagtagtggtgacgaggagattgggatagcnccgtactgtatatacattgaatgantacgatattaagtctggtgtggagactagcagagacctacttccatgtgtgctggattatcggctaatgtacacttcgcngtgctcgcctctgcgtcgtcccnggccgccgcgctcttccgcacccccgtgtgcgtcgtgtctgcgtctctccctttcgctcttgtgtgtgcctcttgccatactcttcacaatgttataatatttattctattctatctctttnattatatatttattggctggcgtgtggttctgtgtgggctcgtgtgctattagttgatttgtgattggtcttatgtaagtccagtgcgtagcaccaggatagagagattgtgcgtgtgcgtgctagtgccgaccgcccacagcgtctgggcgcagagtggtacgccgcgagacactggctgatgtacgcgggcgtgcggagtgtctgcgtcgtgacccaccgccactgactgacaccactgactgccctgtcnctcgctatgtctcgcggttcgtcctgcgctggtgtgtcgcgcgtctgcacggtacgccgtcgtcggctgtgtggtccctgtggtancatctactgtggactgcgcgtgtgttgagtgctatgatggtgcatgtatgaggagtgacgttagtactacgcgtgggtcggagcgtctgctcggccgcgcttctctctcgcgcccctttcgtctatgcacatcttctgtatctctttgtgctactcttctataatctttctctatgttgagcatatgctttcatgagagtgtaatgtgagtgatactagatattaacgtaatgggctgataccacgtgagataagtctcgatccatgcttgctctccacgttgcatctcgcatgtgtgcgtgtgcctctcgccgcgcgcgtccgccatgatttatctctacatgtatctgcgcagaggtgcgatgtaggtgggcgcatgactgctgtattcaagacatttcgagcgctacgacgcgcatgcgtctgctgcgctggtaggattagggcg

SEQ ID NO: 2167 - DNA, 284 bp, Glycine max
  misc_feature (4)..(4): n is a, c, g, or t
  misc_feature (57)..(60): n is a, c, g, or t
  misc_feature (249)..(249): n is a, c, g, or t
  misc_feature (284)..(284): n is a, c, g, or t
  Peptide Sequence Number=SeqID_9682
  Probeset Number=SeqID_11946
tcanctacgtaggcccccccccccaatcttttattccttatgagactaaagactatnnnnggactaaagatgatggcatcatcaagatccactgctagaacacatgaccaagaacatgtcttaaaactttataatgatcacttccaaaaacaagctaataatgaaattcgacgagaaatgaagaaatctaatgagatggaagcttgcacttttgttccgaaagtgaatcgagtggatccaaataatcangactctgaccagtgctttaactgttcctgtctacn

SEQ ID NO: 2168 - DNA, 1418 bp, Glycine max
  misc_feature (17)..(19): n is a, c, g, or t
  misc_feature (22)..(24): n is a, c, g, or t
  misc_feature (30)..(30): n is a, c, g, or t
  misc_feature (33)..(35): n is a, c, g, or t
  misc_feature (37)..(37): n is a, c, g, or t
  misc_feature (74)..(74): n is a, c, g, or t
  misc_feature (79)..(79): n is a, c, g, or t
  misc_feature (84)..(85): n is a, c, g, or t
  misc_feature (87)..(87): n is a, c, g, or t
  misc_feature (450)..(450): n is a, c, g, or t
  misc_feature (503)..(503): n is a, c, g, or t
  misc_feature (573)..(573): n is a, c, g, or t
  misc_feature (845)..(845): n is a, c, g, or t
  misc_feature (896)..(896): n is a, c, g, or t
  misc_feature (903)..(903): n is a, c, g, or t
  misc_feature (908)..(908): n is a, c, g, or t
  misc_feature (1000)..(1000): n is a, c, g, or t
  misc_feature (1119)..(1119): n is a, c, g, or t
  misc_feature (1123)..(1123): n is a, c, g, or t
  misc_feature (1243)..(1243): n is a, c, g, or t
  misc_feature (1418)..(1418): n is a, c, g, or t
  Probeset Number=SeqID_11947
ggggtgtgtggtggccnnnccnnncccccnccnnncnccgcgtggtgtggatggagagagggggtgtgcttgantggtngtgtnntnagatcatgatatcatattaatattaaatctatgtgtaatatgtcgaatacgaaggtaaggccagaagtgagttagaatgtaggagattagtatgatattatgttataataatgaggtagtgtggtgagtgtggtaaaaaagagaagaagacgctgagttgggggcgtggggcgcagcccacgcttgtcatatatcatgaacagcaagatgacttagtcagattgaggtgagagtggctagaggagaggctacatctatacacagagaaaataggaaagagaagagagagattatagaagaaaagaaaaatatagttatagtgagcaacaagatcctacaatataatacagttacaacaacaantcatagaagaatagttgattgtacattaattataatatattgagaagtataanaatagagatgttattgaatgatggttgttggatgtggtggtggctgtatagattggcgtcgtgctttgtntgtgtttccggcgatgtgtagaggatgatatgttaataatcgcgtctttatcagatagaccgaatgagacatcgaggtagataagactgcgatataggagtgattcatactactccgactcgcatcgtactgcctctccccgcgaatgtagtaggagtattgaatgtatgttagatgatgacctgcacgccgacacggacagagtctgcgctcagccctactattccttcgcatcgaagctaatgtaattgttagaaatagctcctatcgtngtgtagactgcgactcaatgacgcgcgtcgcatcagtgaagttctgagtgnatatgantaganagcgcagcaggcagcaggaagtgatgagccgtacgctgaggattatccgcgcccgcatacagtatgattagtcgactgtgcgtagcaggcgnctcgcctgctccttagcgcgtggagtgtgaggagtatcgcacaccgccaaccacgtctctgatgtattgcacccacaacgcacttacgtcggtgagggtgcgtgtggtggtcgcgcgcncgangccaagcggatgagatgtaatagaagagatacataaagagtcgttagacagaaacgagacgagaacgaatgcgataatcgagctgtgatcagacatgagctgtgcgcatgccgtgggtcncggcagcggggccgtgagtggtcgcgcgcggcactgtatcggaatgtgtgaagatgcgagatcacgactactgcctctcgtgagatcactgggtaccgtgagaagcatcggtcgcgagagacgactatcatgacgtgagtctctattgcactctattctgtcaccactctcctan

SEQ ID NO: 2169 - DNA, 1545 bp, Glycine max
  misc_feature (1)..(1): n is a, c, g, or t
  misc_feature (20)..(21): n is a, c, g, or t
  misc_feature (25)..(25): n is a, c, g, or t
  misc_feature (30)..(30): n is a, c, g, or t
  misc_feature (32)..(32): n is a, c, g, or t
  misc_feature (144)..(147): n is a, c, g, or t
  misc_feature (155)..(155): n is a, c, g, or t
  misc_feature (271)..(271): n is a, c, g, or t
  misc_feature (275)..(275): n is a, c, g, or t
  misc_feature (323)..(323): n is a, c, g, or t
  misc_feature (405)..(405): n is a, c, g, or t
  misc_feature (824)..(824): n is a, c, g, or t
  misc_feature (899)..(899): n is a, c, g, or t
  misc_feature (942)..(942): n is a, c, g, or t
  misc_feature (946)..(946): n is a, c, g, or t
  misc_feature (1064)..(1065): n is a, c, g, or t
  misc_feature (1067)..(1067): n is a, c, g, or t
  misc_feature (1079)..(1079): n is a, c, g, or t
  misc_feature (1171)..(1171): n is a, c, g, or t
  misc_feature (1302)..(1302): n is a, c, g, or t
  misc_feature (1363)..(1363): n is a, c, g, or t
  misc_feature (1393)..(1393): n is a, c, g, or t
  misc_feature (1437)..(1437): n is a, c, g, or t
  Peptide Sequence Number=SeqID_9683
  Probeset Number=SeqID_11948
ntttttgtggattaattganntttnaaacncncctaacacgtccgcctacttcacactcgcgcgcgctacttccacaacttcgaacagacgaccgcacagcatactgcacgcactactctaacatgcagctgcaacatagaccnnnncactctcntcccgccagacgctgacgacgcgaacccacttggcccggacaactcggtgtgggtgattgtattgtaatgaccgtgaacaacaaccatcaccgacaattggactccacccacgtcncggncgcgccgctgttcttgctgctacacgcaaagagacgagagtgacctcnatgatcactgttatgatgtagcgcgacatcacacactatcatgtggcagaactcgatcgagagacctccccatacacacacncgtctctgtactgactaacacctcgcgccgctcgacaagccacgcaagtacaattaactgcgtcagggagctcgggctgctgcgtatgaagagcatcagtataagcgacacgcactactgagccgcagactcagtactgcacagccccgcagtcacaatctactgcggcgcgacgtcgacatgcatcgtccatatcgtctcacgtgcgtatatgcggcgtaccgtgcgccccagtcgcgacggcgaccgcactcgcgctctctcgcgctcgtccgaatcctcctatgtctgtgtgtggtgtcggtggacgctgtctcttcgtccggcccggctctgaatccgcgcagtcgttcgttctgcctctcgctcgaccggccgacacatctgtacgtagccaacgtacagaacgtacaacattncgctaacatctaaatctgcatacgaacacactcacgtatcgactctgacgatagatagatgcgatcactcgcgcngaacactagcattcttcccaagtcgacacactcgttactctangctntagcagaacaagtgtgtatataccgtgtcgagtgcatcagtgcgcacacgcgcatcatatcgcagcactaattacgcctctacacataacctccgcattgagagaattaggaaaagannanacacaccaatgncaccacgctgcatactgatacaacacggtcacttcgcgagacgtgcgagcacacactagcgtatcagacacatacacgccttccgcgccccnccaccaacacaagtctaacgccacacacacagaagttgcgcactacgacagctctacattgcacagtcttctatctagctcatcagcgaagcgacgcgactacgtgaaatacacgttgatcgtacgtctcncgaatatgtccaacatactactatcgcatcgtcgagagcgcactacggtcgtcgcgcgcangtgtgtgagatgcatgtgaggattactgcnaccgctgaactgctctctacactgctgcacatcgcgctctcccncacgtcatgtgcgcttcactcggcctagtcctgacgtcgagtgatcacatgtgtagacgaaacttcacacatgagctatcgtctcacgtctcgcgacgcgccgactcg

SEQ ID NO: 2170 - DNA, 1907 bp, Glycine max
  misc_feature (1)..(1): n is a, c, g, or t
  misc_feature (4)..(4): n is a, c, g, or t
  misc_feature (32)..(32): n is a, c, g, or t
  misc_feature (42)..(43): n is a, c, g, or t
  misc_feature (48)..(48): n is a, c, g, or t
  misc_feature (60)..(60): n is a, c, g, or t
  misc_feature (70)..(70): n is a, c, g, or t
  misc_feature (76)..(76): n is a, c, g, or t
  misc_feature (92)..(92): n is a, c, g, or t
  misc_feature (112)..(112): n is a, c, g, or t
  misc_feature (117)..(117): n is a, c, g, or t
  misc_feature (136)..(136): n is a, c, g, or t
  misc_feature (143)..(143): n is a, c, g, or t
  misc_feature (148)..(148): n is a, c, g, or t
  misc_feature (162)..(162): n is a, c, g, or t
  misc_feature (165)..(165): n is a, c, g, or t
  misc_feature (208)..(208): n is a, c, g, or t
  misc_feature (223)..(223): n is a, c, g, or t
  misc_feature (234)..(234): n is a, c, g, or t
  misc_feature (240)..(240): n is a, c, g, or t
  misc_feature (245)..(245): n is a, c, g, or t
  misc_feature (259)..(259): n is a, c, g, or t
  misc_feature (344)..(344): n is a, c, g, or t
  misc_feature (347)..(347): n is a, c, g, or t
  misc_feature (364)..(365): n is a, c, g, or t
  misc_feature (378)..(378): n is a, c, g, or t
  misc_feature (398)..(398): n is a, c, g, or t
  misc_feature (413)..(413): n is a, c, g, or t
  misc_feature (444)..(444): n is a, c, g, or t
  misc_feature (450)..(450): n is a, c, g, or t
  misc_feature (455)..(455): n is a, c, g, or t
  misc_feature (538)..(538): n is a, c, g, or t
  misc_feature (543)..(543): n is a, c, g, or t
  misc_feature (579)..(579): n is a, c, g, or t
  misc_feature (582)..(582): n is a, c, g, or t
  misc_feature (613)..(613): n is a, c, g, or t
  misc_feature (696)..(696): n is a, c, g, or t
  misc_feature (716)..(716): n is a, c, g, or t
  misc_feature (723)..(723): n is a, c, g, or t
  misc_feature (884)..(884): n is a, c, g, or t
  misc_feature (950)..(950): n is a, c, g, or t
  misc_feature (1028)..(1028): n is a, c, g, or t
  misc_feature (1070)..(1070): n is a, c, g, or t
  misc_feature (1181)..(1181): n is a, c, g, or t
  misc_feature (1212)..(1212): n is a, c, g, or t
  misc_feature (1246)..(1246): n is a, c, g, or t
  misc_feature (1322)..(1322): n is a, c, g, or t
  misc_feature (1394)..(1394): n is a, c, g, or t
  misc_feature (1507)..(1507): n is a, c, g, or t
  misc_feature (1746)..(1746): n is a, c, g, or t
  misc_feature (1754)..(1754): n is a, c, g, or t
  misc_feature (1767)..(1768): n is a, c, g, or t
  misc_feature (1775)..(1775): n is a, c, g, or t
  misc_feature (1806)..(1806): n is a, c, g, or t
  misc_feature (1808)..(1808): n is a, c, g, or t
  misc_feature (1839)..(1845): n is a, c, g, or t
  misc_feature (1847)..(1847): n is a, c, g, or t
  misc_feature (1849)..(1849): n is a, c, g, or t
  misc_feature (1866)..(1866): n is a, c, g, or t
  misc_feature (1869)..(1869): n is a, c, g, or t
  misc_feature (1872)..(1872): n is a, c, g, or t
  misc_feature (1875)..(1879): n is a, c, g, or t
  misc_feature (1883)..(1887): n is a, c, g, or t
  misc_feature (1892)..(1895): n is a, c, g, or t
  misc_feature (1900)..(1907): n is a, c, g, or t
  Probeset Number=SeqID_11949
ntgngtagagcaacgatggtagagtagtagangtacgtaaanntgacnagtcatcattanagacacgtgncatagnaacgttgagcaattgntaaagcacgacagcatcagnatacnagtagaggagtcatcacanccggcgnagagngtcagcacggcacntancgtcatcgtgcagtcgcatacatgtcaggactgaacgtcggangctcactgcacagtngcagcatgctngcgatnagcanggatgcagagcagnacgttacctggtagcgatgctacagcggtagaccgacagtgtcctcacgtccgacgcgtgcagcagacgctcgatgccgacacangangcagcacacaaagactnnagacatgtcagantcatataccaataaacaatnacgtacgcagaccgngcagcgtacgttacatgcggcgaaattctantcaganaagtnttcttcgcatactacattcgcaacatgtccacagtaacttacgactcacaatagcagagggcgactatgtagtattgcgtgtntaagnacatatctcgctactaggtatcagcaatctatagtnacngtgacagtagcggcacgcgcgcgtagcgcanagcgagaccataccgacagcgtacatgaggtcgcgtggactcgtgcgcgcgtgatgcggactgatgatgtgcctcgacatcgncatgccgacgaacgcaccanaactacngacagtaccgacacagtagtcgtgatgtgtgtcagatatgcgccactacatgtatacatgatattataagagctgcgagacgcgcttctagcagcacaatctcacagctatacatactgcaccgtatgtatctgagtatacagtgaacaggtacattcaantaacgtgtaccaacaaccgccctcggcacctcacttcgatctatcgcggtactattagatcttacnactcaagacaccacacagacaccaacgtggcatcaatatgtgtatgatgtgaggcagcagcacacagatagcaccgtngctgctatcgtactcctcacgagcacatatcacatacactantcactgtctgctcactctgtacgctacgttgtgcgcgtcgacgttgtcgctccgccgtctaactcacacgatcaccagctcgtctgcgatacgctgatgtagccgtatacntcacccgcgacctccatatctatcaccacanatcaacattcaatctaagcatcaagaaaaccacntacacataaagtaagcagagctatctaagcaaacgcagcacacaccactcacaagcaacaccacaccacatcacanctacaacaagacagacacacaacagcgaatacagactaaacagcgcaaacacacgcgcaacactcctcacancgacatatactaacacttccgctcactcaccccgcctcacctcctccaccctccaaccatcgcacacgcacacccacacacacacactaccacccacacaccgctccctaacnccaccgcgatcaaactcagcgccaacgtagaaactacgcagaacacacacggccgagccggcagacattacaaaccaaccgcgcggcaaccgcactataaacacactatatcactaatatcacatatcaaatcatacatgaaccactgcacaccatagcatataaattactccgtcgtgtagaagggagtgttagcgtgcggagtggagtgtgggtctttggggtgcgtggcagaatgngcaatagnattggtgcgtgtnnccggttntcatttagaaattgtacagtcgtggtcattntntggttgtgagtggattgattattctattagnnnnnnngntntcgtgtgagattaattnggnaanttnnnnncccnnnnnccccnnnnttttnnnnnnnn

SEQ ID NO: 2171 - DNA, 534 bp, Glycine max
  misc_feature (123)..(124): n is a, c, g, or t
  misc_feature (176)..(176): n is a, c, g, or t
  Peptide Sequence Number=SeqID_9684
  Probeset Number=SeqID_11950
accgtttgttctattcttaactcaacttctgctacccactctcttcttccaagtccaaccacgcttttctctacagtcatgggcaaggtcaagatcggaatcaacggatttggaaagattggnncgttggttgccagagtcgctctgcaaagagacgatgtggagctcggtggcgntaacgaccctttcattaccaccgattacatgacatacatggttaaaatacgacagtgggtcaccgacaactggaagaatcaccgaagtcaccgttaaaggacgagaagaacttccctctccgtgacaaggcagtcactcgtgtttgggaacaggaacccctgaagaagtcccctggggggcaactgggagctgatatcatttggtgggcccccccggggattttccccggttaaggaccaaggcgcgcacattttgaaaaagttgtgggggaaaaaaaggtaatttaattctggcccccagtaaggatgccccctgggttttttggtttgttggtaacacacgagcacgagtacagac

SEQ ID NO: 2172 - DNA, 1854 bp, Glycine max
  misc_feature (1)..(1): n is a, c, g, or t
  misc_feature (41)..(41): n is a, c, g, or t
  misc_feature (62)..(62): n is a, c, g, or t
  misc_feature (112)..(112): n is a, c, g, or t
  misc_feature (125)..(125): n is a, c, g, or t
  misc_feature (161)..(161): n is a, c, g, or t
  misc_feature (175)..(175): n is a, c, g, or t
  misc_feature (218)..(218): n is a, c, g, or t
  misc_feature (239)..(239): n is a, c, g, or t
  misc_feature (261)..(261): n is a, c, g, or t
  misc_feature (290)..(290): n is a, c, g, or t
  misc_feature (298)..(298): n is a, c, g, or t
  misc_feature (327)..(327): n is a, c, g, or t
  misc_feature (350)..(350): n is a, c, g, or t
  misc_feature (356)..(356): n is a, c, g, or t
  misc_feature (399)..(399): n is a, c, g, or t
  misc_feature (427)..(427): n is a, c, g, or t
  misc_feature (429)..(429): n is a, c, g, or t
  misc_feature (431)..(431): n is a, c, g, or t
  misc_feature (442)..(442): n is a, c, g, or t
  misc_feature (452)..(452): n is a, c, g, or t
  misc_feature (458)..(458): n is a, c, g, or t
  misc_feature (468)..(468): n is a, c, g, or t
  misc_feature (470)..(470): n is a, c, g, or t
  misc_feature (481)..(481): n is a, c, g, or t
  misc_feature (506)..(506): n is a, c, g, or t
  misc_feature (516)..(516): n is a, c, g, or t
  misc_feature (518)..(518): n is a, c, g, or t
  misc_feature (526)..(526): n is a, c, g, or t
  misc_feature (723)..(723): n is a, c, g, or t
  misc_feature (842)..(842): n is a, c, g, or t
  misc_feature (913)..(913): n is a, c, g, or t
  misc_feature (924)..(924): n is a, c, g, or t
  misc_feature (1006)..(1006): n is a, c, g, or t
  misc_feature (1018)..(1018): n is a, c, g, or t
  misc_feature (1064)..(1064): n is a, c, g, or t
  misc_feature (1070)..(1070): n is a, c, g, or t
  misc_feature (1074)..(1074): n is a, c, g, or t
  misc_feature (1098)..(1098): n is a, c, g, or t
  misc_feature (1126)..(1127): n is a, c, g, or t
  misc_feature (1140)..(1140): n is a, c, g, or t
  misc_feature (1277)..(1277): n is a, c, g, or t
  misc_feature (1322)..(1322): n is a, c, g, or t
  misc_feature (1326)..(1326): n is a, c, g, or t
  misc_feature (1331)..(1331): n is a, c, g, or t
  misc_feature (1335)..(1335): n is a, c, g, or t
  misc_feature (1365)..(1365): n is a, c, g, or t
  misc_feature (1394)..(1394): n is a, c, g, or t
  misc_feature (1405)..(1405): n is a, c, g, or t
  misc_feature (1434)..(1434): n is a, c, g, or t
  misc_feature (1498)..(1498): n is a, c, g, or t
  misc_feature (1500)..(1500): n is a, c, g, or t
  misc_feature (1626)..(1626): n is a, c, g, or t
  misc_feature (1633)..(1633): n is a, c, g, or t
  misc_feature (1695)..(1695): n is a, c, g, or t
  misc_feature (1737)..(1737): n is a, c, g, or t
  misc_feature (1753)..(1753): n is a, c, g, or t
  misc_feature (1755)..(1756): n is a, c, g, or t
  misc_feature (1758)..(1758): n is a, c, g, or t
  misc_feature (1783)..(1783): n is a, c, g, or t
  misc_feature (1795)..(1795): n is a, c, g, or t
  misc_feature (1808)..(1811): n is a, c, g, or t
  misc_feature (1815)..(1820): n is a, c, g, or t
  misc_feature (1825)..(1825): n is a, c, g, or t
  misc_feature (1841)..(1841): n is a, c, g, or t
  misc_feature (1843)..(1843): n is a, c, g, or t
  misc_feature (1848)..(1848): n is a, c, g, or t
  Peptide Sequence Number=SeqID_9685
  Probeset Number=SeqID_11951
nggtagtcagtgagtaagagagagattgtctatcgtgatanagagcattccagtcgagttcntgcgttcgttccgttgtcgtcgcgctgtcgacgacgtctgtctgtgatgntgcatggctgtgngtgcgagcgcatacggagcgctggccagcgctgccnagctttgtgaactngaatgatgtttctgctagggtatatctggatatgctaggtctngtccgtctctggtcgaccgantcgcgttgggcgtgctatcgcngtgcgacacgagccaacgagagatgaganagatgagngcagacatgcgcgcagtacagatgtttcntgtgcgatctgcacatgcacggnagagcnacgtgtggacagcatgagagagtcagcgtcatatcctgtcatncacacgctttgaatagctacgtactcgntngnatggtcaggcnttactgcagngacagnatcgcatatngnatgcagagtanagtataatatcaatatagtgagtanctgtatgtantntgtagtgnttgtgcgcgtgcggggcgcgtgaggtcgtcgagacggcgcgtagagcgagagtggcatgtgtgtctgtcggcgtcgcgtgcgcgctgtagagatgagtgagaacagatgatggggcgcggcagcgtgcgatggtgcgattcacgctggcatagtgactctatactacaatatatataatagacgatgtggtgtcgangtgagagagagatagagtgtagtaggtggttgtgtgatacttgagcaacactatgatagtagagagtgtcctgtgcggtgtgtcacacgcatcatcagtctagcgagcgcgcgcgtganagtatctttgtataatgatcgcattctcgtgtactatcgtcaagttgtcacatattatatcactatgatcntgacatatctnacttcctctcgtacacgaacacggactacacaatagacactatatcataatcaaatcatacactcccctgcttacaatttcnttatcctccgcngcttggtagatctggtgttgtaagatgtttgtttattgacatcgangaagtntttnatgcatgtattcttattactttgntcctgcggtggctctagtatcgcaagannacacaagtgttangatgatagtagtgatagtctctaccagcagtcataatatattacagataagagaagtgggagaatgcatcctcggtatggtagagtgtgatgttatagacgagagaaagagatagataaagtataaatggtagtaantcgcatcaatcgcagcgtcgacactatatatagatacgataatanacgncctcncgcngagcgccgggcgcgcgtcgccgccgcggcnggccggcggccggcaccagcgcgccgcgnacgagtgcgtnacgcgagcggcagagtcgttcgcgtccantcgatttcctggcgaagtagatgagctcaggagcagtacagagtgcacaagtgatagttgtgangntgtgctgacgcacgagagtgggagaggaggggttgatgagcgcgacgagacacaagtggatagagagacgaaatatacttcacacctccactcgtttgacgagtaacagccctatatatcgcaccngcgacanacaccgaccctcaacacaaacaaacaacagcgcagaagcgagcgcgtgggggcggggtggcnggtgaggagtcggctcgttctccactccgtacgcgtcacaanacaaagagaaagagancnngnaaacagaacaaaaaaaaagaaaaangagaaaagaacnacaaaaagaaaannnnaaannnnnncaacncaacccacacacacancnccaanaaacac

SEQ ID NO: 2173 - DNA, 870 bp, Glycine max
  Peptide Sequence Number=SeqID_9686
  Probeset Number=SeqID_11952
ggacgaggagaactcttccgactcgttcgaggaaggggatagccgtcgaagtttcattttcccgagtgatgacttggcactttttagaaatagtgcctgacctaagaaacccccatttatactcgtgtcgacgtgcgcttttgatttctgagccctaacttcacattttcgcctcgaaccactcctttatttccctaagattccgctcctgttcgttccgccggcgagattgcgatggcgctgaaacggaagaggcagagctccaccgtggctatcatcctgcccatcgacctcaacagtcagttgccattcacgggtaaccatatgtctgttatttcagaatctgatcttcttcatcttggggttttacctccaaaagaactctactcttggcggatttgccgcggggccactgttctgacggaggacacccatgagtctgtcgtctatgttccttttcttatccgcggccttgctcttcatatttctcccttcttccgtggcctccttgatttctacgatctgaacttgacccagttgaatcctaattctatcttgcaagtttccattttattcatctgtgtgaggcctatctcgggattctcccccatttcggcctctagaagtatctgcatcattgtcggcccgggatggctcggggacaacactgtaacaccccaggtgttacttaggggtttcactcaagaccacacaagtaagcccatcatcacatgtgacttaagttgggaaaagtacaccaaagttggagctcaagatcctaagtaagtgcaacccaccttaaaaatcataccttggcttgttatgcacatataacaccagtgctagcttagcctgacaacacgaagccct

SEQ ID NO: 2174 - DNA, 1812 bp, Glycine max
  misc_feature (1)..(1): n is a, c, g, or t
  misc_feature (6)..(6): n is a, c, g, or t
  misc_feature (18)..(18): n is a, c, g, or t
  misc_feature (31)..(31): n is a, c, g, or t
  misc_feature (52)..(52): n is a, c, g, or t
  misc_feature (56)..(56): n is a, c, g, or t
  misc_feature (64)..(64): n is a, c, g, or t
  misc_feature (79)..(79): n is a, c, g, or t
  misc_feature (91)..(91): n is a, c, g, or t
  misc_feature (140)..(140): n is a, c, g, or t
  misc_feature (242)..(242): n is a, c, g, or t
  misc_feature (420)..(420): n is a, c, g, or t
  misc_feature (497)..(497): n is a, c, g, or t
  misc_feature (506)..(506): n is a, c, g, or t
  misc_feature (626)..(626): n is a, c, g, or t
  misc_feature (662)..(662): n is a, c, g, or t
  misc_feature (672)..(672): n is a, c, g, or t
  misc_feature (709)..(709): n is a, c, g, or t
  misc_feature (747)..(747): n is a, c, g, or t
  misc_feature (750)..(750): n is a, c, g, or t
  misc_feature (794)..(794): n is a, c, g, or t
  misc_feature (834)..(834): n is a, c, g, or t
  misc_feature (957)..(957): n is a, c, g, or t
  misc_feature (1155)..(1155): n is a, c, g, or t
  misc_feature (1286)..(1286): n is a, c, g, or t
  misc_feature (1305)..(1305): n is a, c, g, or t
  misc_feature (1330)..(1330): n is a, c, g, or t
  misc_feature (1361)..(1362): n is a, c, g, or t
  misc_feature (1388)..(1388): n is a, c, g, or t
  misc_feature (1407)..(1407): n is a, c, g, or t
  misc_feature (1482)..(1482): n is a, c, g, or t
  misc_feature (1494)..(1494): n is a, c, g, or t
  misc_feature (1551)..(1551): n is a, c, g, or t
  misc_feature (1556)..(1556): n is a, c, g, or t
  misc_feature (1595)..(1595): n is a, c, g, or t
  misc_feature (1599)..(1599): n is a, c, g, or t
  misc_feature (1624)..(1624): n is a, c, g, or t
  misc_feature (1627)..(1627): n is a, c, g, or t
  misc_feature (1646)..(1646): n is a, c, g, or t
  misc_feature (1652)..(1653): n is a, c, g, or t
  misc_feature (1664)..(1665): n is a, c, g, or t
  misc_feature (1668)..(1669): n is a, c, g, or t
  misc_feature (1671)..(1671): n is a, c, g, or t
  misc_feature (1712)..(1715): n is a, c, g, or t
  misc_feature (1727)..(1727): n is a, c, g, or t
  misc_feature (1729)..(1729): n is a, c, g, or t
  misc_feature (1744)..(1745): n is a, c, g, or t
  misc_feature (1768)..(1768): n is a, c, g, or t
  misc_feature (1771)..(1771): n is a, c, g, or t
  Peptide Sequence Number=SeqID_9687
  Probeset Number=SeqID_11953
nctagngcagtgacaatntgagcgtgtcagngtctacgctgaatgcggcatncggntgtagtangtgtgatgatgtcgnggattgcgacgngcgatacgatagctaccgtgcacactatctcacatacacgcgagagatntctcgagtcgagcgtctagaggtagagagcgatagatgtacgtatgacgtcatgagcgttgcagagataaggcgacaggtggtagggagcagcatgcgatgnggtgagcgagagagatgtagagagcatatgagtcaacacagtgcagcgggagcagacagtgtacggtgtgctacgagtataatatgcagtgagtgactatatcgatgagccagcgtagaggactacgcagcatcgtccgatagagtccacaggatgatgtaaatcgtcgagagtgcgntatatccgtatatatattattacgaggacatcagagtgtgagacagatgacaatgcactcacgcgactatacctcancacatagtnaggctgcgaggacacacatcatgtatagtggagatgcgagtagcgtagctaggacgagattgcgaggtggcgggacgagtgtcgagtatgtatgattgacatttggtactccgacaactnagttcgacatcacgtccgaatacgacgcgtcgatgnggtagtgaantagtattctatgcgctgtcacaaagatagagaccacnaggaagttgatagtatgaccaacgtgcaggggtgcgtntgnatggagtgtatccacaatggagacgggaggtaactccagggttnaggagaatagtagacacatcgaggtctaatgtacgatatntgagatgttagatattgatctcgtatattgtgagattataagaatagatatattagatctagttatgtgcgtagcacgagtgtcacacaagagtatcatgacgagcgcatgaacatagcaatnggccgtgtaatgggacggaggcacagacaggcgatcgtacgcgtctatacttctctaccagtggcgctgtgacgacgagatctgcgtgatgcggactcacatcctgccgggtggtgcggtgaatggtatatatctctatagaaagggtgctaggagcagtaacaattccataatatgtgtcttccggtcattagaganatgaaatggttgggacttattgatatagtcgtgaggcgtcgacctagagaggtttagatcacacgacactagtgcgcgacatagcgtagagctactagacgcttcacctgtcctattggcgtagcgcaggngcgcgctcagctagacacngagctacagagcatgacaacacacnatacgcgagcgcctgaagggattgaggtggnncatatctattataacgatgagcaggnggtcgcggggagtggtgantactcactcctgccgcactagacacggagacgatgattgtatagtagagtgtgagagatgatggctgcatattanctggcgcgatgnggagaatcccactagcacctaccagctacccccccagcggaggagggtgaatgacanatgangatttaccattagatgatggcggtggctgcgcgagtcancccncttctcacactcacatgggaggtgntgnatgcgcccgctccctacancaatcnnaccaccacccnnccnntncccccccactgtttacaaacacattcacacaaaccccagannnnctcgtattatgngntattactattcaccnnacaaggagtcatagtaggagtgnctnagtaacccatacatatatgttaacacacctcttattccttc

SEQ ID NO: 2175 - DNA, 724 bp, Glycine max
  misc_feature (226)..(226): n is a, c, g, or t
  misc_feature (299)..(299): n is a, c, g, or t
  misc_feature (367)..(367): n is a, c, g, or t
  misc_feature (379)..(379): n is a, c, g, or t
  Probeset Number=SeqID_11954
caaaattctctctctgcctctttactcactcactcacactccgctccgcttaactgtaatggaaccattccatgctccgaatccccaacttcatcgctgtcaacgtccgtcaccgtctccgtaacttccctaatcctattcctttccttctctccgtttccgtcgctgcatctctccctccgttacggaaccgaagcccgtcacagatggcggctcgcgaatcgantgatgcggattacgcgaaaatcgggaagtcgtcgtgcagggcgtgttccaaaagatcgaagcgaaggcatttngagctgcttcggtctcaaaggaaaatgtccgtacgacatcgtcaagtgcacccactcccgtgttcccntctttctctcantctcactccctctctgaagcatcagaggcttttcctcctttgagagagtgaccagaagctctgaagaagtatttgctgaaataacagtctgaagaaaagttaatgaaacagtgaagatgtacaaatgagctgcagaaactggaagcgtggtcaagagattaggggtagtgacaggacctctaaagagttatttgtgaaaatacaagttaagagagttgccacactgatgtaaggcttggggacttaaatttcagttctgaggcaagacatacaagttgtccctttacaaatggaggttctcaacgtctattcttgacgggtgatggctgatatcaaaaaacgtgt

SEQ ID NO: 2176 - DNA, 1666 bp, Glycine max
  misc_feature (233)..(233): n is a, c, g, or t
  misc_feature (270)..(270): n is a, c, g, or t
  misc_feature (285)..(285): n is a, c, g, or t
  misc_feature (502)..(502): n is a, c, g, or t
  misc_feature (610)..(610): n is a, c, g, or t
  misc_feature (634)..(634): n is a, c, g, or t
  misc_feature (639)..(639): n is a, c, g, or t
  misc_feature (656)..(656): n is a, c, g, or t
  misc_feature (673)..(673): n is a, c, g, or t
  misc_feature (771)..(771): n is a, c, g, or t
  Peptide Sequence Number=SeqID_9688
  Probeset Number=SeqID_11955
gggcggtggctgtcggcattgcgtgttctatatagcggagcatattaagaacaatgtctaacctaatagatgtctcatcggacgtggcaacgagatacgcaatgctttcctttgtgctgcgcgcgccgccgcgctaaagtataccgtatatagcgcatatacgcgcggatattcatttagcggaggaaatatttgtagtatgtgttagtcacaacatctcgcacataccacanagaggatgtatattcgtttcccccgggtctctagagngacgtgacggtagtnctgagtgttgtacacacgcacattgtagttatgttctatgctatatagtgcggagcgtcgggcgggtattgcgacgagaataatatattcatctcgtatgtgtgtgcgctgacacacgcgctagtcttatctatattctctgcgcccgcgcgctatttatttatatatattacacaattacttctcgtggccgtgcctctagctgtggcgacgaggntgatttgataagatcgtgtcgagagagggcgcacgcatccacacaatagatcgagtcctactatatatggtgtctggcgcggatgagattatctagcaccagtggtgntgtggggtgtgagcacgcatatcncatangtattgtcatcatattnatcattatcgtgctcancatactagaggcacgtgttacaaatatcaacattgtgtggtatatatatctctagagatagtggccagtgtgtggcgtgatagatattatcgggtgtnggatgagatgtaaacacaagatatattatcctttatataaatcgattatttatatacccgaccgctcctcggtatctgttgttttgtggtgccagtccgcgagttgttatcctcaacgacgtgttgtaatgggctattttaaccgccctcgttaattataatacggcgggagacacataggtatatttatatccgcggtggcggcacttattattattctttatatttcgccatataatctacgtgggcgcggagacaaaagtgctgatagtcccatatagtgtggataataaggtattctatatcagcgtggacatatacataatacaatgagggagcgcggcgaatgtctcatttttataaatcttatttcgcgcgcgcattctatattccactacgcccgttttcttgtagcaggggggcgcggtgggcgcgagcacgcgcgcgttcatatttctctggcgggggatatactagtcctattatatatagtgcgctgcaggatttatatataatagtagcggacggcatattgtgatattctctcatatatggtggaggaatatattagcacgcatgttgcgggtcagattattcatatatctagcggcgtgagtacaaagagcgagaagaaggtaattttgagttgataataaaacgtggcgaagatatagagggaggtgaggtggtgtggcgggggcgcttacgttccacgagtaacttccactatcaaaacctccgcggtggtatgcgcaagagagaaaaatacgagggcgttaacatcgcagcgaagcggggagagaataaccacatcttcataagggagaggtggttcatcgcccgggtctataagtgattgaggtaataagtaggtgaggagggatgggcgccactc

SEQ ID NO: 2177 - DNA, 1771 bp, Glycine max
  Probeset Number=SeqID_11956
atgtgccaaaagaatcctcgttttattggtgtcaagtttcctgatataacaaagcccgaaactcttgaaaagaaataccttgggaagctttcaaagaaggctttagcgtttatgaaagtgtgtttgaagatggatcctgctgacagaataaccgcagccgaagctcttcagcatccatattttgatgggttaagggaaagtgttccagcaactcccataagttcggatagtttgagaatagagtcagctaaacctgctgcgatatcaacaaacaagctgaatgctgtcaatacttcaataacctctttgaataaagtcggttctcatgctccagcaactcaatcttcaagccaaaagatgccgactcaaccaagtcaacacaacgctgatagaagatcccaagccaatacaaactctggcactcctattcatatgaatcacgctgaatcttcttcaactactacaactgaacgttcatcaagaacaaatttaccggccaagaatagtaagcatagtatcggaacagcagcttctacaaaccgcagtggaagtctcgaaaagcctgttgaaagatcatcaagtttaaacaagacagctaatcgtttagaaaagttgtatcaagtgtatgatgccaagaaggtgttgaaggatggtcctcatcagactcaaaacagttttaataataataataaaaagtcaacaagaggctatgaaaatgatcatattgatcctaatctgaatgttcctgatgttttcttaaagacaaagtatggatcagttgctcagtataattatgagatccttgaacagaacgagtctgatcaagagatgaattcccctcataaaaagactcagcctgatgaaagaagaactactaaagacaataaagagcatccccatcatcaacagcaacaccaatatttaactaaaggaaaaagagttacaagaaatgattcacatcttcatgataatcatcgtggtgacagtgaagatagcagagcaagttcatatggaccaacaaagaaagctcaagtttcaacaactgcaactggcctcaggaaaaagagcaaatttaatcatgcttataatgatggaactgattcaattgaaacaactcaatctacaatccattctacaaagtcaaagttgattggtaaattcagaaatcaaacaatgccaaatgaaggtgatggtgacttggaaggatcaacaaataatttgggaggtgaaattcacgattctcaaaccttctcaagtggacaattaccttacttgagtaaacgtcatggtgctgaaaaaatgactcctaatccttttgactctgcaactgatggacagaagcatggaaatccttggaaagggactagaaattctcagcagataaatccgggaatggtgtcatcacattatgaggtagcagatggagaaatcaagcattataatatcatatacaacaataatacattcaattacaacatcaatacgacttcttggaatggtcattcaaaaagaaagttttaaaaatgaactcagagaaaatgattatttaaaattggtgaaacagggaaaggacaattaacttttgaattttttattttttggttgtgaagtataactgtataagtgaagttaagatgagtcagattttattgttgtttagattctttaatattcttttataaatcttacttggtatgaattattcttggtcaatgtcaatgttatataaatatatctactataattattcatcattttttgaaaatcgatg

SEQ ID NO: 2178 - DNA, 1358 bp, Glycine max
  misc_feature (27)..(27): n is a, c, g, or t
  misc_feature (33)..(33): n is a, c, g, or t
  misc_feature (103)..(103): n is a, c, g, or t
  misc_feature (128)..(128): n is a, c, g, or t
  misc_feature (139)..(139): n is a, c, g, or t
  misc_feature (153)..(153): n is a, c, g, or t
  misc_feature (230)..(230): n is a, c, g, or t
  misc_feature (233)..(233): n is a, c, g, or t
  misc_feature (235)..(235): n is a, c, g, or t
  misc_feature (243)..(243): n is a, c, g, or t
  misc_feature (245)..(245): n is a, c, g, or t
  misc_feature (264)..(264): n is a, c, g, or t
  misc_feature (332)..(332): n is a, c, g, or t
  misc_feature (335)..(335): n is a, c, g, or t
  misc_feature (347)..(347): n is a, c, g, or t
  misc_feature (362)..(366): n is a, c, g, or t
  misc_feature (396)..(396): n is a, c, g, or t
  misc_feature (416)..(416): n is a, c, g, or t
  misc_feature (420)..(420): n is a, c, g, or t
  misc_feature (423)..(423): n is a, c, g, or t
  misc_feature (431)..(431): n is a, c, g, or t
  misc_feature (435)..(435): n is a, c, g, or t
  misc_feature (437)..(437): n is a, c, g, or t
  misc_feature (468)..(468): n is a, c, g, or t
  misc_feature (472)..(473): n is a, c, g, or t
  misc_feature (476)..(476): n is a, c, g, or t
  misc_feature (478)..(478): n is a, c, g, or t
  misc_feature (483)..(483): n is a, c, g, or t
  misc_feature (525)..(525): n is a, c, g, or t
  misc_feature (585)..(585): n is a, c, g, or t
  misc_feature (587)..(589): n is a, c, g, or t
  misc_feature (591)..(591): n is a, c, g, or t
  misc_feature (601)..(602): n is a, c, g, or t
  misc_feature (633)..(633): n is a, c, g, or t
  misc_feature (641)..(641): n is a, c, g, or t
  misc_feature (715)..(715): n is a, c, g, or t
  misc_feature (739)..(742): n is a, c, g, or t
  misc_feature (926)..(926): n is a, c, g, or t
  misc_feature (996)..(996): n is a, c, g, or t
  misc_feature (1006)..(1006): n is a, c, g, or t
  misc_feature (1234)..(1234): n is a, c, g, or t
  misc_feature (1252)..(1252): n is a, c, g, or t
  misc_feature (1257)..(1257): n is a, c, g, or t
  misc_feature (1271)..(1271): n is a, c, g, or t
  misc_feature (1281)..(1281): n is a, c, g, or t
  misc_feature (1285)..(1285): n is a, c, g, or t
  misc_feature (1292)..(1293): n is a, c, g, or t
  misc_feature (1297)..(1297): n is a, c, g, or t
  misc_feature (1309)..(1309): n is a, c, g, or t
  misc_feature (1326)..(1326): n is a, c, g, or t
  Peptide Sequence Number=SeqID_9689
  Probeset Number=SeqID_11957
tgttgggcgtagctctcgtgcactacntcgcancactcttgtcttacatagttgggtgatgtttgatttgttgtgtgtgttgtctggtgtatggtgtggttcngcattactgatggtgtagttgtganagttgtggtanagtagccggtaganagtcatcagttcccacgcttgtgttgtttcaccgaccggtgcccgactctttcctctgacagtacacattaatattncgnantaacactntnaccaactcatacactaacntaatacataacgcacacattctgataaccgtcaacgacgccgcatggcactcgtgctggccctgtagnttnttgtcatctcanccggtggtatagtgnnnnnggcacgtactaccacgtccggcttcgggtngagtgctgtgtttggcatcnaacnggngcctgatngagncncgcaaccacacaccacccttcctccgtacanacgnngcngngcggntgctcgccgcgtggggtggtggtgtggcgcacacacactatncctacaccagcagccaatagcatatgtaattcacacacatatatttaactaatatattanannntngggggggttnntactacacacacaaataccaacctacaactncttcactnaacatctcatctccgatactccagctcccacccacctcactcatcccttcatcgatctattaattattttctcncctatctctactcccatctatacnnnncctcccacacacaccaccttgagcacgccgcacacaccacccacactcctccaaggatagtcatgcgtgtaccatttcatctcacacacccaccacagaagtccttctcctccaacactcccccacactctaaggtgggcatctcagccgcactccgtgcgtatagcagggtcactctagcctncatgatggagaggggagaggttcggtcgcgtctcatgctaccctcgccaaatgtgttggctacgagagtngacatttgtncttattatgtggttggtgtgtgatgtgtctcaatatgtcgttctgtctgatgtgctctatgttttctacacctctcgcgcgggcgccgatgcttaggtgactattagtatattttacttcttcttttttatgtggggtggctaccacatcagtctattagtatttattagtgtgtggtgtgggtggcgggggctccgtcgcgccacaatatgtgttgtatgttggcancggtggggggggccatcntatanatatcctcccgttnctccgccggncctnaaacgannatanaataaaaattanaagagaggccggcgcgnggggggggagggcaaccaccccaaaaaccccc

SEQ ID NO: 2179 - DNA, 1712 bp, Glycine max
  misc_feature (259)..(259): n is a, c, g, or t
  misc_feature (553)..(553): n is a, c, g, or t
  misc_feature (559)..(559): n is a, c, g, or t
  misc_feature (887)..(887): n is a, c, g, or t
  misc_feature (965)..(965): n is a, c, g, or t
  misc_feature (1097)..(1097): n is a, c, g, or t
  misc_feature (1196)..(1196): n is a, c, g, or t
  misc_feature (1281)..(1281): n is a, c, g, or t
  misc_feature (1300)..(1300): n is a, c, g, or t
  misc_feature (1381)..(1381): n is a, c, g, or t
  misc_feature (1410)..(1410): n is a, c, g, or t
  misc_feature (1459)..(1459): n is a, c, g, or t
  misc_feature (1473)..(1473): n is a, c, g, or t
  misc_feature (1476)..(1476): n is a, c, g, or t
  misc_feature (1482)..(1483): n is a, c, g, or t
  misc_feature (1503)..(1503): n is a, c, g, or t
  misc_feature (1545)..(1545): n is a, c, g, or t
  misc_feature (1549)..(1549): n is a, c, g, or t
  misc_feature (1553)..(1553): n is a, c, g, or t
  misc_feature (1565)..(1565): n is a, c, g, or t
  misc_feature (1574)..(1574): n is a, c, g, or t
  misc_feature (1636)..(1636): n is a, c, g, or t
  misc_feature (1679)..(1679): n is a, c, g, or t
  misc_feature (1700)..(1700): n is a, c, g, or t
  misc_feature (1702)..(1702): n is a, c, g, or t
  misc_feature (1712)..(1712): n is a, c, g, or t
  Probeset Number=SeqID_11958
caccgcacatatatatatatctacacacaataccgagcgatgagtcgagcacagccctagctagacatagccgttgcactttcatccaccttcgttgatacgtggtgccagctgacccgccagcaacctccgcgtcgccacaccgctgtgacgtcaataataaggaggagattatatactcccctctcctcctgctagttatgggcgtcgcgatattatcctcgcactgtcatcatatatgatcgcggcgtgtgtgatntgattgttgtgtacgcgccgctgatatactcgtcatatcacttcatattaatcttttatcggcttcgctcgcctcggacgtcacatcgtgcgtctcctatactcgcggatgtaagcacgaactcacatcgaatctctactattggtgggcctccgtgtctacacctgtagactgattatacattctctttgatcacctccggctgataatagttagattaatagatgagagacttcagccgcctccagtactgatatgtctgctgtctgtattatcgtgtcgcggtgcgccgancggcgncgcgccgccgcgtcatgtggttagtaaatgtgatcagggatctcacggtcgctaccccaccaccgtcaagtgatactcgccgcgcaacatctgcgcggctaccgccacgcactataacatcatatatgatgcctcagcacgaccgccagcgacgcactcactctatcagtgcagctatgatattatgatacgcagcttacttatctggcgtccgtgccctgtccgcgcaattatgataatatatctccgacatcatgtatatgttatagtgcacccggcgtatatgttacgcctcgctgagtctgtgtgcgctttgtgtgtttatgtngtagtttattatcacactcgactatatgtttcgcgcggcgtgacatattgatgcaactaccgcgacgttcgtcatctntctcgtcgcggttagttatatcctgttactcctatccaacgactccagcatcactatcggtcgacgcccgtccgctgcctacacccggctcgtgcatgcccgcgtcgtaagcgctatacagtttgcgacgcnaatcgtggacgtcgacatgctgcatcacaactgtctcttctccacaagctatatctcgtgtgtgattacccgctgcatcgtatcttccgtccagcgcgncgaccgcgctgtaatatgtgttatgacagatctgtctgaatcgcagctgataagcgtagcgcgtgccgacggacagtcgatgttntgctcagtatatctaatantgtagcgtacaatactacacgagatatcacgaacacacatatgtgcggttgctctgtcgagccaacttctgcgctgcactncaacaacgatatagcgattatgtgatganagattatacgattgactcgccgcgcgtgctgttgcgcgcctacccatcnactttcattttttnccncagcgnncgccccccacgccacacccnagtgacgtcgaaacgtgatatgactatcagattgttcccagngctncatnacacgcgcacgnctggacgantctgcttctgcgacgtcacgactactactaagagagtcactacacatattccattcattcangtgagatgtcacacgcgagcggctacatcattgtgtgatactncttcactctgcgctacacgcnancttcatcgan

SEQ ID NO: 2180 - DNA, 954 bp, Glycine max
  misc_feature (927)..(927): n is a, c, g, or t
  Peptide Sequence Number=SeqID_9690
  Probeset Number=SeqID_11959
cccatgcgtccgtacggctgcgagaagacgacaggggggggttgcacaccacccacgcatacgttcgttgattcatgttctgttctgttccttttctaaacccaacacaacatcgtgtccttttctcctcttcgatccactacgtgcctgttcctctgcttcaggcacatactcctgcaggttaaatggcgaggatcaaacctcaggcctctgctacagcaaagcaaaaggaagatgggtccctctcggataagcgccgcgaccgtgatatgttacttcttgattcttgccttgcttgggtttttcctgtttgcttcgtacctgacattggtccagcaggtcatgtttgctttccgaagatctcttggtcagtccccgagggtgataaataccgggtgtgggacctccatgaataatcttgagcctgccttgggatatggcctggttttaaatacccgcgaaaggttccataataatagaaccggtaccaggaaagtgcctccctaagttgttgattatactcatttggaccgtatggtcaaaaaagagacacctttcaagggagattgccttttttcacataagtaatttatagcacctatggtggatgtcatggcatgggggatttacccaaaggatcttggagccacctgaagatttggaaccctgagaaggaaagcaacattacaatgacctagtttgaaacatgaagcattcatgcttggaacttgcaagggcaaacacaacaacaaaggatgtgatcttttcattacaactggaccgataccagatgtaaatgaagaaatttttggggtttgggcaagtcattaagggaaaggatgttgtgcaggaaattgaagaagtggatacagatgaacattacaagcctaaagtatctttcgggatacttgatgtgactcttaacanaaggtctgatgtctgaaggttctctgc

SEQ ID NO: 2181 - DNA, 739 bp, Glycine max
  misc_feature (519)..(519): n is a, c, g, or t
  misc_feature (539)..(539): n is a, c, g, or t
  misc_feature (605)..(605): n is a, c, g, or t
  misc_feature (627)..(627): n is a, c, g, or t
  misc_feature (726)..(726): n is a, c, g, or t
  misc_feature (738)..(739): n is a, c, g, or t
  Peptide Sequence Number=SeqID_9691
  Probeset Number=SeqID_11960
cgattgggtaccgggccccccctcgagcttcgcaagccttgagcaacggcgagtttgaactctactatcagccggtggtcaatttgcgaagtggcgacgtcagcggcttcgaggccttgctgcgatggcataatcccgagcgcggcatggtttcgccagccgagttcattcctctcgccgaagaaacaggcctcattattccgctgggcgaatgggtcttgcgcaaagcctgcgccgaagcgatcacctggccgctccccattaaagtggccgtaaatctttcgccagtccagttcaagagccgcaatctggtccaggcggttctgaccgcgctggcttattcgcggctgccacccgagcggctggagttggagatcaccgaaaccgtgcttctaggcgacaccgacgcgaatttggccaccctccatcaactgcgcaaactcggcgtgcacatttcgatggacgacttcggcaccggctattcttcggctagctatctgcgcagtttcccgttcgacnagatcaagatcgatcagtcngtcgtgcgcgagctcacggaacggccggattgcatgggcatcgtccgcgcggttgccgggccttgnaacgagtcttgccatcacgacnacgggcgaaggggtcgaaacccaggaacagttcgaccgcctttgtgccaagggttgcaccgaaaatgcagggaatattggtcagcccgcccgggcgggnaagcgaatctgnn

SEQ ID NO: 2182 - DNA, 577 bp, Glycine max
  Peptide Sequence Number=SeqID_9700
  Probeset Number=SeqID_11961
aaggcacactgtctccaaacttattggttcacctcctgaatatgttggttacactgaaagtggtcaattgaccgaagcagttcaacatcatccttacactgttatactgtttgatgaaattgaaaaatcccatcctaatatgttcaacatgatgcttcagatcctgaaagataaaagactaacagacaataaaggcataacagtaaatttcaaaaacacacttcttataatgacatcaaatgttaaaagcaatataattaataaaagaagccacaaaattaaatttaatctaaattacaataagaaggatagcagttataacagaatcaagaacctagtaactagaaagctaaaacaatacttcaagccagaatttttaaataaattagataaaataattatcttcgaacaactcacaaaactagagataaagaaaattactaacataatgctcagagaatatgtaatagactgaaaatgaaagatattgaacttcaatgacatagagattccaagacatagtagtaaagaaaaatataaccctaggtataaaacgtgacctctaagaagagccata

SEQ ID NO: 2183 - DNA, 2343 bp, Glycine max
  misc_feature (24)..(25): n is a, c, g, or t
  misc_feature (41)..(41): n is a, c, g, or t
  misc_feature (45)..(46): n is a, c, g, or t
  misc_feature (50)..(51): n is a, c, g, or t
  misc_feature (93)..(93): n is a, c, g, or t
  misc_feature (99)..(99): n is a, c, g, or t
  misc_feature (117)..(117): n is a, c, g, or t
  misc_feature (122)..(122): n is a, c, g, or t
  misc_feature (125)..(127): n is a, c, g, or t
  misc_feature (131)..(131): n is a, c, g, or t
  misc_feature (133)..(136): n is a, c, g, or t
  misc_feature (138)..(138): n is a, c, g, or t
  misc_feature (167)..(168): n is a, c, g, or t
  misc_feature (170)..(170): n is a, c, g, or t
  misc_feature (177)..(178): n is a, c, g, or t
  misc_feature (181)..(182): n is a, c, g, or t
  misc_feature (234)..(235): n is a, c, g, or t
  misc_feature (292)..(292): n is a, c, g, or t
  misc_feature (295)..(296): n is a, c, g, or t
  misc_feature (322)..(322): n is a, c, g, or t
  misc_feature (353)..(353): n is a, c, g, or t
  misc_feature (364)..(364): n is a, c, g, or t
  misc_feature (416)..(416): n is a, c, g, or t
  misc_feature (422)..(422): n is a, c, g, or t
  misc_feature (445)..(445): n is a, c, g, or t
  misc_feature (447)..(447): n is a, c, g, or t
  misc_feature (467)..(467): n is a, c, g, or t
  misc_feature (475)..(475): n is a, c, g, or t
  misc_feature (478)..(478): n is a, c, g, or t
  misc_feature (504)..(504): n is a, c, g, or t
  misc_feature (512)..(512): n is a, c, g, or t
  misc_feature (563)..(563): n is a, c, g, or t
  misc_feature (633)..(633): n is a, c, g, or t
  misc_feature (643)..(644): n is a, c, g, or t
  misc_feature (703)..(703): n is a, c, g, or t
  misc_feature (715)..(715): n is a, c, g, or t
  misc_feature (738)..(738): n is a, c, g, or t
  misc_feature (756)..(756): n is a, c, g, or t
  misc_feature (779)..(779): n is a, c, g, or t
  misc_feature (781)..(781): n is a, c, g, or t
  misc_feature (793)..(793): n is a, c, g, or t
  misc_feature (795)..(795): n is a, c, g, or t
  misc_feature (844)..(844): n is a, c, g, or t
  misc_feature (850)..(850): n is a, c, g, or t
  misc_feature (873)..(873): n is a, c, g, or t
  misc_feature (877)..(877): n is a, c, g, or t
  misc_feature (958)..(958): n is a, c, g, or t
  misc_feature (983)..(983): n is a, c, g, or t
  misc_feature (1017)..(1017): n is a, c, g, or t
  misc_feature (1035)..(1035): n is a, c, g, or t
  misc_feature (1050)..(1051): n is a, c, g, or t
  misc_feature (1137)..(1137): n is a, c, g, or t
  misc_feature (1202)..(1202): n is a, c, g, or t
  misc_feature (1224)..(1224): n is a, c, g, or t
  misc_feature (1232)..(1232): n is a, c, g, or t
  misc_feature (1245)..(1245): n is a, c, g, or t
  misc_feature (1358)..(1358): n is a, c, g, or t
  misc_feature (1365)..(1367): n is a, c, g, or t
  misc_feature (1587)..(1587): n is a, c, g, or t
  misc_feature (1781)..(1781): n is a, c, g, or t
  misc_feature (1831)..(1831): n is a, c, g, or t
  misc_feature (1834)..(1834): n is a, c, g, or t
  misc_feature (1841)..(1841): n is a, c, g, or t
  misc_feature (1844)..(1844): n is a, c, g, or t
  misc_feature (1846)..(1846): n is a, c, g, or t
  misc_feature (1862)..(1862): n is a, c, g, or t
  misc_feature (1867)..(1867): n is a, c, g, or t
  misc_feature (1891)..(1891): n is a, c, g, or t
  misc_feature (1907)..(1907): n is a, c, g, or t
  misc_feature (1909)..(1909): n is a, c, g, or t
  misc_feature (1911)..(1911): n is a, c, g, or t
  misc_feature (1915)..(1915): n is a, c, g, or t
  misc_feature (1933)..(1933): n is a, c, g, or t
  misc_feature (1949)..(1949): n is a, c, g, or t
  misc_feature (1974)..(1974): n is a, c, g, or t
  misc_feature (1988)..(1988): n is a, c, g, or t
  misc_feature (1998)..(1998): n is a, c, g, or t
  misc_feature (2012)..(2012): n is a, c, g, or t
  misc_feature (2015)..(2015): n is a, c, g, or t
  misc_feature (2069)..(2069): n is a, c, g, or t
  misc_feature (2084)..(2084): n is a, c, g, or t
  misc_feature (2098)..(2098): n is a, c, g, or t
  misc_feature (2123)..(2123): n is a, c, g, or t
  misc_feature (2129)..(2129): n is a, c, g, or t
  misc_feature (2131)..(2131): n is a, c, g, or t
  misc_feature (2135)..(2135): n is a, c, g, or t
  misc_feature (2140)..(2140): n is a, c, g, or t
  misc_feature (2143)..(2143): n is a, c, g, or t
  misc_feature (2147)..(2147): n is a, c, g, or t
  misc_feature (2170)..(2171): n is a, c, g, or t
  misc_feature (2217)..(2217): n is a, c, g, or t
  misc_feature (2219)..(2219): n is a, c, g, or t
  misc_feature (2236)..(2236): n is a, c, g, or t
  misc_feature (2248)..(2248): n is a, c, g, or t
  misc_feature (2263)..(2263): n is a, c, g, or t
  misc_feature (2296)..(2296): n is a, c, g, or t
  Peptide Sequence Number=SeqID_9701
  Probeset Number=SeqID_11962
tcctagcaaattataattattatnnttaaaataaaagaacnaganncgcnnaaaggccgcgccgagacccgcgcgcacacctccctaacacanaccccnctccgacccccccctacnccctnacnnncacntnnnntntatatacacgcgataagtgtatatagtannanaaagagnnaannatgaaccgacgcacagcccttctcacgagaggcgcagcgactggaggacagnncctatgtagttgtatataaaactttaataaacatctactgacatccatacacaccgncanngaaggcacgcgacgcgacgagcgcgngagcgcacgcacagcacacgcgcaacggagncaccagatgcnatgcgagaggagtcgtgacagtgaccgcacgacacgcgcagcgcgcgcgcgncgacgnacggctagcgccactcttagaancncacacactacacacgacaancaacacanatnagtgtttgtcgatagtggcgtccgcngtgtgtgngactggagtggtgtggcgctgccgtggcgcttggcgggtatgagtgtatangtgggcgtgcctgcctgtgctggagctaggtgccgttcgtgtacacgtgcttatcatctgtaatagtttnttttaggganncgtggcgagaatgtgtagagaactacggattcgcgagagcatactcacatacacgcgcngcagcactcgantgaatacgaagagatgatatagnacattcatacacatgacnatatacacacagcaagacatccnanatgaagcgaccnangacgccagtgtgcgagcagccacgacgcggcacgcaccgccacggacangcaccncgccgacccacgccgtcgcgtgngtgncacacgccgctgagctcatgtcttttgcctccacgctcctcgcgcgggcgacgccggcggccgtccgcgcggccacactanttgctgatgtctgcgtctccgatanatctatatatgtgtgagagtctgcatacacgtantacacagatacgacacancaataacaataatcnnatgagtctagtgaggaggtgtgcgatgtatgcggtgaatggactatcacgtagtcgccgacacgctcgtccatcaccacgggattnagtgtctgcgcacaccccgcagtcgcagcaaccacgcgtagtgcgctgcatgtctatcatctccnctacgcgcaacccactgcgcantctgtgancgtcatcaaacancctcatattatcatctatcataacaacagcaagacatcgctcaaactacacacatacgcgcgacattacacgactctacacatacacacacgcactcaccgcagtactgtccnactacannngacacacaacttgcacttagagacgcgcagctgccgcgagtcgcagagagacagacagcgcgggatgtggcagcggcaagttcagctgcgccacgcgcgcgcgcaatatcacagcgacgcgcgcccgccgaccagtcgctatcacatctgcagcgtaactcgatgtactccgcggttaggatccactcgcacactccctcgcgattaccccacaccctanctatatgctacgctgtcctctaactgctctctctctgtcgccgacgctcaccagtgatagcactatgtccgcgcgcacgctgcaccaacgatactgctattcacgcacgaccgctcgatgctcagtgtccgagcgcgctcatccgtgctgcgcgtgtcgccgccgtgacccagcacactgtacgcacgtctcantctctctctcctatcactatctaacgcatatgatctccagcagcagtctncantcgttcnacncntacccactgacatcancgccncatccgtgaccatgattgctgatngagtcgaatctcacgntntntcgncgtctctctactcacgtncagcgatctctgtcantgtaatcatgtagtatacatcagtntgcataattgaacntagatgaacntctacgtccaatcnaangcaacaagactctacctgacgtacacacccgcgtaccagcagcgttccatgtangacaccactccccgntcgctgcaacgtgntaccaactaccgccacatctgacgngcgatncntcgntgtgntgncgcncgactgatatcgtccgctcgccnnccctcccgcggtcacgcactcacgacacgatgaagacaatgaatcnancattcgacgccaacgantgctgccgtcgnagggaatgccgccgnaccgcgaggcgcgtgaagatgagtcagctatgnagagcgcggaccgaagcacaaaagaggatgcctggaccgacaggacc

SEQ ID NO: 2184 - DNA, 463 bp, Glycine max
  Probeset Number=SeqID_11963
gaagcccggccggcatgggtggtggcggggcctgctctctctcctcgcggctcggggctggcgcgggatggctttgcgcgtggagacgccggtctgcttcagggcctggcggcgcggcggccggcttgcgcggcgacgtcctcccgtggcggtggtgcccaggtgcgttggttcgacgcggcggctacgagtttgtcttccccctccttccccgtcgcgggcgcgcggcggtgttcatcggtcagcggtggctccggcggcgacgcgcggcctcgggcgacactactccgggtggagaggaggcggtgacgtggcacttggctacaggctggcgcgacggctgactgcggtgccctcccggcccagatctgggccctttggggccccatatgggtctaggagggcctggcccggattcgtctgcgatggcccggattagtgatttttaaggttcgtgaacatt

SEQ ID NO: 2185 - DNA, 1256 bp, Glycine max
  Peptide Sequence Number=SeqID_9702
  Probeset Number=SeqID_11964
taacccacgtggtgatgtaaaatatgcagttgtgatttggatatttcagcagtggacccgtactagttaaatacgatcgagtaaaatttgattattggcgcgtggagaaatatttgcaaaatacgtacattatttattgggacaatcaacgcgtgacattaaccaatacaatggaaatagatgataaaatatactcaccgaatcaaatacaaaaatcagcacctgatacgcaacatccgttccgtgatgagattctacgccaaattgaaaagttagaatcacgtgtgaaacgtgcacaagttgtgaatgattttagagatcgggtacaaaaatgcatggatgataaagtgaatcatgtattagyatcgatgccaaaatcatttcaattatcagaagaagaaaaacactatattgatcacaaaatattggaaatggaaggaatttcagaattattggaatatttaccttccattgatcgtgttgttggtgttttgtcattgttattgggttataatcctctaacaattcggtcatattttattcataaaaaatacattgaaagtgcaaaacgaattcctactgcgagaaaatcagcagtggatattatatcggtaaaaaagttacgtaaacaaggacctcgtcaatctaaaaaacaaataaaaactgatgataactctttaaataaagaattagaacctatcgcgaaacttattcacgatagaattcatgcacgtgaggaattgttttgtaaattttcgaagattgaattattattttgaaattgatgatatcacgtttggtacaagtccatttcctatagctgctgttaatactgcttgatacaatgccttatcaaagaataaactatttgcatgattcttttgcgtatgacaagaatttacctgaagtgaaaacagcgaaaagtaaaccgtgtaaacattgtgtgcatgaaaaaataataaattatgataatgagggacggttgagtgtgcaaatttttgcagaacacctaaaatttgtgaataatgaaactgttcaacctgtgaaaatgtatgaatgtttctctgattgtagatgcagaaaaataaattgtaaaaatatggtaacacaggttgcagtaccaataaggacgcaagtatttygaactgcattaactgggtggggcatacgttctatggaraatktaaaagcargaacgttcgttggaatcyacactggtgaagkcatcagtgatgatcrrgtggaaattcvtgctg

SEQ ID NO: 2186 - DNA, 1628 bp, Glycine max
  misc_feature (22)..(22): n is a, c, g, or t
  misc_feature (96)..(97): n is a, c, g, or t
  misc_feature (101)..(101): n is a, c, g, or t
  misc_feature (364)..(364): n is a, c, g, or t
  misc_feature (819)..(819): n is a, c, g, or t
  misc_feature (941)..(941): n is a, c, g, or t
  misc_feature (1041)..(1041): n is a, c, g, or t
  misc_feature (1050)..(1050): n is a, c, g, or t
  misc_feature (1334)..(1334): n is a, c, g, or t
  misc_feature (1363)..(1363): n is a, c, g, or t
  misc_feature (1425)..(1425): n is a, c, g, or t
  misc_feature (1515)..(1515): n is a, c, g, or t
  misc_feature (1529)..(1529): n is a, c, g, or t
  misc_feature (1543)..(1543): n is a, c, g, or t
  misc_feature (1626)..(1626): n is a, c, g, or t
  misc_feature (1628)..(1628): n is a, c, g, or t
  Peptide Sequence Number=SeqID_9703
  Probeset Number=SeqID_11965
cccctctctctcccccttcacnctcctcagccctcccccctccctccctccacttcgccccctccctctgctcccctcgcccttctgcttcttttnngccncgttctatcatctttcatcgctccgtacttgccctgccataatgcttctctaacaatatgctgtttacacgagtatttacatgtcactgttgatcatgacgtagacgcatgagacctaggagatagtgtatacaacgcagcgcagatgtatggagggtgtcgcggtgcgttctgctcctctaccatacatcttcgtcgtcactgtgatcttcatacctagtgcaacagcacatcgacacctatcacagcatcgcacgcgactnctacacgtaacattatcacagcacgagcgaacagctgcacttgacgtctcatctctcctcccagcgtcactacgctatcctcacctccacaggtgtctgtcgctttcctctccacttcctcgtaccctactcatacgctgtcaactccttcagttgtcaactgccatactcttgttagcgtatcccatctctactctcacacctctactcattgttccctcctgtcctgtaattcatatcatatccttctgccgtcaccttacgtgatcttcttcatctctgggtcttccttgtctttctaatccctaacgtactcccgtcaatagtctttcacgctcccagtacttcccccactattcgcccctcgtatacccgcactctcctctcttctccgcatgcgtgtctcactgtaatttcgcgctcctctcctgctttctctctctgtcccaacgtantattgctctctacttatacatcggcaacttcgcgattctctatctgttattcgctccctcctcctcacaatcgtctacgtactcccctcgccattctcaacgtactacttcgtaatagttcngtatactctctcctgcacatctgttgtgtgtgcatatgctcttatactctcaatgtctgtacggcatatctacactccgctactcctagcccttatatcngcatcctcnctatcgactctcgtgctctcacgcctctcgcgccgtcccagatctcttgatgcgcgctcaaccatctacctggtacatctgttatactgtgtgctctgagtctctatcgtggttacttctccctgttttgcttgtagtatgtcgtcttcttccttatagatgtgtattcgagcgtattcctgacgcgcgatgttatctacataatctatcatcatgataccttaccttagtcgactgctcttctcgcgcgctcttcgcctatgtatgagctcgtcacatactcnccgctcgcgtctcctccctcagtatgccntctctgtctgctatacccgtcttccagtcttacacctctcggctccgctgatctcattccangtcgtcacacatctgctgctatgtatgctatctcgactgtcctctctactacgtgatgcacatctctgtccgcgtgcgctgccttctcanctatcgcacactcntcttgtgttcactnctatctcacgctcacactgccgatcgccagacgcacgtcacctcgcctgctctagctcgctacacggtgcctagtacttggangn

SEQ ID NO: 2187 - DNA, 1692 bp, Glycine max
  misc_feature (61)..(61): n is a, c, g, or t
  misc_feature (73)..(75): n is a, c, g, or t
  misc_feature (124)..(124): n is a, c, g, or t
  misc_feature (172)..(172): n is a, c, g, or t
  misc_feature (429)..(429): n is a, c, g, or t
  misc_feature (570)..(570): n is a, c, g, or t
  misc_feature (629)..(629): n is a, c, g, or t
  misc_feature (727)..(727): n is a, c, g, or t
  misc_feature (782)..(782): n is a, c, g, or t
  misc_feature (845)..(845): n is a, c, g, or t
  misc_feature (1111)..(1111): n is a, c, g, or t
  misc_feature (1233)..(1233): n is a, c, g, or t
  misc_feature (1418)..(1418): n is a, c, g, or t
  misc_feature (1437)..(1437): n is a, c, g, or t
  misc_feature (1450)..(1450): n is a, c, g, or t
  misc_feature (1461)..(1461): n is a, c, g, or t
  misc_feature (1483)..(1483): n is a, c, g, or t
  misc_feature (1502)..(1502): n is a, c, g, or t
  misc_feature (1513)..(1513): n is a, c, g, or t
  misc_feature (1528)..(1528): n is a, c, g, or t
  misc_feature (1559)..(1559): n is a, c, g, or t
  misc_feature (1565)..(1565): n is a, c, g, or t
  misc_feature (1567)..(1567): n is a, c, g, or t
  misc_feature (1597)..(1597): n is a, c, g, or t
  misc_feature (1633)..(1633): n is a, c, g, or t
  misc_feature (1692)..(1692): n is a, c, g, or t
  Probeset Number=SeqID_11966
tgccgctgcccccccctcgtcggctggtgcccagcgtatacagtcagacttcatgccctancttgtattaatnnntccccaataactaatgggtagaataccaccccaccgcggtgaagcgtgncgcgccgctctcacatagacatatgaggagaatacatcccccgcgcgnacgtgtcgcggagagatagtactctattgtattttcttctcttttatttctataccataatatataagaggtagtagtgaacaaatgctacatagtagcgatctcatacaagtaagtgtagtgtgaatacaatgtctcctactatctaagaccctgccgtatcgtatctctgacaatcacaacaaagatgccttcataagcgaacgtggctgctgtaatctcttataagatccaaagccgcatctcatcaacacaantctcgtcatatactaaatagaatgtgtcctcatgagagcaaaataggcaccacaaagcgcctcatatcacttctcaatctgcgatgctagcactcatgctagacactgataacatactatgccaaacacacaaataagtcnacacatcatacagctacctctaccacaatgtcatactagaaacgccagcgtataatatncataggctctccccacgcgacgattcgtgctacacaaaatcaccaccaagtaattaatcggtgaatcatgatgataagcgcgaggcgcgagacgctantccacacactagcctcgatatacataagctaccattcatgtacaccacacaggcnctgcgtattatcactgggattgagggacctcgctaatataagctgccgtggagagtgaacacnatagtgtacctgccaaactcgagactactccagactcttagcaggccacaatattctatcttcaccgtatggctatatatgttgaaataaaatcgtgcagcctcaccccaactcaccaacagaacgcgcgatcatctagaagactatcaccgtatatcttcgataagatgatcgtgcacgtgccaccttcacctcacgacagtgatacgctccgccaacgcccacttctaacacacgtcatctccctgtgatgctacagacgcagngtcagctcacatcagtcatgagtaacagcacaagactcgttacgcgcgtctgaccgctccgcacaccgctgatagtatacagagctatacgcagccacctactcatgatgagaagcgcgctnaggactaccagtactatatacacactatctcttatatcacgcggcgatctcttccagatacagactcaggcatatagatgatgcagtatatgatccgactcgcccttcacctctttgatatatacgtccaacgccgtgcgcgtatgagcgatgtagtctacacagacggtactctgatcgagcantcattagcatacaatatgntcatgtattaatnaggacgatganctagacatacctgcggtcaaantaatgatacctagtgacgnctactcacatncgtcgaatcgtcgcnctatcgacgcgatgcactcacaatctccccnggacancncgaggatctcgctcacataggacctgctcntcgacggagagtatcatgagcgcgatcagacgctgncgatccgttcatcgctcaatgatcgtcacacacgagacaacacatagagcgctctcttn

SEQ ID NO: 2188 - DNA, 1700 bp, Glycine max
  misc_feature (1)..(1): n is a, c, g, or t
  misc_feature (22)..(22): n is a, c, g, or t
  misc_feature (26)..(26): n is a, c, g, or t
  misc_feature (32)..(32): n is a, c, g, or t
  misc_feature (565)..(565): n is a, c, g, or t
  misc_feature (906)..(906): n is a, c, g, or t
  misc_feature (1091)..(1091): n is a, c, g, or t
  misc_feature (1377)..(1377): n is a, c, g, or t
  misc_feature (1380)..(1380): n is a, c, g, or t
  misc_feature (1476)..(1477): n is a, c, g, or t
  misc_feature (1607)..(1607): n is a, c, g, or t
  misc_feature (1690)..(1690): n is a, c, g, or t
  misc_feature (1700)..(1700): n is a, c, g, or t
  Peptide Sequence Number=SeqID_9704
  Probeset Number=SeqID_11967
nttccccctgcaaaaaaactcnacanccgcanataaaggttcctaaaagctctctcccataaacactcaatacagcatgaggaagcctcccacacgggcgcgatggtgcgttattcgctatcttcagcatcatcaatctgttttattgtctctatctttctccgcgtgatctataataccctgacgtcttcaccacctcgtcctcacaaacggaccgccgacatttactacaccatatatgctttttgttataacgataggatgagagtgaatcagtatcatctactagttgtgtcttgatgcacatacacgtctgtgcatctaaccgctatagagccgggacagaagcggcgcgacgattgtcgcctcgcgtcgacttccctcgttttcgttcccgttgtttcttacttcttcggcgatgtcagagacccgctctacccagcactgatctgatggcatagagagctcctgtcctcactgatctgtcgtcccagcgagtgtgatgaaagaatttatgacgctaagtgtacggctacgttctccgcactgtggagtcggacacgtnatgtctacgctccaacaacaatacacgcgatatcccgccacacattagagagggaagagaaagaatagatacgcccaaggaacatacatatactcctctcctatttcacatttccgcgcactcttgtctcttataaccctataagcactactaagatcatcatctctacgagaataagaaggtagatggtgttagtgttgtcccgagcaccacgcgctattttatacactgtcgcgaaccgtcttcttgtgcccgcctattagttattaccagtattacgccgcggtcttcctggtgcgcgtcgtgttggcttaatgcaccacgaccagctctctacaccnttataactatgtactccaaacactgaattatatcacgtgtcctcctatatatgtgaatgattcggcgagcgcgaccgactgagcacgtgcgtttttgattctacgtcgcaatcaccctgctttatactatgttatgtattatatcggacgccgattataagatgatgtcgcgcttgtatacacancaactatataaatacacacaatccacgcccacacacatattacctctttatcagtactcagtcttacgagtaatatatatctacattgatgtttctcaacactagacccactcctgctccctgacaacgctacgtcattcgtattatgtactctaagttaggtccgcgccgcctgtcattctaatttgtatgcagccaagacagacactgtagtatacgcatgtgatcgtgtctacgcccaatactacacgactcgctcttgtatacgcgacgacatcacgccggnaanatctctacctcaccgttgtattcgctcgtcgcgatcagtgtcatagccgcactgtatgtacgcatcgcgcacaacactagcaatcatatatatctnnttattcatactcatctctattacatacgtgacaatgtgagcgtcgtcacactatacatgtacttaacaatctaaatgtctagtatatagagctctgtgcgtcatgcaccgtcgtggagcacgttcgtcgntaacacgcatgcacgtagtatgataccatgggcgtagtagtgataacgttcagtatgatcattatgcatataactgaggttcncgtactttcn

SEQ ID NO: 2189 - DNA, 1688 bp, Glycine max
  misc_feature (13)..(14): n is a, c, g, or t
  misc_feature (18)..(19): n is a, c, g, or t
  misc_feature (31)..(31): n is a, c, g, or t
  misc_feature (36)..(36): n is a, c, g, or t
  misc_feature (98)..(98): n is a, c, g, or t
  misc_feature (109)..(109): n is a, c, g, or t
  misc_feature (111)..(111): n is a, c, g, or t
  misc_feature (173)..(173): n is a, c, g, or t
  misc_feature (396)..(397): n is a, c, g, or t
  misc_feature (448)..(449): n is a, c, g, or t
  misc_feature (495)..(495): n is a, c, g, or t
  misc_feature (597)..(597): n is a, c, g, or t
  misc_feature (668)..(668): n is a, c, g, or t
  misc_feature (685)..(685): n is a, c, g, or t
  misc_feature (769)..(769): n is a, c, g, or t
  misc_feature (773)..(773): n is a, c, g, or t
  misc_feature (806)..(806): n is a, c, g, or t
  misc_feature (1120)..(1120): n is a, c, g, or t
  misc_feature (1212)..(1212): n is a, c, g, or t
  misc_feature (1218)..(1218): n is a, c, g, or t
  misc_feature (1352)..(1352): n is a, c, g, or t
  misc_feature (1395)..(1395): n is a, c, g, or t
  misc_feature (1397)..(1397): n is a, c, g, or t
  misc_feature (1519)..(1519): n is a, c, g, or t
  misc_feature (1523)..(1524): n is a, c, g, or t
  misc_feature (1587)..(1587): n is a, c, g, or t
  misc_feature (1593)..(1593): n is a, c, g, or t
  misc_feature (1611)..(1611): n is a, c, g, or t
  misc_feature (1666)..(1666): n is a, c, g, or t
  misc_feature (1688)..(1688): n is a, c, g, or t
  Probeset Number=SeqID_11968
ggggggtgttggnngtgnntgggtggttggntgggngtgtgggatgtctagtggctacgacgacacgtcacagagagcacatgagcggtagccgaaanaatatatatananatattatagactatctaatctgtgcttatctgcgctgaacctcgatagcgagtcgctaaaangttaataccgcacactacagacagacgacaagcgctaaacacaacgacaaaacacagcacagaacaaagaggacaacaagcgcgtggtcctgcgcgtatcggaaatgcgcatgccgcgcgtgctctctcactcttctcatttcaagactcactatactctcactcatctactctcactgaccactctccatctcaccacccacttgatcaactccaccacgcnnacacgagaacaaacccccccactccccatctccccccgtcgctcgcgccgnngcgcgcacaccaacacacagcagaaagtatacctctatatattttngtatgataacacgaacaaacagaaagatatacagaataatctacaacacagacacatataagtaaaagaatgtgcacaattcaaagaatacaagacaaaatngatacaatcagtagcatagatgagtaaaagaacggatgaccgtctcgcacttatcgctgtgcacaccgcancattatcacaaccaacngtgactctcgcacactaatatagaaacagctcatacacatatctctcgtctcattacaacgtactacatccactctgtatcctngcgngctggcgctagccacaccacacaccgacgcgcncacaacgacgcactacccacgccgcccagcgctcgccctgcgctcgtgtgctgtctcgacatcatgctgcgagttaggagtatgaatataagagtcagatacacagattactaacacaatcaatgtcacagtcgacgtcgtacttagactgatctacagagctccgttgagaactcgatatcatgaagacatacctctcgaacagccataatcgcgcactcgtcggcacgacagccgcataataactaaccaatatcagagaggctactactataccgtgagcgacagtaacttactacgacatacatattgancatcgtacatagacggtgtgatactgagtcaacgagagatgtggtcatgaggttgcgatactcacatagatattggatgatgaatagtaggnaggaangagagaagagaacactctagatatacatactaatagtagataacaacacacggtacggacgtaataagcagccacatatcgacgtatcccaactaccacactacacgacgctcactctcactgactactctcantcacgcgacaactactcgacacaacacaatatctgaccgtatntngtgcgatgaagatcagtgtgatatgcactagagcatcgtacacgaggtgtgcgataagatcacacactcctacaccaccacacgagtagcgtgagacacgttcgatactaatttgtgagttnattnntttcatcgctagcgacctacgataaatcacgctatagtgacagagcacgtatgtgtgtatgtntagagntaatcatacttatacganagctacgagcgctcatacaacacagacactatagcagagccgatgcaacgacccnctcgcgagccgtatagtgaatn

SEQ ID NO: 2190 - DNA, 1406 bp, Glycine max
  misc_feature (1257)..(1257): n is a, c, g, or t
  misc_feature (1343)..(1343): n is a, c, g, or t
  misc_feature (1348)..(1348): n is a, c, g, or t
  misc_feature (1357)..(1359): n is a, c, g, or t
  Peptide Sequence Number=SeqID_9705
  Probeset Number=SeqID_11969
cacacacacagcatgttatccacactatttgaataaaaggcgcagagagagaggagagaagaaggaagaggagaaggaaatctaatgtatatatattcacacccacacaccaccgcacatatttagcgcgagcgccggtgtgcagaaagggagcgaggagagggagataggacgctagccaaagtagagataccaagacaccagcaatgttagacagaggcggagacggacgatggtgtcgccaccatagtggttgcgcaacgcaacaccactgtatgtgagagaggtggcgagagagggaagcgagggagacggagcgggcgcgagatatacagacaacggcagatgacgaagagggaggaggatgaagagggaagatattaagaagtgattagagacagatgttgtgcgccgcaatgttgtggcgcgcgaccacaacccacaccgattttccacgtggcgagcagaagttcacagtgcgctggcggttaggaggaggaggggcgcgagcacaacgagtttcttgtttactcccgcccgcgcccccgccgcgggcgggttttgtttttaccccagaggtgggaccagccaggcatatgagcagataagcgagagggttttgtagtgggcgggaggtcaggggagtggcacacacaaacaatttagccgagcagcgggcgggggggcgagagtttgaaccgcgccacatagggaacgacatgcgaggcgcgcgtgtttgtctgtgcggggcgggcggggaaaaccaacacaagagaaaagtacctagacacccgcgcgcacaccccatttccgctcggcggcctcgcttgtccggcggccccccgccgctctcgtcttcgcgagcggcaggacatttagattcaacgacgcgcttgtccagccaccacgtctccccccccccccaccgttcccgcggcgccagtcgcggcgagttattctaccaaacaaccacaacaccacaccctgtacccacctttcttcccctccccgtcctttttttcgcctataacacataatcacattacacgcagccacttgtccattacacatttaacacaagagcatcttcacatttcacgttgatcgtcccacaccacgcccctccacccattataacgggttggcgcatatctcacggctacacccagaccacatccccgacgggtgggggcgcgagggggcgagagagtgtgttgtacgagctcggcgcgtctggggcgtcgttgagcacgcggnggaggagatttagcgggtattcgcacaaggtcagaggtacgttattagcgccagagagcgcggagagagggtcgaggcgagaggtngtgtnggcgggggnnnaacacacccagacaataaacaataatatacaaacacacaaccctctt

SEQ ID NO: 2191 - DNA, 663 bp, Glycine max
  misc_feature (535)..(535): n is a, c, g, or t
  misc_feature (601)..(663): n is a, c, g, or t
  Probeset Number=SeqID_11970
cagttcattctgactttagctatagtgcttgtgcttataccactagggatcgacacaccttcgttgacaggaaaattattagtcagagatgaggagctacgcagctgtagtccgggcagcactactcgtcctttggggcgctgctactccctgcccaccatggtgatggcgactactccggcatgggaacgggcggcgccgcccccgccttaagccggccagtgccctttccatgccccccgtggcagccaatgaaacccaaatggcccccccttggccatttgggccccccttttgtgtgtgtgggggggcggggactaatgggaaccccgggaaatcccgggggtacaccccgcggattgagcccccccccccctccagggggaaacagggataattcggtgttctccccgaggaagaggggggaaaaataaacacgagggggtgcgaaaaaaacccccctcccctctgggggggtttaaaacggggggaatttttgagcgggagaaaataaaaaaataattgtgggagcgcnccaaccccttcttgttaaaacacccctcccccccacaaaaaggggccccccccccccccccaaaannnnnnnnnnnnnnnnnnnnnnnnnnnnnnnnnnnnnnnnnnnnnnnnnnnnnnnnnnnnnnn

SEQ ID NO: 2192 - DNA, 1719 bp, Glycine max
  misc_feature (1)..(7): n is a, c, g, or t
  misc_feature (12)..(12): n is a, c, g, or t
  misc_feature (19)..(26): n is a, c, g, or t
  misc_feature (29)..(33): n is a, c, g, or t
  misc_feature (62)..(62): n is a, c, g, or t
  misc_feature (67)..(67): n is a, c, g, or t
  misc_feature (69)..(69): n is a, c, g, or t
  misc_feature (72)..(72): n is a, c, g, or t
  misc_feature (83)..(83): n is a, c, g, or t
  misc_feature (99)..(99): n is a, c, g, or t
  misc_feature (109)..(109): n is a, c, g, or t
  misc_feature (111)..(111): n is a, c, g, or t
  misc_feature (130)..(130): n is a, c, g, or t
  misc_feature (174)..(174): n is a, c, g, or t
  misc_feature (260)..(260): n is a, c, g, or t
  misc_feature (273)..(273): n is a, c, g, or t
  misc_feature (275)..(275): n is a, c, g, or t
  misc_feature (293)..(293): n is a, c, g, or t
  misc_feature (309)..(309): n is a, c, g, or t
  misc_feature (314)..(314): n is a, c, g, or t
  misc_feature (344)..(344): n is a, c, g, or t
  misc_feature (348)..(348): n is a, c, g, or t
  misc_feature (356)..(356): n is a, c, g, or t
  misc_feature (368)..(368): n is a, c, g, or t
  misc_feature (379)..(379): n is a, c, g, or t
  misc_feature (392)..(392): n is a, c, g, or t
  misc_feature (395)..(395): n is a, c, g, or t
  misc_feature (439)..(439): n is a, c, g, or t
  misc_feature (441)..(441): n is a, c, g, or t
  misc_feature (449)..(449): n is a, c, g, or t
  misc_feature (460)..(460): n is a, c, g, or t
  misc_feature (681)..(681): n is a, c, g, or t
  misc_feature (697)..(697): n is a, c, g, or t
  misc_feature (720)..(720): n is a, c, g, or t
  misc_feature (749)..(749): n is a, c, g, or t
  misc_feature (759)..(759): n is a, c, g, or t
  misc_feature (975)..(975): n is a, c, g, or t
  misc_feature (993)..(993): n is a, c, g, or t
  misc_feature (998)..(998): n is a, c, g, or t
  misc_feature (1028)..(1028): n is a, c, g, or t
  misc_feature (1030)..(1030): n is a, c, g, or t
  misc_feature (1160)..(1160): n is a, c, g, or t
  misc_feature (1205)..(1205): n is a, c, g, or t
  misc_feature (1208)..(1208): n is a, c, g, or t
  misc_feature (1213)..(1213): n is a, c, g, or t
  misc_feature (1261)..(1261): n is a, c, g, or t
  misc_feature (1263)..(1264): n is a, c, g, or t
  misc_feature (1385)..(1385): n is a, c, g, or t
  misc_feature (1452)..(1452): n is a, c, g, or t
  misc_feature (1517)..(1517): n is a, c, g, or t
  misc_feature (1612)..(1612): n is a, c, g, or t
  misc_feature (1646)..(1646): n is a, c, g, or t
  Peptide Sequence Number=SeqID_9706
  Probeset Number=SeqID_11971
nnnnnnnccccnccccccnnnnnnnnccnnnnncccccgccgccctcctcgggcggcggtgnacaantnggnacagacgatgnaacaattgctagtatnttgtgtatantnatatggtagacgcgggcgnagatatatgtatagattgtattagtgtactctgtaggagagtgntcctctcttcgtgtatgtgctgtagggtggtgtagagtgtggtatgattcgtgcgagttggatgctagcgtcggcgtgctcacgcngtaccctcctctntnctcgccgcacacactcanctatcgatatgctaantcacncctctctcgcttcccttcttacacagtccnctcntcctcccngctcctccgctnccctccgcccncggcgcacgtgcncgncgacagcagacatatctacactacatgctacgtctctgtatctngngttgtgcnagcgtgagcgngtgtattatctctcacgctgagtcgacatgcagcatctacgacatcgaagcagccgcgtcgcacgcaccgcatcgtcgtgtctacatatctactcactatatgtaggaacattaacatgtaatggtcgatgtgttgtgtgtgtggtggtctatgattgtatgtgtacgtcatagactatgatcgtagtgctgtgtgtgatttgtcttatatgctgtatgtnttatatgatgtgttcntcatgtctcctcatctgatgttngtcgtctcgtctcgctcgtgttgtgtgtngtgtgtattngtggtgtttctgtacgtctatgtctgcggtgtcgtgtgctcggtgtagtagtcgttatttatgatgcgtgtgtgctgtctctcgctcgctgatgtctcgggctgtcgtgtgttgctcgatgtactcactgttcacagatcggggttgctctgtctacctctatctcatgtatagtatatcgctgtgatgttgtgtgatagtgtgatgtggtgagancagcatgacagacgtgancaaancgtgatgaagcacgttgtgtgtggtgtgantncttctcacaagacagactctcatattgatcgtttcgttgtgcgtgtgatgattatcgtcgtcattactcgacatcgatctcgctctgcagatgatatctctatcgtgtcgatcgctcgctcatgtgtggnctgagctgcgtggtgcgttcgtgtgtgatgtcatcatccgctatnttngtatntctgcgtctgatacgatctatgtgcgtcctgtcagtagctgtgtcgcncnntcgctcgtctctcgtgcgtgatggtatgaggtacgtatatactatcactatactgctctttatcgatggtgtgtaggtgtgactgatacgagcgaggacacgactcgacaaatagctatgngttgcgacgtgcacgactcatgtgcgctctgaccggtcatcgcatacgcgcgacgttcactgctcgntgtcgcgcgctgtcgtgttctacacgtcatcgtcgttgcgctgcctcgtgtcgtgattctctccntctatcgtattactactgacgtagtgctcgctcgctattctgcttgatagtgtgtagttctgctgatctcagctctacaatagcacgtcctcgtntacactatcaacactatagttgatggtgtgtgcntcgagatacgttctcactcgtagctgattactgtgacgtcatgtaggtaggaccgcagatacgcgagaatggg

SEQ ID NO: 2193 - DNA, 1537 bp, Glycine max
  misc_feature (5)..(5): n is a, c, g, or t
  misc_feature (9)..(9): n is a, c, g, or t
  misc_feature (54)..(54): n is a, c, g, or t
  misc_feature (61)..(61): n is a, c, g, or t
  misc_feature (140)..(140): n is a, c, g, or t
  misc_feature (189)..(189): n is a, c, g, or t
  misc_feature (211)..(211): n is a, c, g, or t
  misc_feature (292)..(292): n is a, c, g, or t
  misc_feature (352)..(352): n is a, c, g, or t
  misc_feature (358)..(359): n is a, c, g, or t
  misc_feature (365)..(365): n is a, c, g, or t
  misc_feature (495)..(495): n is a, c, g, or t
  misc_feature (543)..(543): n is a, c, g, or t
  misc_feature (619)..(619): n is a, c, g, or t
  misc_feature (850)..(850): n is a, c, g, or t
  misc_feature (882)..(882): n is a, c, g, or t
  misc_feature (932)..(932): n is a, c, g, or t
  misc_feature (971)..(971): n is a, c, g, or t
  misc_feature (1032)..(1032): n is a, c, g, or t
  misc_feature (1058)..(1058): n is a, c, g, or t
  misc_feature (1083)..(1083): n is a, c, g, or t
  misc_feature (1119)..(1120): n is a, c, g, or t
  misc_feature (1142)..(1142): n is a, c, g, or t
  misc_feature (1215)..(1215): n is a, c, g, or t
  misc_feature (1225)..(1225): n is a, c, g, or t
  misc_feature (1228)..(1228): n is a, c, g, or t
  misc_feature (1262)..(1262): n is a, c, g, or t
  misc_feature (1264)..(1264): n is a, c, g, or t
  misc_feature (1305)..(1305): n is a, c, g, or t
  misc_feature (1332)..(1332): n is a, c, g, or t
  misc_feature (1362)..(1362): n is a, c, g, or t
  misc_feature (1415)..(1415): n is a, c, g, or t
  misc_feature (1427)..(1427): n is a, c, g, or t
  misc_feature (1429)..(1429): n is a, c, g, or t
  misc_feature (1441)..(1441): n is a, c, g, or t
  misc_feature (1445)..(1445): n is a, c, g, or t
  misc_feature (1460)..(1462): n is a, c, g, or t
  misc_feature (1464)..(1464): n is a, c, g, or t
  misc_feature (1469)..(1470): n is a, c, g, or t
  misc_feature (1472)..(1474): n is a, c, g, or t
  misc_feature (1513)..(1513): n is a, c, g, or t
  misc_feature (1515)..(1516): n is a, c, g, or t
  Probeset Number=SeqID_11972
cacgnacgnctagagttgtttatggatgagtagacagggcacgatgcgtgtgtngtctctntgcattcatatagttgtacacacacactacacacacatcaaatcatatgtagcagagagtcacgagtaccgccacgtantcagtagtcgcatagcagagtgtgatatagcccatacaacgtgtgatangtagtgtatatgtatatacacnttcttagttatctatcttgtacgcacgacacgatccgccaccaagtcagagagtgtcatacagcagtgtatagagacgcanaacttgaataagtatgaagagagcccgaccgcccagcatatgacgtgcggatcattgcancgaganngatgantgctgacgctctcagagtcacacacacacgagacgaacgaacacgtctctaacacacgacaacagcgaaagagggttgtataggatgagcatagatatacgccctacacactcgccaccgcacccgtatnggaacagatgtgtatgcagtatagagaccataaactttattcaaatanctcacacaaccatatgacagaaaatatacacatggatgatagatacagaacgagaagaccgaagatatggtgtgtnttggtgtgcggtgggtgttggtctctactattatacaacagcccacataaatcacaattaagaaaaatcaccgtacgagacagagtgatggtggtgtcttccatcacaatgataatatactacacaacaacatctaatagatatccagcaccaacctcgtattaattatccatcacactcacctatatactcatctatattgtagtctatgtagatgagttgtgtgtttgnttgtgtgtatttctctcaaccacacatcatcnatcacacacacacacatcatgcagaacacaatatatatgtaggaatcatntgttttgattcgatatattgcacgacccagcgcagtgtntgcctcccgcacgcttttattcgcgcaccgagcacatgtatcacacacacctactttaatnttcacacacaacaagaataattatcncacccaaaccacatgtcttatatangctacattgttgtggatgttcaccgcaactaagacnntttctctcgccacaccactctncctactcgtactccactatatttggtcacatctcactagtatatctaatagcacttcttaccatccccaacanatttcatacnttntaataagaacgcgagtctaaacttaacgagcaananaaacgtagaagtatgtataccatccaaagacaacaacacanaaacacatttacattattgttcatcgncagctaatagcacaaacacacaccacccanctcgtcacgccaacacaagggcaaaccacacacataagaaatataataatacntatacataacancncgtcggtggagntctngccagcctttggggnnntngtggnngnnnaactacacacacaaataacagatatcacacccaacacantnnccgcgagggacacaccaccac

SEQ ID NO: 2194 - DNA, 752 bp, Glycine max
  misc_feature (752)..(752): n is a, c, g, or t
  Peptide Sequence Number=SeqID_9707
  Probeset Number=SeqID_11973
acggctgcgagaagacgacagaaggggggcgagagtagtactaggatgggtgacctcctgggaagttctcgtgttttgcccaaacacaccgtttgcacctccaatttgaaccggtccggcccaattccggttcactacaccaaaaacccagatgaatttgatgtcgaggaatacacctatgtgacatgccgcgtacctaacaaaacgttcactaaggtatactatgatggtggtgaaggtgatattattcggagacaaaacaacaacaacaacaacaaaaacaaccttgtagttctcagaagacccgaaccacaacctgtgattgagcccgaatcatcgtaccccacatcgagttttctcagttcatgtcacttatgtggaaagaaactccacggcaaagacatatacatgtacagaggagagaaagcgttttgtagccctgagtgtcgttcgagtcaaataacgatggacgaagggacggaacggtgtagttcagacgcttaaggtctgtgggaaagtcaggtgggccatatacgagggagcaacaattatctactagattcttgcgcgttagcgtcactggtgtggggggggaattacattattaaccagtaatggtgaagctagtgcagagatgcgatagtattgtcgtgtatactcatactcacgaagctagtttgaagcggagacggaggcttggcacgctagcggagtctatctactcgacttcatgtgcttgatatgtaggcgan

SEQ ID NO: 2195 - DNA, 1330 bp, Glycine max
  Peptide Sequence Number=SeqID_9708
  Probeset Number=SeqID_11974
tttttcacacctaagattatcacaagatatacgggacaccatttcattaattgcggggagaatattggttagatttgctttatctgaatttggaaacagcttttgaatggcttttaaagagttgtactgctaatatgcacggtcgggtattttgtgattgcctctgccggaaatgtctaccaagattttgatatcacatggggagatgggcgggctaagatactcaacaatggagagcttatcactctgtcacttgacaaagcctggggctcgggttaccattcaagaacgaatacctttttggaaaaattgacatgcaactcaaactagtcccgggcaacttcgctggtaccggtgctgacttctcagttgtcttcaaaaggagcgacatgggatgagattgactttgaattcttgggcatatttgagcggcgacccatacatccttcacaccaacgtgtttagccagggcagggctcgtggggagcaacaattctacctctggtttgacccaactgcagattttcacacctattccatcctatggaaccctcaacgtattgtgtaagtttctagttattatgcaatcctcaagaatattatcataaaatagaatcgatacgtgtttttttttttttttcctaacttgtgctggaagcaactgattaagtgtgtgtttgttaattttgtttcatttcagcttctcagtggatggaagtccaattagggagttcaagaacatggagtcaaagggtgttcctttccccaagaaccaggcaatggggatatactcaagcctgtggaatgcatatgattgggccccaaggggaggtcttgttaagacagattggacacaggctccttttccagcttttttcagaaacttcaatgccaatgcctgccctatgtcctccggaaatttattttggggttcaaacaacccttccttttttaacaaaaatgtttgggtttcagaagggttgggttcacctgatcaggagagggtcaagtgggtgcagaaaaattacatgatttccaatttttggtttggccctcaaagatttccccagggccttcctttagagggcaacccagcctaaagatatttagtttccctgtgggttggtcccgactccaattttgggctctttttgggggttcctttttttttttttttttggaattttcaaaatgataaattctttggttgggggggaaatttttttaaaaaagggttccattccaaggggtcattttttttcagatttccttaatggctttggttttaaaacttataagggttgggctttgggaatattttttccccttt

SEQ ID NO: 2196 - DNA, 680 bp, Glycine max
  Peptide Sequence Number=SeqID_9709
  Probeset Number=SeqID_11975
aggttgagcagatcttcgagttggccgacatcaaattgtgtttagggtcgccgctcttctagttactctcttaagttcatacgtttcactatcagggtatggaactcttcatgatttcatactaaaattcttctatggacaaacaaaattggtgctactgatttaagcttaatggcacgaacaacagttcctgttatgtagtatgtgggccagttataaaatttggatgaacactaatttgatttttgtgttctgtttgattcatttagctgcaggttgagtgtgtcagtaggtgtgcttgatgagatctctttagactgaaaaacgatgttaggctccatgtgtaatatttatggactttcaaattttttgactgtttgtgtatttttgctggagtaatttctttttctcccatactacttttctattttcagtttttagggattgttttgtaaaaagattgggaccctatttgactgtactgcgcagatcattcctcatcttcgttccagcagcccctggagatcgacgagaagttgactgcagtttattttgttcgtacaatgattaaagaaaataaattatggagttcactagcctcggcaaattcagctcggctcagacgtatatgtttaaaagataacataaatttaacattagcttatttaaatgaagttcgt

SEQ ID NO: 2197 - DNA, 473 bp, Glycine max
  misc_feature (206)..(206): n is a, c, g, or t
  misc_feature (467)..(467): n is a, c, g, or t
  Peptide Sequence Number=SeqID_9710
  Probeset Number=SeqID_11976
acactacatttctcacgcgcaaatcgtctcgtggttcctttcttcccctccgtccacccaaagcttccgctcttcgaatcggtcctccaatccatggcgacgctcgccctgccgcccaccgccgccaccctgccggccgaggaagacccgcgcacaggcgagaagccatctgccgacgactctgccgcggatccgagcgacatcgnctccgggtgggttttcctcgggaagtctgatgtagtgccggcggaccaggccgcggccgccatcgatgccgcgggtcaccgacgcctcggcttctcgccactgccgatgttacctatctgggtgcagatggtgctcggaggcgtagtctacacggccgtgccgttctacaagagggccagacagcttgaagacaaggcgattgaaaacgtggaaactgctttggatgttttggagcgtgcctctgaggtgacggagaagtncgctgc

SEQ ID NO: 2198 - DNA, 2297 bp, Glycine max
  misc_feature (1)..(1): n is a, c, g, or t
  misc_feature (185)..(185): n is a, c, g, or t
  misc_feature (207)..(207): n is a, c, g, or t
  misc_feature (217)..(217): n is a, c, g, or t
  misc_feature (236)..(237): n is a, c, g, or t
  misc_feature (309)..(309): n is a, c, g, or t
  misc_feature (342)..(342): n is a, c, g, or t
  misc_feature (380)..(380): n is a, c, g, or t
  misc_feature (419)..(419): n is a, c, g, or t
  misc_feature (430)..(430): n is a, c, g, or t
  misc_feature (588)..(588): n is a, c, g, or t
  misc_feature (608)..(608): n is a, c, g, or t
  misc_feature (710)..(710): n is a, c, g, or t
  misc_feature (712)..(713): n is a, c, g, or t
  misc_feature (739)..(739): n is a, c, g, or t
  misc_feature (751)..(751): n is a, c, g, or t
  misc_feature (763)..(763): n is a, c, g, or t
  misc_feature (765)..(765): n is a, c, g, or t
  misc_feature (769)..(769): n is a, c, g, or t
  misc_feature (777)..(777): n is a, c, g, or t
  misc_feature (846)..(846): n is a, c, g, or t
  misc_feature (1001)..(1001): n is a, c, g, or t
  misc_feature (1074)..(1074): n is a, c, g, or t
  misc_feature (1143)..(1143): n is a, c, g, or t
  misc_feature (1423)..(1423): n is a, c, g, or t
  misc_feature (1561)..(1561): n is a, c, g, or t
  misc_feature (1623)..(1623): n is a, c, g, or t
  misc_feature (1625)..(1625): n is a, c, g, or t
  misc_feature (1627)..(1628): n is a, c, g, or t
  misc_feature (1954)..(1954): n is a, c, g, or t
  misc_feature (1956)..(1956): n is a, c, g, or t
  misc_feature (2007)..(2007): n is a, c, g, or t
  misc_feature (2011)..(2011): n is a, c, g, or t
  misc_feature (2188)..(2188): n is a, c, g, or t
  misc_feature (2286)..(2286): n is a, c, g, or t
  Peptide Sequence Number=SeqID_9711
  Probeset Number=SeqID_11977
nacatatcggcgataacgctggtgtactcgttgtgtcgtcgtgaacgctcataacataagcctccatcccattatgtgatcgccgagtatgacgcatattacaatcatccagtgaccgatgacctggaatacctcgtatcagcacgacgtcggggtctcgtgctgcagaaccttctatcacgtcngctgcagcaacgagcatgaggnagccgactcngcgacacggtgtcctgcanngtacatctcaaatctctcgttacgctagccgtcgtacgacctgctgtcgcgtccgcaactacatgtcatganccagcaaatatatcatgtgtatatccagcggcncatatgggcgacaggtatatgcacatcgcgagtagtanatctgcgcggagcgcactcgcgcgcttagcagtaccatntgtcgtatgantgcagatttcttacgtcgtagatattgaaagatgctggatgttaaatatgcgctatgctcggccacctcagactcgcgtcgagcgctgctaggcactcgagagagaagacgagagagcgtagccgcgtcacagctgcgctagagcagctgaagacgantataatcacgtacagcttangtgtgcgtctgcacctacacattcagatatgcagcagtacgcgcacgcgcgtactacactacaccatgttgatcttgcacagtcaaggtccatcacatgcgnanngaggagagccgagacaccagcgcganagcgagcacagncgcgcgcgcaantntgancgcgtcantacgcgagtgagtgaagtcgtcaacatacggtaggtcgccagcgtgagggcgcgagtgctagatgagtngtggcaggcagcatctgtatccagagtctcagctctcatcgtagctcatatgcgctcacgtcgacgctctcgcacacattagtcaacggcgtgcgcgcactcaccagtctcaccatcatccgtccgggaaagagacagtactcgtctgtcgatancgcagcgcgtgcgtgcgctcgatgcctcgtcataatatgtagttagctccatatgcatcggcaaatatatgcngccgcgctacactacacgtcgtgagagatcagcgctcgcgcgtcgcgatactcagccgacgtcgctcgntcgcgcgtcacaccgacgtcaatcgcatggtatcctgtcatcaatatacggacgaatacatatagaatccgtgcgacacggacgtcccatacaacaccagtcatgcactacacactgacttcggtcacgtggacgcgatcgacaacaggcacataacgagccacgactgcatcacgtacacacagcagtatacgacaggcgagatacacctcgctcgctgcatcgatcgcgcgtatagagtattgttctatccacgtgacgctgtcgtctcgtgctgagnggagaggtacgcgccacgcgcgcgtgactcgctgccagatccgcacaaccgagagtgtagatcgatgcgtgatatgagagtgcgtatcgtgtacgcatcacctcgatccctctcagctctacatgaatatactcgtgnggtcgacactgaagctgcactatatcgcagtagcggtagcagagccgtctcgtcgtgagttntnannaagctcacgacacgtcgagctccgatagttaagggtctatactagcacataatggacgtccttgcgttccgtcattgtagcgatggtatcatcctcgtatacgactcacgacgcctcgcacatcacaccactcactaaccgcgcagcgcacactcaggtggcgcgctcgagtgctgtcgcctcgtctcgcaccgcggcgacgccgaggcaggagagacgtggcgagggcgcgcccatcggcgtgtgtctactccagtaatctttgcaccgctcggccgcgcacgcggtgactcaccctgcgggcgcgacagcagcagcgacaatantnagcgagcagcactattatcgttatagattcgacgaagttaagatagtaagnaatngtgtcactcgcttcacacgcatgtcgacacagcgctgcgagggacggtgagaccaatgcgcggtgcggtactgggcgttccgcgcgcgcgggcggtagtagtcgtgctctgctctttctaccctggcggctgcgtcatcagcgagcattcgtcgtgcgcggcgcctcatgaacatanctgtcctgatatcgtcgtccttacactgtccaaatcacgaataactgtcgcgacgcgccggtgcgtgatgtgtgtggccaactgcatcagaatatatngtgagatagat

SEQ ID NO: 2199 - DNA, 499 bp, Glycine max
  Probeset Number=SeqID_11978
aacactcagaccttcttcttcgatcttaatggcgaatctaacgacgaacgcaaaagctcgcctgagaggcgttgtgttcgacatggacggaaccttaacggttccggtcatcgatttcgcggcaatgtacaggactgtcctcggagaagacgagtacaagcgaatcaaggcggagagtcctaccggaatcgatattcttcaccatatagagtcgtggagcccagataagcagcagaaggcgtacgagatcatagctgattatgagcaacaggggattgataagctccaaatcatgcccggtgctgttgaactatgtagctttcttgattccaaaaagataaagagggggctaattacacgcaatgttaagaaggcaattgacattttccaccaacgttttggggttatcttttcaccggcactaggcagagagtttcgtccatataaaccaaacccggatccgctgctgcatatatgttcagcatgggacatccaacct

SEQ ID NO: 2200 - DNA, 1582 bp, Glycine max
  misc_feature (24)..(26): n is a, c, g, or t
  misc_feature (28)..(34): n is a, c, g, or t
  misc_feature (75)..(76): n is a, c, g, or t
  misc_feature (289)..(289): n is a, c, g, or t
  misc_feature (664)..(664): n is a, c, g, or t
  misc_feature (817)..(817): n is a, c, g, or t
  misc_feature (1312)..(1312): n is a, c, g, or t
  misc_feature (1385)..(1385): n is a, c, g, or t
  misc_feature (1416)..(1416): n is a, c, g, or t
  misc_feature (1460)..(1460): n is a, c, g, or t
  misc_feature (1467)..(1467): n is a, c, g, or t
  misc_feature (1472)..(1472): n is a, c, g, or t
  misc_feature (1493)..(1493): n is a, c, g, or t
  misc_feature (1517)..(1517): n is a, c, g, or t
  misc_feature (1534)..(1534): n is a, c, g, or t
  Peptide Sequence Number=SeqID_9712
  Probeset Number=SeqID_11979
cccccccccccccccccccccccnnncnnnnnnncccaccacaccgccccgagacacaccgatcacgcctctttnnttccgaatctgcgggtaaccggggccccgccccgctcgtaggatcgaatgcgctatacgtataaagcttctctcttctcctgttttgttgttcttcgtgtgtcgccctgaccacatcgaacccccgtgatgcatcatcgggacgaagccaaaaaacaaaatcgtccttcctatcctacgagcacgtaaagagcacctcgcgagatagagaaantgaatgatacacgcaatgtattttactctagacccctgagttatgttgttttgttctgttttatttattgttccacaccacatctgctcacgcacgccctattatgatatatacttctacatacatatataagagatgacatagatatgtgtctaattagaactgtgtaggtgggatatgaagagtgatagtcgaatagacaacatccgcacacgagttacgccatacagcaccgccgacgcccacgccaagtgccgtcgtgtacaaggcaagaccacgaccacgctcaactacagtcgtcatactagagctctatgcgcgcccgcaacgaacacccgaggcatagagagcagctgagacgctttaccacccctnctctcgcaatatcggaatatacgaactgtatagcatccagacatcacaaggtagtcgtcgcatgatgtgcgttatacatagcatcacatcagaacgaatatgatcattgtaactaattcacccgaatgccgatttccatataggtggccttcnatacactctctgaaccaacaactcatgccatgactgcgtctccaaccaccccgcctcttacgtatcatttctcgtcaccgtgcgctcatgaatgctatctagcagacttctgctacgctctgcaaccccgctctgctctctacgctagttacactcttcctgcgctgttgtcttaacacccgcacacctaggacggacacagaagaataaaccacacagcgtctcgtgatctactaccgtactactctctagtcgccaccacatacatcagataatcataatgatattcacttcatatcgtctgtaagtaacgattctgattgagtgttttattgtatgttatataataatgtacaaactactgagtggactatatcagacaccttagacaggctcatatctgtcgtatctactccacacttctctctggtcgacacctctagaatatgtctactattctcctatattcgacatctggtctattctattgagctncacatgtctcgatgttgtctgtgtgtgatcagctcattgctcacgcgctcgcgactctctcatcgatattatnactgcgacgaatgtgccacgaccactcattngaatatatctcgctgtgcgacaagcacacaaccccgcactaagnacccctnatatnatacatcaggacctctctctnatactcaacgaatgatgactactnccacacatttgaaacantatacaacaagcatcggctaggtagttgacatcttacagcgacatctt

SEQ ID NO: 2201 - DNA, 2194 bp, Glycine max
  misc_feature (23)..(23): n is a, c, g, or t
  misc_feature (30)..(31): n is a, c, g, or t
  misc_feature (81)..(81): n is a, c, g, or t
  misc_feature (114)..(114): n is a, c, g, or t
  misc_feature (136)..(136): n is a, c, g, or t
  misc_feature (180)..(180): n is a, c, g, or t
  misc_feature (201)..(201): n is a, c, g, or t
  misc_feature (283)..(283): n is a, c, g, or t
  misc_feature (365)..(365): n is a, c, g, or t
  misc_feature (393)..(393): n is a, c, g, or t
  misc_feature (395)..(395): n is a, c, g, or t
  misc_feature (400)..(400): n is a, c, g, or t
  misc_feature (470)..(470): n is a, c, g, or t
  misc_feature (524)..(524): n is a, c, g, or t
  misc_feature (561)..(561): n is a, c, g, or t
  misc_feature (638)..(638): n is a, c, g, or t
  misc_feature (662)..(662): n is a, c, g, or t
  misc_feature (666)..(666): n is a, c, g, or t
  misc_feature (668)..(669): n is a, c, g, or t
  misc_feature (715)..(715): n is a, c, g, or t
  misc_feature (721)..(721): n is a, c, g, or t
  misc_feature (727)..(727): n is a, c, g, or t
  misc_feature (744)..(744): n is a, c, g, or t
  misc_feature (746)..(746): n is a, c, g, or t
  misc_feature (800)..(800): n is a, c, g, or t
  misc_feature (814)..(814): n is a, c, g, or t
  misc_feature (880)..(881): n is a, c, g, or t
  misc_feature (946)..(946): n is a, c, g, or t
  misc_feature (953)..(953): n is a, c, g, or t
  misc_feature (956)..(956): n is a, c, g, or t
  misc_feature (971)..(971): n is a, c, g, or t
  misc_feature (978)..(978): n is a, c, g, or t
  misc_feature (989)..(989): n is a, c, g, or t
  misc_feature (1002)..(1002): n is a, c, g, or t
  misc_feature (1023)..(1023): n is a, c, g, or t
  misc_feature (1026)..(1026): n is a, c, g, or t
  misc_feature (1034)..(1034): n is a, c, g, or t
  misc_feature (1055)..(1055): n is a, c, g, or t
  misc_feature (1108)..(1108): n is a, c, g, or t
  misc_feature (1168)..(1168): n is a, c, g, or t
  misc_feature (1215)..(1215): n is a, c, g, or t
  misc_feature (1241)..(1241): n is a, c, g, or t
  misc_feature (1252)..(1252): n is a, c, g, or t
  misc_feature (1258)..(1259): n is a, c, g, or t
  misc_feature (1267)..(1267): n is a, c, g, or t
  misc_feature (1270)..(1271): n is a, c, g, or t
  misc_feature (1281)..(1281): n is a, c, g, or t
  misc_feature (1298)..(1298): n is a, c, g, or t
  misc_feature (1318)..(1318): n is a, c, g, or t
  misc_feature (1364)..(1364): n is a, c, g, or t
  misc_feature (1396)..(1396): n is a, c, g, or t
  misc_feature (1405)..(1405): n is a, c, g, or t
  misc_feature (1417)..(1417): n is a, c, g, or t
  misc_feature (1424)..(1424): n is a, c, g, or t
  misc_feature (1457)..(1457): n is a, c, g, or t
  misc_feature (1489)..(1489): n is a, c, g, or t
  misc_feature (1495)..(1495): n is a, c, g, or t
  misc_feature (1515)..(1515): n is a, c, g, or t
  misc_feature (1523)..(1523): n is a, c, g, or t
  misc_feature (1539)..(1539): n is a, c, g, or t
  misc_feature (1560)..(1560): n is a, c, g, or t
  misc_feature (1604)..(1605): n is a, c, g, or t
  misc_feature (1663)..(1663): n is a, c, g, or t
  misc_feature (1675)..(1675): n is a, c, g, or t
  misc_feature (1697)..(1697): n is a, c, g, or t
  misc_feature (1741)..(1741): n is a, c, g, or t
  misc_feature (1766)..(1766): n is a, c, g, or t
  misc_feature (1786)..(1786): n is a, c, g, or t
  misc_feature (1792)..(1792): n is a, c, g, or t
  misc_feature (1808)..(1808): n is a, c, g, or t
  misc_feature (1921)..(1921): n is a, c, g, or t
  misc_feature (2088)..(2089): n is a, c, g, or t
  misc_feature (2096)..(2096): n is a, c, g, or t
  misc_feature (2101)..(2102): n is a, c, g, or t
  misc_feature (2106)..(2108): n is a, c, g, or t
  misc_feature (2110)..(2110): n is a, c, g, or t
  misc_feature (2115)..(2117): n is a, c, g, or t
  misc_feature (2127)..(2127): n is a, c, g, or t
  misc_feature (2133)..(2138): n is a, c, g, or t
  misc_feature (2141)..(2141): n is a, c, g, or t
  misc_feature (2150)..(2150): n is a, c, g, or t
  misc_feature (2156)..(2160): n is a, c, g, or t
  misc_feature (2163)..(2185): n is a, c, g, or t
  misc_feature (2193)..(2194): n is a, c, g, or t
  Probeset Number=SeqID_11980
cgtcactgtggcgtgctaccttntccttannacagcgttgaaattatactgccactatatgctactctgagattgagtcangcgcttcgacgcctttaatagatctgcgctagnctctcgtgcgttcttacggaangccgtatgtcgtcaggcctcatgacgtatcttgttctaactctnaactctgactcagtgatgtgnttctgggccatctatatcacgcgcacgggtctctgatagtatgtgctcagcttatctgatccattgcgcgctgcggtgccgnacgtgagatcacaatgtcggtaatcgcgtctgcaccacgtgaccactcgttcgtgtcgctgtgatatagtacggcacatgcngtcgatcgtgcgagatcaatcagtgtancntaggntcactcgtctcatccgccgtctgcgctgagcgcgacgcgcgtatgtactgcgttacatgacgaagtctgncgatgcgccatgacatacattacgtgaatccggtgagccctcacatactatagncacgcctcgtcagtggccatcggagtatgcgcgcacncggctgagtagagtagacgtgactcgcgcataccctcatccatgacgctcaccatttatactctctgccgcgcgcangccggccagagacggcgcgatgtncctncnncagagcagccgacacgcatcgtcacattctccagcgactccatcgnagttgnctactncgagaagcgtgcggtcntntaccgcatgtacctcggcccacacatctcgtccggagcgtcgggcgagcgtggnttatcgccgaagancaagatgattagcggacgccgtagggtcgaggcaagaagctcaggcagaacacgcagtagagagannctcgagtgcgcgagcctcgcagtggcggccagtctcgctgtccgcgtgctgcgtatactcgcacncgcgagnccnacggcggtggtcgcngtttggncgctctcctgntccacgcatcgtnaaccctaggttgtagagtcanttngttagttnacaacaacacgacgcgacgangagagagacgctcgccgacgtcggctgcacgtcagagtgcggttgcggccacnagactagcgcgtgatgcgtataatacgcgcgcaccacacacgacgccgagcgagtagcgnggtgggctgcgcgcagcggggagagcgctgagcgaatacatctcatnctagttcgtgtgtcatctacttgganagggagccgtnttttcnnctgcgcgncgnnggcaccggtngctctcgaggtcgcgantcatcgtagtaagcgaaacncgtatcctgcttcgtgtctgctgcgcgcgctgtcattactattctncgcgcgtgctcggcggagatcgcatgttagtntcttagatnaaatgtcgcgcntttcatnctcatcgaccatgagcgcacagcatacgaattnttaatcgacgatctagcgctgtgcggaggccncgacgnccataatctgagtacgaggnagtaaacngtagagcggcgagagnggcggccgcagaacatatcanacagtatcatcgattacagcgacacgtatcacaaatagaaggannattatgattataagtatttatatgatatagaaagataaagagatgtagggcagatagntggggagatatncacatacaatagaatagtaaangaaatagaataatacaaatatgtatagataatggtaatatgatntacagacatagactatatacaacgngataccaaagacaaacacgntagggnacaaggacaaccagtnaccgagggtagcggacagagagaaggtaacacacaacagggacacgagcaggagctttttatagaatcgatagatgtggttgtgagcgcagcgtcacttgtgtgtagtgcgtntggagtgtaaagtgacgcgctgcgagcggcgggcaccagcgccgcacacacgccggagcatcacaacgcacgcactcatcgagaacgcggccactaatagagagcaagacccagaacctctagcgcacgagaataaaatatactaaatatccaaaacaaaaaccaannaatagangcggnnaaannngngcggnnnaaaatgcctncacagnnnnnnatnggatggttnaaaaannnnnaannnnnnnnnnnnnnnnnnnnnnngggggggnn

SEQ ID NO: 2202 - DNA, 658 bp, Glycine max
  Peptide Sequence Number=SeqID_9713
  Probeset Number=SeqID_11981
aaagaacagagcttcagcaggggaaccaaattagggtccgtcagtaggctggctggcggcggcggcggcgacggcggaggcggcggcgacggcgatgtcttcctcctcccgtgcgtcgtaatcaggcggaggtcgcgggcgtagggctccatcaaggtcgcccgtgcaagaagcctcctccctggaagatactagtgttgcgtccatgaaattgtgagctcccaatcttctctaccaattcttcctcgtccttctttccatttctgatggtatgaacactcgaatcagaggctggttgtggattttttttcagtggcatagtgatccctgctccccattccttgcagaactatggctcgatctcagggctacaatcaggaggtttgaagctgcaggtggtgatgactggcaaccatgattggaacagcgccaaagaattggaacaggggatgaactgagtcaacaagttctagagaagaatgcagagattgaaccaaaaatgttattggcaggtgtatttacaggatttgtactgcattaatagctagaagaagaatgtgatgccaaaatcttgtaatggctgaatgatgtaatggttggatgatgtaatggtattccatactactatttatgtggtaattgatggtacatttcttat

SEQ ID NO: 2203 - DNA, 1507 bp, Glycine max
  misc_feature (81)..(81): n is a, c, g, or t
  misc_feature (460)..(460): n is a, c, g, or t
  misc_feature (551)..(551): n is a, c, g, or t
  misc_feature (648)..(648): n is a, c, g, or t
  misc_feature (651)..(652): n is a, c, g, or t
  misc_feature (1201)..(1201): n is a, c, g, or t
  misc_feature (1353)..(1353): n is a, c, g, or t
  Probeset Number=SeqID_11982
ttgttaataatatatttggggtttttttttaggcacacaacaaattatagacgacacgacatttttctaaaatctaaatgncggcgggcaaaggcgccgtgggtcccatatctggcaactggcgctccaggtcacacaacaaccgccgcgccccacacactcacatgcggcgcacgttgggacttgttggtggattaacctggtgacattgcgttgctaattgtgtgatcaacgggtactaacggtcgtgaacaggcgtgactgagttcatacaacacagccgcggagacacggcggccgggtaacgggcaatacatcgggctcaaagaacacaagcgttggtgtgtatcagggataacaaaattgcgggcgggggggcgggcgggagaaaacgggcgccaaccagacggccagccacctacctcgctcataatctgtgtcgtgcaactcacaacgaggnacgggcgcagcaccaacccgcgcacaaccggcgggccacaacacgtggacatgctactccgctacccgctccggtacttcgtgtatactgnggcggcgactctctaccccacaacttactcctgtacactcgtctaccgggcgtaacaacgagtgaaaccagggccgcggcgcagcccgcaacctcancanngtcccacctgtataatttacttacaggcgtgtgcgttgacaacaaacatcacaacaaatcataaatacaatcgtggtcacacactcgcgaactatggcgccctggcggttgtgctctccacacctccatcactctacatgcgcggcgtctaagatggtgtacacaccacagcgcatcataatctcatctggggtacaattcggtggtggacacaagagacaacaatacacaccaccacgcgcgccaccccgcgcggcggctactattgtgctcctcaccgtgcgcgacaacaacaggaaaacgcggtgtgccaaccaaagtgcggtgtgtgacacacacacgcggtaaatacccggtgcgccaccactcgcgtcactatctgctctcgctcaaaacaggaggtgtggtggtccaacacacaatatatactaatcgtcaagcagtgcggatacgctgtgcgtcggcgtgtgcgctgcttctctcaccacttctcctatcgtacaatacaataatataacagattgtgtgtggcgccacatcgatacaganagaaggcgcgggtgtaatagagagtaggtgggaacaagacgtgtgggacgttcgtgtctcttcttacacatatatctgtgtgcgcatatcatgtagtacacttcgtcataatatcttaatagatacgggtgatacgactaactatcgacatncggtcgcggcgcggtcctgcgtaccacactcactccgcgctgtgcagtggctcggcgactcactcgtcggatatgcgtgtatgatccatatacacgcgacaaagtgggagcgcggggtccgccacccacctcaccactactctccagttacaca

SEQ ID NO: 2204 - DNA, 473 bp, Glycine max
  Peptide Sequence Number=SeqID_9714
  Probeset Number=SeqID_11983
aataatggcgtcgctgcaaagctcagggatgttgacgaaagagcagatggtttatctctttgatcgattcgattacttgacctcgcaatctgatgtgaagaaaagaatctccgacgccgttgaggacaaacaggaagctgtagcggttacaactgcaattcaagaagagatattcttggagatgggaattgacccaggatttggtattggatgcttgggaaagctgaactctgcgtttgaaaacgataaagagttgatgattggtttctataagtttctcgctaaggaggagatggcgtgtgaagaagctgagcttggtccagatgggtttgaacagaagatggaagctcaacgacagttacatgaacagcaactggagatgctaaagtatatgcgtaagtttccacttgacgaccaatctgcaatccttaaaaagctccagaagcaactagagaatgcggatttcgagcctg

SEQ ID NO: 2205 - DNA, 635 bp, Glycine max
  misc_feature (109)..(109): n is a, c, g, or t
  Peptide Sequence Number=SeqID_9715
  Probeset Number=SeqID_11984
tccctcgctgtagcaaatgcataggactcaggtgctcgcacacaagagtatgttcatgttcgcgtcgaacagcgcatggaaaggtaaagcatacaactggtctaaggtntaaagaaagagtaaagctacagcaagaaactcaggaccctgaagaaagaattctgctgtaatggtactgttgtcaaagaccctgaggtgggacaggtcatacaacttcagggtgatcaaagaaagaatgtttctactttccttatgcaggctggcatagtaaagaaggaattcatcaagcttcatggtttctaaggcctaaccaaaagtggcaatttagcttcatgctaaaatacatagagcccgctgattacatttaatagcaccagcagcaacagctgataaatgtgcatcctagcaattatcagtcacagcgacaatctggtaaatcgtaggcaaaagattagcaaacacttctccgtggtcttgagctataaggtagtatagagagctcccttccacataatggagagaaagcattgggacggttgccttgtaaaagcacagcgtgacacagttgacgtgtggcgacgactggtgcgctaagatagtatggaaacatagacatcagctgtctctgtctgagc

SEQ ID NO: 2206 - DNA, 1789 bp, Glycine max
  misc_feature (5)..(5): n is a, c, g, or t
  misc_feature (53)..(53): n is a, c, g, or t
  misc_feature (55)..(55): n is a, c, g, or t
  misc_feature (139)..(139): n is a, c, g, or t
  misc_feature (265)..(265): n is a, c, g, or t
  misc_feature (280)..(280): n is a, c, g, or t
  misc_feature (421)..(421): n is a, c, g, or t
  misc_feature (448)..(448): n is a, c, g, or t
  misc_feature (494)..(494): n is a, c, g, or t
  misc_feature (496)..(496): n is a, c, g, or t
  misc_feature (565)..(565): n is a, c, g, or t
  misc_feature (579)..(579): n is a, c, g, or t
  misc_feature (771)..(771): n is a, c, g, or t
  misc_feature (776)..(776): n is a, c, g, or t
  misc_feature (915)..(915): n is a, c, g, or t
  misc_feature (965)..(965): n is a, c, g, or t
  misc_feature (1039)..(1039): n is a, c, g, or t
  misc_feature (1070)..(1070): n is a, c, g, or t
  misc_feature (1122)..(1122): n is a, c, g, or t
  misc_feature (1137)..(1137): n is a, c, g, or t
  misc_feature (1200)..(1200): n is a, c, g, or t
  misc_feature (1214)..(1214): n is a, c, g, or t
  misc_feature (1378)..(1378): n is a, c, g, or t
  misc_feature (1422)..(1422): n is a, c, g, or t
  misc_feature (1425)..(1425): n is a, c, g, or t
  misc_feature (1476)..(1476): n is a, c, g, or t
  misc_feature (1526)..(1527): n is a, c, g, or t
  misc_feature (1535)..(1535): n is a, c, g, or t
  misc_feature (1538)..(1538): n is a, c, g, or t
  misc_feature (1576)..(1576): n is a, c, g, or t
  misc_feature (1604)..(1604): n is a, c, g, or t
  misc_feature (1619)..(1620): n is a, c, g, or t
  misc_feature (1634)..(1634): n is a, c, g, or t
  misc_feature (1637)..(1637): n is a, c, g, or t
  misc_feature (1639)..(1640): n is a, c, g, or t
  misc_feature (1642)..(1642): n is a, c, g, or t
  misc_feature (1661)..(1661): n is a, c, g, or t
  misc_feature (1687)..(1687): n is a, c, g, or t
  misc_feature (1693)..(1693): n is a, c, g, or t
  misc_feature (1698)..(1698): n is a, c, g, or t
  misc_feature (1722)..(1722): n is a, c, g, or t
  misc_feature (1724)..(1724): n is a, c, g, or t
  misc_feature (1728)..(1730): n is a, c, g, or t
  misc_feature (1735)..(1735): n is a, c, g, or t
  misc_feature (1739)..(1742): n is a, c, g, or t
  misc_feature (1744)..(1745): n is a, c, g, or t
  misc_feature (1747)..(1758): n is a, c, g, or t
  misc_feature (1760)..(1761): n is a, c, g, or t
  Peptide Sequence Number=SeqID_9716
  Probeset Number=SeqID_11985
gccanggctgtgggtgccggtgcgttgcagagtctgggtcgacgcgctgtccnancacatcttgctccatgtttctactgcatgtcctctgtactgacgctacctcgtatcacgatgcgtgcagagagctcaccacgangtgacactctacggagcagtcacacatgaatactatcgtatatatcgtacacaagagacatatctgtgtcgtcgtcagagtcgacgctcacgagcgtcgacggttgctttcaaactcgactgcacncagtcacacgcaccncacacgtctatcacatcacatgtatcgtagctggacaggaggagaggagtacgaaacagcgcacacatgtagacgcatatacactctcccacgttctggacactacaatataagtacatacgtagtcctcactatagtctncgagcttctcgccgcgtcgatctctancgagtatgagcgaagcgcgcgtgacgttgcgtgcggcgcgtcgcgntncacttcaccgcgctcctcacacgtccaggccagaagtgatcacgacgacgtcgcagtatataacatagngatcatacacacanccgccacacatcacgaagatacatactcacgaaggcagagtgtgagaggcgactgaaagatgagagacgcatgtagatatagagagagagtagagcagagcacgaccacgacatacggagagagtgggggtgaggagcgcggcgccggcagcgcacgcaaccgcgacgccgcacgcgagtagcatcgatacntacangatatgagatcgcagaacagagagtgaggaagcgattatagatatagcagagacatacactcaccacgatacacctatactcacactacgctaggcaacattatcgcgacagtacagaatcatgtcaggcgcagcaatntaccaacacaggacgcaactacagtctaatacatacagatagtagactantgccgtgccctcacacccctgcccgagcaccggcggagaggcgttgggacgcgcgcgagggccgacacgggagncacatcggcgtggcgggctcgcgggtgcgcnctccacgagcgcgcgagccacgggagtagccatcaacaagaacacaccgagngacgagcgtagccgnatgtttatctcatatccaaccccttacaactatccacaaaatgagagaattcggtcggagagngggtagtgtggaanagcgagagaaatagagtagatgtggctgtgtgaaaatagacagtagaggaggaagatagatgaacctctccacgcacactcctcactcactccactccactgtcgcgtgtccgctcttctggctcttcgtcttgctgcgcattacgtgcagctttcctgccaanagcgacacaacgcccgcgcgagagacacgcaccgccgagcaagngcngagcggcagaagagcgacgcagaagagagcatatgcgacgtcacacgtgtngcatcagtcgtaagtaaataagttattgatgcgatatagttggtttagtnnattatgtnatntacgggagtgatcaacactctgcacgtctgagtgatantatgagatagtgtagaggatagcgtggnggagagggagaaagnnccggcctccgcttnctntnntngggggagaggaagaggacnaggagcacaccgcaacggcgcgaaantttccntcagntggagcagcccgcggtcgagtagngngagnnntgggngggnnnngnntnnnnnnnnnnnnannaaaaaaaaaaaaaaaaaaaaaaaaaaaa

SEQ ID NO: 2207 - DNA, 639 bp, Glycine max
  misc_feature (5)..(5): n is a, c, g, or t
  misc_feature (7)..(7): n is a, c, g, or t
  misc_feature (9)..(9): n is a, c, g, or t
  misc_feature (11)..(12): n is a, c, g, or t
  misc_feature (15)..(15): n is a, c, g, or t
  misc_feature (18)..(18): n is a, c, g, or t
  misc_feature (21)..(21): n is a, c, g, or t
  misc_feature (27)..(29): n is a, c, g, or t
  misc_feature (32)..(33): n is a, c, g, or t
  misc_feature (39)..(39): n is a, c, g, or t
  misc_feature (48)..(50): n is a, c, g, or t
  misc_feature (57)..(57): n is a, c, g, or t
  misc_feature (62)..(62): n is a, c, g, or t
  misc_feature (66)..(66): n is a, c, g, or t
  misc_feature (68)..(68): n is a, c, g, or t
  misc_feature (75)..(75): n is a, c, g, or t
  misc_feature (83)..(83): n is a, c, g, or t
  misc_feature (86)..(87): n is a, c, g, or t
  misc_feature (93)..(93): n is a, c, g, or t
  misc_feature (98)..(98): n is a, c, g, or t
  misc_feature (111)..(112): n is a, c, g, or t
  misc_feature (116)..(116): n is a, c, g, or t
  misc_feature (121)..(121): n is a, c, g, or t
  misc_feature (123)..(123): n is a, c, g, or t
  misc_feature (126)..(126): n is a, c, g, or t
  misc_feature (130)..(130): n is a, c, g, or t
  misc_feature (134)..(135): n is a, c, g, or t
  misc_feature (139)..(139): n is a, c, g, or t
  misc_feature (146)..(147): n is a, c, g, or t
  misc_feature (151)..(153): n is a, c, g, or t
  misc_feature (155)..(156): n is a, c, g, or t
  misc_feature (164)..(165): n is a, c, g, or t
  misc_feature (169)..(169): n is a, c, g, or t
  misc_feature (173)..(175): n is a, c, g, or t
  misc_feature (178)..(178): n is a, c, g, or t
  misc_feature (192)..(193): n is a, c, g, or t
  misc_feature (210)..(211): n is a, c, g, or t
  misc_feature (214)..(215): n is a, c, g, or t
  misc_feature (220)..(220): n is a, c, g, or t
  misc_feature (228)..(228): n is a, c, g, or t
  misc_feature (230)..(230): n is a, c, g, or t
  misc_feature (232)..(232): n is a, c, g, or t
  misc_feature (236)..(236): n is a, c, g, or t
  misc_feature (246)..(246): n is a, c, g, or t
  misc_feature (254)..(254): n is a, c, g, or t
  misc_feature (260)..(260): n is a, c, g, or t
  misc_feature (263)..(264): n is a, c, g, or t
  misc_feature (266)..(266): n is a, c, g, or t
  misc_feature (273)..(273): n is a, c, g, or t
  misc_feature (301)..(301): n is a, c, g, or t
  misc_feature (320)..(320): n is a, c, g, or t
  misc_feature (322)..(322): n is a, c, g, or t
  misc_feature (340)..(340): n is a, c, g, or t
  misc_feature (381)..(381): n is a, c, g, or t
  misc_feature (390)..(390): n is a, c, g, or t
  misc_feature (414)..(414): n is a, c, g, or t
  misc_feature (457)..(457): n is a, c, g, or t
  misc_feature (467)..(467): n is a, c, g, or t
  misc_feature (502)..(502): n is a, c, g, or t
  misc_feature (508)..(508): n is a, c, g, or t
  misc_feature (518)..(518): n is a, c, g, or t
  misc_feature (528)..(529): n is a, c, g, or t
  misc_feature (531)..(531): n is a, c, g, or t
  misc_feature (535)..(537): n is a, c, g, or t
  misc_feature (544)..(544): n is a, c, g, or t
  misc_feature (549)..(549): n is a, c, g, or t
  misc_feature (554)..(554): n is a, c, g, or t
  misc_feature (559)..(559): n is a, c, g, or t
  misc_feature (562)..(562): n is a, c, g, or t
  misc_feature (565)..(565): n is a, c, g, or t
  misc_feature (579)..(580): n is a, c, g, or t
  misc_feature (583)..(583): n is a, c, g, or t
  misc_feature (597)..(599): n is a, c, g, or t
  misc_feature (608)..(608): n is a, c, g, or t
  misc_feature (610)..(612): n is a, c, g, or t
  misc_feature (615)..(616): n is a, c, g, or t
  misc_feature (622)..(623): n is a, c, g, or t
  misc_feature (628)..(628): n is a, c, g, or t
  misc_feature (639)..(639): n is a, c, g, or t
  Probeset Number=SeqID_11986
taagnancngnnganggnaangagggnnnccnnggcccnaaagggtannncaaatgnttttntccngncgtcaanattagggngtnnttaggnttganagttttccctttnncatnccttngntgncgcnatanntttnaatagtnngggnnnannaaaaggtnngatngaannnttntaatggccaccatnncggatcggaagttgganncgnnaatangggggagncnangcgnccgttcatgntattttgnaggaanggnngntagtatnacccaaagcatagaacctcatttaatgncaaacaagttatggcagcnantagaaaacccgtccgtgncatttctttttgtatatccgggtaaagcgttggcaccgganccaagtacnccatccacagaaatgatgttaccntaatattccgaaagtggcagaccaaagcattgtgactgcccangatgatcctntgaaggtttagttaggggttgcgaggaaattaccntaggcngggtttcttnccaaatccanncnggcnnntcaattngcaanaatgntcgantgngantttttcgattaggnngtnttaggttaatggtnnngggggaaanannncanncggggnngagangggggaaaaan

SEQ ID NO: 2208 - DNA, 1565 bp, Glycine max
  misc_feature (74)..(74): n is a, c, g, or t
  misc_feature (78)..(78): n is a, c, g, or t
  misc_feature (108)..(108): n is a, c, g, or t
  misc_feature (128)..(128): n is a, c, g, or t
  misc_feature (137)..(137): n is a, c, g, or t
  misc_feature (139)..(139): n is a, c, g, or t
  misc_feature (176)..(176): n is a, c, g, or t
  misc_feature (317)..(317): n is a, c, g, or t
  misc_feature (515)..(515): n is a, c, g, or t
  misc_feature (618)..(619): n is a, c, g, or t
  misc_feature (621)..(621): n is a, c, g, or t
  misc_feature (680)..(680): n is a, c, g, or t
  misc_feature (980)..(980): n is a, c, g, or t
  misc_feature (1140)..(1140): n is a, c, g, or t
  misc_feature (1142)..(1142): n is a, c, g, or t
  misc_feature (1144)..(1144): n is a, c, g, or t
  misc_feature (1149)..(1149): n is a, c, g, or t
  misc_feature (1227)..(1227): n is a, c, g, or t
  misc_feature (1281)..(1281): n is a, c, g, or t
  misc_feature (1370)..(1370): n is a, c, g, or t
  misc_feature (1411)..(1411): n is a, c, g, or t
  misc_feature (1423)..(1423): n is a, c, g, or t
  misc_feature (1507)..(1508): n is a, c, g, or t
  misc_feature (1511)..(1511): n is a, c, g, or t
  misc_feature (1516)..(1516): n is a, c, g, or t
  misc_feature (1526)..(1526): n is a, c, g, or t
  misc_feature (1529)..(1533): n is a, c, g, or t
  misc_feature (1536)..(1536): n is a, c, g, or t
  misc_feature (1539)..(1540): n is a, c, g, or t
  misc_feature (1543)..(1545): n is a, c, g, or t
  misc_feature (1547)..(1547): n is a, c, g, or t
  misc_feature (1550)..(1555): n is a, c, g, or t
  Peptide Sequence Number=SeqID_9717
  Probeset Number=SeqID_11987
ctctcgatccttcgagacctcttatcgtacgccacacatgagatcatcgcatacgagctcatcactcatagtgntccngtcacgatcacgatcatttctctttcgtantatagactgctctgaagatnaacagtgtngnacgaactatgtcgcagaagtagatgcaatataccttntttacgaagtagtcgtacaatccataagacctagcgactgtcgtatcaaataccgacgcatgatgaggtgtgtgtgcagagactcatagagtgatgagatggtccgacgacgtagatcaacatcagacgagcgatatacantatcgacatcgacagcacgtacagagagacacatctccgcactacactatatcacgacatcatcacatcatcatactctcacactgctcatatttactctatccagttctactacaggtatgcctgtctgcgtagctcaagatcatgcacgcacttatcattcaaaaccaatcgatagcagtagatcacagatcatgngacgatacgcatcctgacgcataacatagactactatattgcagtgtacacaagtgaaactcgagtggaaatgaaagtagctaagatgcggtatgtatgttgnnantaacgtcgcacagtagtgcgcgtagtgacagtgttacacacgagcgtcgcagaatagantgagcacgcttgacctgcgtggcacacacataatgttctaatatagtgtagtcagatgtgacatcgacgagctgaccgctcataccgtgactctgaccactctctcatggacaacttacatcatcaacacggcgtcggacgagtaacacggattcacaatagcaagaacacagcgacatcttcatatgatatatatatacatatcactatcatatatatacttattatacattatatacattactctcatatgaatacaattctatatataatttataaactactatctctcagtaatantacatatacacatatatacatctctcagaacacaagagataagcacacagacagtaatcaccacagagatagtagaacaacagataaatatacaatacacagttatacataacacatatactatacgacatcagcttcgaatagagtgttgaatcgaatntntnatganatagacagaagagagagtgttgccgatgtgtgtgtgggggtgtgtggaaggtgtactcaggggtgtctagtgagagtncagactgttgtacattagatgtgtatattcgcgtgtgtagtgaccgtgatagtntggtacgtggttggatgttgttgttgtgtatgtcctctcatgtcgccgacaaagctcacacgcctcgtatctctctctatctacttcanatattaattatatctatttatatcgtagagaagtatgatcnattatacacganatctactcgtgtgtatgagatatcgctctcatgtctctcggactctcatatcgatgcataatatggtgaactgataagagatanntgntgganaaagagaagnagnnnnnganagnnaannngnaannnnnnaaatatttaa

SEQ ID NO: 2209 - DNA, 787 bp, Glycine max
  misc_feature (339)..(339): n is a, c, g, or t
  misc_feature (355)..(355): n is a, c, g, or t
  misc_feature (362)..(362): n is a, c, g, or t
  misc_feature (367)..(367): n is a, c, g, or t
  misc_feature (384)..(385): n is a, c, g, or t
  misc_feature (396)..(396): n is a, c, g, or t
  misc_feature (401)..(402): n is a, c, g, or t
  misc_feature (417)..(417): n is a, c, g, or t
  misc_feature (428)..(428): n is a, c, g, or t
  misc_feature (451)..(451): n is a, c, g, or t
  misc_feature (456)..(456): n is a, c, g, or t
  misc_feature (463)..(463): n is a, c, g, or t
  misc_feature (468)..(468): n is a, c, g, or t
  misc_feature (470)..(470): n is a, c, g, or t
  misc_feature (480)..(480): n is a, c, g, or t
  misc_feature (483)..(483): n is a, c, g, or t
  misc_feature (512)..(512): n is a, c, g, or t
  misc_feature (523)..(523): n is a, c, g, or t
  misc_feature (529)..(529): n is a, c, g, or t
  misc_feature (533)..(533): n is a, c, g, or t
  misc_feature (537)..(537): n is a, c, g, or t
  misc_feature (542)..(542): n is a, c, g, or t
  misc_feature (544)..(544): n is a, c, g, or t
  misc_feature (546)..(548): n is a, c, g, or t
  misc_feature (551)..(551): n is a, c, g, or t
  misc_feature (570)..(570): n is a, c, g, or t
  misc_feature (583)..(583): n is a, c, g, or t
  misc_feature (590)..(590): n is a, c, g, or t
  misc_feature (594)..(594): n is a, c, g, or t
  misc_feature (600)..(600): n is a, c, g, or t
  misc_feature (603)..(603): n is a, c, g, or t
  misc_feature (611)..(612): n is a, c, g, or t
  misc_feature (619)..(620): n is a, c, g, or t
  misc_feature (622)..(622): n is a, c, g, or t
  misc_feature (628)..(628): n is a, c, g, or t
  misc_feature (634)..(634): n is a, c, g, or t
  misc_feature (636)..(636): n is a, c, g, or t
  misc_feature (643)..(787): n is a, c, g, or t
  Peptide Sequence Number=SeqID_9718
  Probeset Number=SeqID_11988
gtctctcatttgaaaccctcgacagcacttcaacccctttgagaaccaaaagttcctcgttcgccgcttcagcctctccttgacggtgcttcatcctctcctctcctcaccataggttcctccctcgccgctttagccttcatcgtcattggcatttggcaagctcaaaagtccgtaacctgaccatagataatggcctctgcataatggaaaagtgaagacacctcaatatataacttggacaagtgaagacactgagtatttcactgatcatagaccattcgaaccagagagattgaaggcgcttcgcatccagtaagcaaagtattatttgaaagntaaaaatgaaacttangatgttnagacnattttgtaattaattgnngggttatattnacttnntttacattttttacnattcatggctnaacattaaatatgcctttaaatntcatnaataatnagcananttcttatggnatnttcggtaaaaaaaaaaaaaaaaagaattnctgcgtgcccngggganccantttnttctngnannnccngccaccgcgggggaagccncctctatttgtcnccttganggangggganatntaaaagcnnggcgggnntnaggtcnaatgcngnttccctnnnnnnnnnnnnnnnnnnnnnnnnnnnnnnnnnnnnnnnnnnnnnnnnnnnnnnnnnnnnnnnnnnnnnnnnnnnnnnnnnnnnnnnnnnnnnnnnnnnnnnnnnnnnnnnnnnnnnnnnnnnnnnnnnnnnnnnnnnnnnnnnn

SEQ ID NO: 2210 - DNA, 648 bp, Glycine max
  Probeset Number=SeqID_11989
gagatgtggggggggttcaatttttaaaccccctgtttttttttcaggggtttgtgaaggttgagaataaaaaggaggggggaccgaggaaagccggggttccgggaaccccgggaaaaccccctccggtttttttcaaatccatttggggggagggcgggttgttgtcaaagctcaattttggggttggttacagagggatacttgcttgtttagaggggtatatgaatattgccaaggggccggcagggggattcgtcaatgggcaattgaagaacaagtatggggggggtttcatccgggggaataatgttttttcccttagttcctcaaagagggctttaaaaaaggggggtttgaaagtataggaatctgaattttttggttttgtttttgtttggaagacggtttttaattttaaaagctttttgggcggcccttttgttgcaactttagttttttgtaactgattttccccgggttttttttgaaggtaaaacggtatggcccgtttgtaaaaagcttgttgacatattttagtagaaaattttatcccgttttgggaaaaaaaaaaaaaaaaaaaaaaaaaaaaaaaaaaaaaaaaaaaaaaaaaaaaaaaaaaaaaagaagaaaaaaaaaaaaaaaaaa

SEQ ID NO: 2211 - DNA, 1874 bp, Glycine max
  misc_feature (34)..(34): n is a, c, g, or t
  misc_feature (48)..(48): n is a, c, g, or t
  misc_feature (126)..(126): n is a, c, g, or t
  misc_feature (131)..(131): n is a, c, g, or t
  misc_feature (135)..(135): n is a, c, g, or t
  misc_feature (147)..(147): n is a, c, g, or t
  misc_feature (205)..(205): n is a, c, g, or t
  misc_feature (210)..(210): n is a, c, g, or t
  misc_feature (236)..(236): n is a, c, g, or t
  misc_feature (243)..(243): n is a, c, g, or t
  misc_feature (303)..(303): n is a, c, g, or t
  misc_feature (341)..(341): n is a, c, g, or t
  misc_feature (378)..(378): n is a, c, g, or t
  misc_feature (413)..(413): n is a, c, g, or t
  misc_feature (459)..(460): n is a, c, g, or t
  misc_feature (465)..(465): n is a, c, g, or t
  misc_feature (524)..(524): n is a, c, g, or t
  misc_feature (526)..(526): n is a, c, g, or t
  misc_feature (543)..(543): n is a, c, g, or t
  misc_feature (594)..(594): n is a, c, g, or t
  misc_feature (659)..(659): n is a, c, g, or t
  misc_feature (672)..(672): n is a, c, g, or t
  misc_feature (690)..(690): n is a, c, g, or t
  misc_feature (696)..(696): n is a, c, g, or t
  misc_feature (719)..(719): n is a, c, g, or t
  misc_feature (726)..(726): n is a, c, g, or t
  misc_feature (760)..(760): n is a, c, g, or t
  misc_feature (775)..(775): n is a, c, g, or t
  misc_feature (785)..(785): n is a, c, g, or t
  misc_feature (790)..(790): n is a, c, g, or t
  misc_feature (792)..(792): n is a, c, g, or t
  misc_feature (804)..(804): n is a, c, g, or t
  misc_feature (892)..(892): n is a, c, g, or t
  misc_feature (1037)..(1037): n is a, c, g, or t
  misc_feature (1043)..(1043): n is a, c, g, or t
  misc_feature (1056)..(1056): n is a, c, g, or t
  misc_feature (1125)..(1125): n is a, c, g, or t
  misc_feature (1130)..(1130): n is a, c, g, or t
  misc_feature (1132)..(1132): n is a, c, g, or t
  misc_feature (1138)..(1138): n is a, c, g, or t
  misc_feature (1141)..(1141): n is a, c, g, or t
  misc_feature (1143)..(1143): n is a, c, g, or t
  misc_feature (1149)..(1149): n is a, c, g, or t
  misc_feature (1151)..(1151): n is a, c, g, or t
  misc_feature (1199)..(1199): n is a, c, g, or t
  misc_feature (1207)..(1207): n is a, c, g, or t
  misc_feature (1250)..(1250): n is a, c, g, or t
  misc_feature (1305)..(1305): n is a, c, g, or t
  misc_feature (1308)..(1308): n is a, c, g, or t
  misc_feature (1319)..(1319): n is a, c, g, or t
  misc_feature (1364)..(1364): n is a, c, g, or t
  misc_feature (1394)..(1394): n is a, c, g, or t
  misc_feature (1398)..(1398): n is a, c, g, or t
  misc_feature (1447)..(1447): n is a, c, g, or t
  misc_feature (1459)..(1459): n is a, c, g, or t
  misc_feature (1465)..(1465): n is a, c, g, or t
  misc_feature (1477)..(1477): n is a, c, g, or t
  misc_feature (1503)..(1503): n is a, c, g, or t
  misc_feature (1554)..(1554): n is a, c, g, or t
  misc_feature (1556)..(1559): n is a, c, g, or t
  misc_feature (1561)..(1561): n is a, c, g, or t
  misc_feature (1564)..(1564): n is a, c, g, or t
  misc_feature (1589)..(1589): n is a, c, g, or t
  misc_feature (1592)..(1592): n is a, c, g, or t
  misc_feature (1644)..(1644): n is a, c, g, or t
  misc_feature (1656)..(1656): n is a, c, g, or t
  misc_feature (1659)..(1659): n is a, c, g, or t
  misc_feature (1699)..(1699): n is a, c, g, or t
  misc_feature (1710)..(1710): n is a, c, g, or t
  misc_feature (1717)..(1717): n is a, c, g, or t
  misc_feature (1724)..(1724): n is a, c, g, or t
  misc_feature (1763)..(1763): n is a, c, g, or t
  misc_feature (1769)..(1769): n is a, c, g, or t
  misc_feature (1772)..(1772): n is a, c, g, or t
  misc_feature (1776)..(1776): n is a, c, g, or t
  misc_feature (1780)..(1780): n is a, c, g, or t
  misc_feature (1784)..(1785): n is a, c, g, or t
  misc_feature (1787)..(1787): n is a, c, g, or t
  misc_feature (1792)..(1792): n is a, c, g, or t
  misc_feature (1794)..(1794): n is a, c, g, or t
  misc_feature (1797)..(1798): n is a, c, g, or t
  misc_feature (1801)..(1801): n is a, c, g, or t
  misc_feature (1804)..(1804): n is a, c, g, or t
  misc_feature (1807)..(1807): n is a, c, g, or t
  misc_feature (1828)..(1828): n is a, c, g, or t
  misc_feature (1831)..(1831): n is a, c, g, or t
  misc_feature (1836)..(1838): n is a, c, g, or t
  misc_feature (1842)..(1845): n is a, c, g, or t
  misc_feature (1847)..(1847): n is a, c, g, or t
  misc_feature (1849)..(1849): n is a, c, g, or t
  Peptide Sequence Number=SeqID_9719
  Probeset Number=SeqID_11990
tatatatatagaatataagtatatgataatatantctgtgaaggagtnatagtaatagaatacaatagtgtcatatacaccatataagcagtgagagagtgatgcccttgcacagtatacacagtntatangagnttattatcaatnatcaacataacgactataatactaatgtaacaatgataaattatatattcatcatacnagtgnaagacagcgatcgtagcgtctctccnatcttcntgtgtgtctcacagtcattcgtactgcactgtatactgtagtctcagcacgctataaatncatatgtcagagagtgtgatagcagaacgattcgactnacgagcgcgtcgaccggcacggttatgctatgattgnatatattatcacatattactctacgtatgtcaatnatattcggcacgttgagatcatgctaaagcaacacacacgcccaanncgtgncactcttacgcatctaccttatagtgtgcatgcgtgagactgtagtgttgtgctatatntnatgagactactagttantatcagatatgatattatctaaatcagtgtcacatgacatatagtactacnaacgacaattaggtagtcacgcgctcacagtatgactagtatatattactatatgcactcgtgtntattatatcatgntagtctttcgatgccctntatagncgtgtttcagatgttcggtcgtntcgtctntgtcgttcgcgctgtatggcttgcttatagttantttctatctctctgntggttttcgncgtgnantgctagagatanctagaatagtgctggacttatgatcatagtttgtgcagtattgtatttaatagtacatttgattatagttgttctctatctatgctantctatattcgtcagtcgatatctaagcaacataggacgtgattagtctagatacatcactcacgagcaattcggactgtcgagacacgcgagatcgaagacgcacagcacgtccacgcatacacactacagtgcagcaccgagtnatgacnctcgatctacgancctctcctatcagtacctagtttatgtgagtatgtgagtcgtgcgtgcgtgatatcagcgtgactatgntggtntnttttgntangntgtggngngcgttgattgtgtatatagtcgtgtgtatgtagtagtgtgtgtgtgtntgctagtngtcctctttcttgtgtcgtgctttttctatcatagtatgatanactatagatatcatgagtattatatatacacatcgtacatatagttgtgtatgtnagntcgtaatacgntcgcttatgatcttgcgtctgtaggtgtgctacggagcgatgcantggtagtctgctcgagtgtacgatccgcgnaagnataaatcaatacgactctaagtcgactaggtacgcaggtgcgcatcgtngccgtctgtagnagtgcnctggttgcatgnctccgcgcatacacctcctctcatcncctgcgatctctcacagcgtgacagcgtactgacagtagtctctcactctngnnnntnttnttcgtgtttcctctctcgcgtcgtnctntactcactatcgttctctatacctgtcactcttctctctgttgtgcgctctncgctcatcgtgntcntctgctttagtaacactagtcgctagcatctgtatagatnattgtatcgcntggcatncgcgctntacgactacgcagcagagcgacctcatcgtgcgtccccngcgacngangtgngcantggnngngggcngncgnnggncgncgntttgtttgtgtgtagttttgngtnttttnnntttnnnntntnctgtgctgtctcgctctccctttct

SEQ ID NO: 2212 - DNA, 601 bp, Glycine max
  Probeset Number=SeqID_11991
actcttccaatttgtttcacaggttttataatgacagcactagcaactgtattaaagaggtaaagaatgtaaagctcatgtttgttactagactatacatgtaccttcaaactggtggatggtctataattttgttatcgagagagcctagaacacaccgaaatgtcaccattaatcatcttgactcagcgggacttagaagttggtctgccttgatgatgagagcagaagattcagatcctaccaaagggtacgagtacttttctaggcaaaggaatttgataaggaagaagagcttccgaatagaaagtatcataagcagccatatgaatgccgggacagttccggagaccggaatgcggaatttgtgcttccagaccgtgtatgttacaagtgtgaaaacgggaggagcatagatactaaccttagttgcatgattcatgctcataaagagagttcattcattagatagggtcttatctctgatgaaagttgttctccacttcatttaccggattctacgtgattgagcttgactcaagcatgaaatactgtgcagctaaaagtgaggttgtggtgtggatcgttgccgccctatgta

SEQ ID NO: 2213 - DNA, 1500 bp, Glycine max
  misc_feature (31)..(31): n is a, c, g, or t
  misc_feature (335)..(335): n is a, c, g, or t
  misc_feature (526)..(526): n is a, c, g, or t
  misc_feature (775)..(775): n is a, c, g, or t
  misc_feature (925)..(925): n is a, c, g, or t
  misc_feature (987)..(987): n is a, c, g, or t
  misc_feature (1036)..(1036): n is a, c, g, or t
  misc_feature (1068)..(1068): n is a, c, g, or t
  misc_feature (1102)..(1102): n is a, c, g, or t
  misc_feature (1104)..(1104): n is a, c, g, or t
  misc_feature (1147)..(1147): n is a, c, g, or t
  misc_feature (1152)..(1152): n is a, c, g, or t
  misc_feature (1200)..(1200): n is a, c, g, or t
  misc_feature (1211)..(1211): n is a, c, g, or t
  misc_feature (1218)..(1218): n is a, c, g, or t
  misc_feature (1283)..(1283): n is a, c, g, or t
  misc_feature (1407)..(1408): n is a, c, g, or t
  misc_feature (1421)..(1421): n is a, c, g, or t
  misc_feature (1429)..(1429): n is a, c, g, or t
  misc_feature (1433)..(1433): n is a, c, g, or t
  misc_feature (1442)..(1444): n is a, c, g, or t
  misc_feature (1446)..(1446): n is a, c, g, or t
  misc_feature (1463)..(1463): n is a, c, g, or t
  misc_feature (1488)..(1488): n is a, c, g, or t
  misc_feature (1490)..(1491): n is a, c, g, or t
  Peptide Sequence Number=SeqID_9720
  Probeset Number=SeqID_11992
ggaggactggcgtcgcataccagtagcgatngtgtaagtcggaggcgacggcggtgctgtacgagcgcgtcatgtgtagtaggcgtctaagtgtaattatatgatgtgtagtatagttatgtaagctattcgtcattcagtgatcagtataagttacgtgagtatattaatattgttaatctactcacatgaacatagtaggagcgtaagtatatagaatgaattcatatatcggagttacatatatacgctcggacgcgcgtgtgcgagagagatagttgctctgattgacgtgacgaggcacgcggtggtaagtgagggcggttgtgtagcantacatgatggttagagatcacatttaatataacagtatcttagagcatacaatataccacacatagatcagaaagtgagatgcatatagatcgtccacacacattcttatgcgtaagagcagggatcaaggtcgcacgctagagcgtcgtctacgtagcttggtgtatggcgatgcgaggctattgccctngagtagacgcgccaggcgctcgcgtcccgtggcgcgatgtgcacaccgcagtcgcaacgtggtccaacgtaggaccgcgcgaggacgcagacgagcgagaatcatcgacgtcgcggcggccctagacagcgaggggcacattggatgctcgcgcgaagtgtggtagcgggagtggaagtcggcgatgtacgacattcagacgcagtgtcgttacacgagtgacgcgcacgagacaaaatatcgccagcntagccattcaccacgacagcacatagacaagagtcaagcactcacgcacagcgaaacaatgcagcatacaaacgagagtcagcggaagcgcgcgggacgtggcgagcgagcgggagacgcgcagcgcggagagcgcagcagcgaggcgangcgagcatgcgcgcgtgtctagacgaacgataaagacgatagcagtgcggcagggcgtccgncatgcacctatcacatatacctatacactcacaatacacacgtcccaangcagcttcgcgtggttcatctgtgtaggctgnacaggagataggtgagaggagtgcgtcgagtctngngtactattaagtgatagttatatgtttgagatatgtactctangtagntatgtgagatgtgtcagtagatatatatatagagatctggctattatntaaatatatcntcatcgnagattaatattacactcacatcacggttagagtctcgatatagtagtcacactcctacacacacnatatccatactcctcgtccacgctatacacgcgcgagacacgcgcagcacgcgtccacatgcatacacaaacaaaccgacaccactacaaccaacatctcattacaatcacccggacgaactgnnacgaaatatatantaagtatntatnttttatttnnntngatttattgagtgtgtntgataggtgtaggagagttagatantnnaccataata

SEQ ID NO: 2214 - DNA, 1412 bp, Glycine max
  misc_feature (1)..(1): n is a, c, g, or t
  misc_feature (94)..(94): n is a, c, g, or t
  misc_feature (153)..(153): n is a, c, g, or t
  misc_feature (1404)..(1404): n is a, c, g, or t
  Probeset Number=SeqID_11993
ntatgactgccgttcgacgcgtgcataataactcaccttccgcgaatgcgatatattcgaattgttgcagctctcacaactgcaacatataagngccacaagtacggcacttcatactgcacactcgtacgtgcacttgcagataaaggtganatagcgctctctcgcttgatgcttcctcactcttgtccaccgctacagacgaacaaagagccatatttatctgagtcgatgatgctcccagtgtgcttgcagtgcacgatcacgggaggagaatactgcgcaatcataacggacaaatctaacccgcacttgcacacttatacaccaacgctacaccatcacgcccacctacgccgcagtcgagcactccgatcgccatgcggtttgcgtaccccgcagccgcatctaccctagcgcgcgactgtcgacatcgaaaacacttttcatgctcacgcgataatccgaatcatgtacctcctgcctatcttcgaagcgcgtgctaccgcagctcgcactgaccactgcagtgtacattactccatcccttaacggaatcgcacatgtagaaggcaagaaagaagacaaaccgcgactctgagccacgtcacatcgccggtctacccatccccgccatcgtctgctctccactcgctgcctcttccagtcaactgacatcagattaccaatgaataattgactggtcacacacaacacaactaaaaacagagagtgcaccctcatccctctttgagatcgcgctgaagctcgcagccaaaatctcactatgatagatcataaactgcacggcgagtgagtagatcgacctaaccgatactcaattatgccctcttgccgtcattccaccacttatcaccatatatcaccttctcctctctcttaccatctactcttccacacaatcttatcctactctggttacaatatgctaacccctccccatgtcagactggataatagagccagtgaggttatccggcagagtcactccgctcgcgtcccttcaactgcattacagcggaagatgagctgataacagagtaggtaacgctgaagtataagagaaagatcaaactaacctatgcaggttgacacgaggatcaaaacaaggccggtcgagaagtacaggaaggagacacgagagaaaagggggacccctccacacaccccgcgcgacccgcaacggactctgctcttctctatctcactctctgtgagtctcgtcatcatagaaactctacactgaaacctactaggtgctagatctacataacatactaccatatacaatatcagttataaaccatctactccaataatcccttctcgcgcgcaagacacagagctacttacggtgcggcctagtggggctatagcagaagnagatagca

SEQ ID NO: 2215 - DNA, 359 bp, Glycine max
  misc_feature (100)..(100): n is a, c, g, or t
  Peptide Sequence Number=SeqID_9721
  Probeset Number=SeqID_11994
acctagcgctcattccgcctccttacgcatctctcttgcgccgctctcgcccgctcggggcggagctcactggccaccggccagccgccgacggcgaatntgcccggcgcgacgcactctttctcttccctctttcttcctccctccagcttcccttttctgttgtagagaggactaggggcgagcccctcctctgatctgtcgctctgtcccgaacgcgtgggcatcgcgcagcgccagcgctccggcgagggcgtcaacgaccatcgcgcgaggttggacgcttctttccccatcctctgtgcgtctgtccaccgcgtcgcggagggagaaagcgcgagccaagcccacttctgctc

SEQ ID NO: 2216 - DNA, 1967 bp, Glycine max
  misc_feature (6)..(6): n is a, c, g, or t
  misc_feature (8)..(8): n is a, c, g, or t
  misc_feature (15)..(15): n is a, c, g, or t
  misc_feature (37)..(37): n is a, c, g, or t
  misc_feature (44)..(44): n is a, c, g, or t
  misc_feature (49)..(49): n is a, c, g, or t
  misc_feature (51)..(51): n is a, c, g, or t
  misc_feature (70)..(70): n is a, c, g, or t
  misc_feature (131)..(131): n is a, c, g, or t
  misc_feature (159)..(159): n is a, c, g, or t
  misc_feature (221)..(221): n is a, c, g, or t
  misc_feature (237)..(237): n is a, c, g, or t
  misc_feature (253)..(254): n is a, c, g, or t
  misc_feature (306)..(306): n is a, c, g, or t
  misc_feature (314)..(315): n is a, c, g, or t
  misc_feature (317)..(317): n is a, c, g, or t
  misc_feature (320)..(320): n is a, c, g, or t
  misc_feature (323)..(324): n is a, c, g, or t
  misc_feature (411)..(411): n is a, c, g, or t
  misc_feature (424)..(424): n is a, c, g, or t
  misc_feature (479)..(479): n is a, c, g, or t
  misc_feature (486)..(486): n is a, c, g, or t
  misc_feature (533)..(533): n is a, c, g, or t
  misc_feature (536)..(536): n is a, c, g, or t
  misc_feature (538)..(538): n is a, c, g, or t
  misc_feature (571)..(571): n is a, c, g, or t
  misc_feature (601)..(601): n is a, c, g, or t
  misc_feature (680)..(680): n is a, c, g, or t
  misc_feature (701)..(701): n is a, c, g, or t
  misc_feature (703)..(703): n is a, c, g, or t
  misc_feature (705)..(705): n is a, c, g, or t
  misc_feature (826)..(826): n is a, c, g, or t
  misc_feature (852)..(852): n is a, c, g, or t
  misc_feature (916)..(916): n is a, c, g, or t
  misc_feature (918)..(918): n is a, c, g, or t
  misc_feature (920)..(920): n is a, c, g, or t
  misc_feature (1042)..(1042): n is a, c, g, or t
  misc_feature (1110)..(1110): n is a, c, g, or t
  misc_feature (1272)..(1272): n is a, c, g, or t
  misc_feature (1406)..(1406): n is a, c, g, or t
  misc_feature (1613)..(1613): n is a, c, g, or t
  misc_feature (1619)..(1619): n is a, c, g, or t
  misc_feature (1741)..(1741): n is a, c, g, or t
  misc_feature (1844)..(1844): n is a, c, g, or t
  Probeset Number=SeqID_11995
atatcncntacacancgcgtcgtagcatgacggtttngatcgantatgntngcctcactcgtatgtttgntatatattagtcgttgtcgatgtgtcggggctgcgtcgcagatatcagcgagagcaaacantcatctacgcattgttcagtctcgcganctgtgatatcgtactcgtgccatctctgcagtcatcgtatgcacagacgtcagtgctgcgantgctcatcagcgtgtncacgcatatctgcganntaagttcgatagtcaacactcgatcgctgaactctatgcgtcaccatctcanacgacacnncnagngannagcgatgtgtaactatagcagtctaagtcactacagtgtatcgcatatcacttactgtaacatcataggatgtatcgtcgtgtatangacgacagtcgtntaggtgtagtgatgatagacatcgtcgctgtttgccgcaccgcattatttatagncaacagntgttgatgatgtcgctactaatcatactatgtatgtagtctcgatanagngntgctgattagacatgtatgaggcgtggagtacnagcatggtgctcttatgagtcgtttaggantctctcacttgttaatgcactttcatacgtactacgtatagtttagcattctcagtacgtatcgagtgatataagcagngagtctcatcagatgtagtgngnanagtcgtagttgatggatttgagtactatgtgcgttgagtgctgtgtgtgctccatcttgcactgtcacaggcgatgactctctgcatcttgcagatagcaacgcatcaacatccgcgtganaactcgactctctacacatgctagangcatctcctcatgatgcacgcgatatcatcgttatgagtaatagtgtatcgactcgactagatngngncgacttactacttctgctcgatagtagacgtatatatgtataatatattcacgacgattgtgcacgtatcttcgtatgtcagtatatgtagaattatacgaaatgacgatatgtagcgaatngtatcgtgtgtgaatgtgtatggatcgtaacgcacgcatagtcgccggctgcgcattgagtatgcatnctaccttcgtcggtactgcatcggtcaagctacagtacaacgtagagtactgtctgagtcagttctgtatgtattatattatcaatattataatgcaatatatacgcagtatgtatcatatcacattcattcaatatgtatagatgtgttgttagtattgantcttacgtcagtcctcactcacacgcgtagtctccattgtcaatgatgcgaggtcttacacatctatactcgtcaggagatagtgtcgatagtaatgagatgtagtgcagatcatagctcatacgtgagtgagnccgacactatctgacactcgcagtagcgcggtctacctgatacatatacggatatagaaggtcatcatctatcatcttcacgtatataatcatctatatatgactatatacataacatctggctcaagtcaactatcacctccgactacgtacctcgaggacggtgttggaagagagacataataggaccaattaagaggcataatngcaganagtaaagttatgagatcgcgtagataatatggcgtgtgagagataagagaatatcatatcacatagtgtagtctgattatgtagatatcgatctgatgagaagtcgaactctggagggtgangtgcgtctaacatatgatatgtggaagtaatatatacagccagggccacgcgcgagaggactatctgcgtactgatgacttctcagtatacacccctatacanctcctcctactcgtctatcaccagaattacactgacgagtgtaatatcatcactatacgcgtgcacgagtagtaggtgagatgaggaggagggagagagatatcgtagtatcataatagaaaa

SEQ ID NO: 2217 - DNA, 233 bp, Glycine max
  misc_feature (43)..(47): n is a, c, g, or t
  misc_feature (184)..(189): n is a, c, g, or t
  Peptide Sequence Number=SeqID_9722
  Probeset Number=SeqID_11996
agctcggtacccctgaaaataactgcataaggaacattccttnnnnnggatgacccaaagataaacgcattgatgcaacaagcagagttattaagttcactagctctaaaagtagatgcagagaatatggaccaaagtcttgaaaatgcatggaaggtgaggcttgatagtcttaatggctttnnnnnntatgataatttcgcagatcagcttgttagcatataatcaaatat

SEQ ID NO: 2218 - DNA, 754 bp, Glycine max
  Peptide Sequence Number=SeqID_9723
  Probeset Number=SeqID_11997
caccaaaatgtcgtcttcttcttcttcttcttcctcctctgcttaaacctcattagtttaatcctaacgaacaaacagatcagagaatcgaacgagtggtccaacgctatgattcgtatcctccaaatctcgatcctctgtttcttcctcgtcgccgggatctcgatctcctcctcggaagaggaggaggagactatctacaagatcctccaggacaacggactcccgtcggggatattccctaaaggcgtgacggaattcaccttcgacggcgagacgggacggttctccgtttacttgaaccagtcgtgcgacgccaagtacgagacggagcttcgctacgacacgaatatcacgggaacgctgagctctgctaacgtaactgatttgtcgggaatatcggctcaggatctgttcctgtggtttccggttaaagggatccgtgtcgatgtcccgagctcggggcttatatacttcgacgttggtgtcgttcgcaagcagtactctttgtctgtgttcgagacgccgagagattgcgtcgcggttcgtcgtgaaaatgaggttgaatcttctgtgttgtcattgcatcgagtagatgaaactcttgggagaaacgttatttagccgtggagagttttatttaagaaatgttgttatactatacaccaccacaaagatagacagattgtcctctcatcaaaattcttgtactgttctttttggtctcaaatcttaaaaagcttgattcaaagtc

SEQ ID NO: 2219 - DNA, 1585 bp, Glycine max
  misc_feature (76)..(76): n is a, c, g, or t
  misc_feature (176)..(176): n is a, c, g, or t
  misc_feature (212)..(212): n is a, c, g, or t
  misc_feature (297)..(297): n is a, c, g, or t
  misc_feature (301)..(301): n is a, c, g, or t
  misc_feature (346)..(346): n is a, c, g, or t
  misc_feature (358)..(358): n is a, c, g, or t
  misc_feature (404)..(404): n is a, c, g, or t
  misc_feature (426)..(426): n is a, c, g, or t
  misc_feature (453)..(453): n is a, c, g, or t
  misc_feature (455)..(455): n is a, c, g, or t
  misc_feature (514)..(514): n is a, c, g, or t
  misc_feature (601)..(601): n is a, c, g, or t
  misc_feature (665)..(665): n is a, c, g, or t
  misc_feature (854)..(854): n is a, c, g, or t
  misc_feature (971)..(971): n is a, c, g, or t
  misc_feature (983)..(983): n is a, c, g, or t
  misc_feature (1110)..(1110): n is a, c, g, or t
  misc_feature (1239)..(1239): n is a, c, g, or t
  misc_feature (1257)..(1257): n is a, c, g, or t
  misc_feature (1259)..(1259): n is a, c, g, or t
  misc_feature (1347)..(1347): n is a, c, g, or t
  misc_feature (1383)..(1383): n is a, c, g, or t
  misc_feature (1422)..(1422): n is a, c, g, or t
  misc_feature (1455)..(1455): n is a, c, g, or t
  misc_feature (1457)..(1458): n is a, c, g, or t
  misc_feature (1468)..(1468): n is a, c, g, or t
  misc_feature (1492)..(1492): n is a, c, g, or t
  misc_feature (1511)..(1511): n is a, c, g, or t
  misc_feature (1518)..(1518): n is a, c, g, or t
  misc_feature (1524)..(1524): n is a, c, g, or t
  misc_feature (1572)..(1572): n is a, c, g, or t
  Peptide Sequence Number=SeqID_9724
  Probeset Number=SeqID_11998
agacctctcccaccccaccttacatattatccatatatctaacttcgtcgcacataatatgatagggagacccganaactgccaatgacacaaggcgtgtggcggacgtcctcaccctgccgggtttgaggcggaggcctgcctctcctcatcgaaacatcatgatgtcgcatacnccccaccgagcgggcctgacgaaggagaaatatccncatatatatctctcctctcttcttctgtctctagtggcgatctagaagtgctctctctatattctgacgcgagcatccaagcgantaantctttttactcgtacataagcgtcttactcagatctacatgggcnatactctgatanacgtgattgacatgacagtaccacatttgtgcactccacagccgcntaggatacccaccctggtacangcggaaagagagagatatacatgcgcntncgctatagaatatacatagagcgtgtactcgcgagagtatctgtacaccacatcacacnctgcgcagccctcacccgcagatatagtgtacataagacccgtcaagacaactcttgcccacacgcacgcatgctcatgcatcagtnttctatcacagactaactctctaggtcacccatcctgactcggagcgcgtgtagagagagaagnagacagagagcaggcagccagttgctcacactctctcagtcgatcgaccgttactcgctctacatgctcctacatagtctatgagtaggtgtagtatatacagtatggtgaacgttctgcgtctgtaaggccacctatctctagtcggcaatctcctgcgaataatctctcaggctcgatctattgcgnctcatttccgacctcccacacctctactcggacgcactacgtacgtatgtctctgaagtgtccatcagacgtacccgcctaggatcaatagctcgtacgaaaagccacactcgtggngatgtagccgancgccacgccttgcgaaacgactgatggaatatgagtctgcgcttcacaagacgagacgctccgcgtgtcactgtgttcatactgaggagatacaacttagataatacgtaaataccactcgaactgncacgttctactctggtccacacacttgtgacgaacggacagtactctcctctcactccgcggtaggctcacaccctcgccgacatatgcgtttcgaacgcgaaagcctggagatatgagtgtctcacgncacgcgcctatcgcaccnanccctgcgtaagactatagcatattacatcactccgccgacaccctcctctatctgccgatctgacacagaaccgatgacgctgcaacngaagactccgtatataggactcgacgcacccggcangcagtgcctctagactgcagtgtgtgtctcaattgacanagcactcacgataactcgtgtactactcagccncnncacacgatancgctgcgcgatccgcgccatatancacgagtcgtcacgtcctnacgccgntctacngctctctactgtagacgagctcatgatgacacgtagtactgtacacgntgcacgacacaca

SEQ ID NO: 2220 - DNA, 531 bp, Glycine max
  misc_feature (485)..(485): n is a, c, g, or t
  Probeset Number=SeqID_11999
acagcaagcactcaacctcccactcccggcgcaccaacccactgccaagctagctacgcgcacgagctctccatggccgcatcggtagcctgcgccttcttcttcgacgccgagccggtcggcgagcccggcgtgcacgccctggacgcgtgcgcgctctgcaccaagccgctggcaagggacagcgacatcttcatgtacagaggggacacgcccttctgcagcgacgagtgccggcacgagcagatgcagctggacgccgcctgcgccaggcaggcggccagggcggccgcccggaggcagaagcagttctcttcagcaacggagtccgggcgtgcacgccgggagtcctgggaggtgtccgtcgcgagctaagcggcgagagtggcagagaccgtatgtacttgagctaacaagctccgcatggaagaagctgccgttgccctatcagcgcgagatcgaggagactctccttggttgaagangcaagacgcgggctatcggactctcttacggcagcgttggcaggcc

SEQ ID NO: 2221 - DNA, 480 bp, Glycine max
  Peptide Sequence Number=SeqID_9725
  Probeset Number=SeqID_12000
aattgctctagaaaatttatactctctcaaaaaatgccaaagatcatgtggaagagcctccatctttgcttcccgtcaaatctcaccaaatgctactcttcgccgtgccttcctccattggccgccgccgctgctgaggacgacgatcccagccgtccctctatcgttctcatcaacaacttcaacctactctaccacaacgaccacaacaactatcaccaccgtgtcgttgacttaccttcctcatccaccgccaccaccttctcctcttctgccacgtcatcatacgaatccgagagccaagacatttctcctgaattatccgccgctttcgcttcccgtcgcttcttcttctcttcccctggccgatcaaatgcaatcaccgactcaccggaaacacggtcaagagaactctctgataatagcgacagtgccacgaccaagacaccaaagaagacgaagtacgacactagcatgaac

SEQ ID NO: 2222 - DNA, 1344 bp, Glycine max
  misc_feature (113)..(113): n is a, c, g, or t
  misc_feature (326)..(326): n is a, c, g, or t
  misc_feature (489)..(489): n is a, c, g, or t
  misc_feature (507)..(507): n is a, c, g, or t
  misc_feature (866)..(866): n is a, c, g, or t
  misc_feature (1069)..(1069): n is a, c, g, or t
  misc_feature (1297)..(1297): n is a, c, g, or t
  misc_feature (1317)..(1317): n is a, c, g, or t
  misc_feature (1319)..(1319): n is a, c, g, or t
  Peptide Sequence Number=SeqID_9726
  Probeset Number=SeqID_12001
ttttgtattggtgcgtgtaggagttgtttgtacgcgccacgctgtttcttgttcgacgagcgtcgagatatgttgttgtgtgtatctcgcgctccgcagccacactattgttntctctcacccgtgcgtcgtcgcgcaccatgatttatatgcacaccgcaccaggcagcgagagttgtcagaccgcgcagcccgagggagagcgcgagttgaatatgtgacggaagagagagtagggacagctgatagttccacacgcgtcggtagcacgcgatattatagatcaagacagaggaagggcaagaagtaataacaacgacccacangaagtgtatggacgacgacggaggaagagaagttgcgatagagtggtgcaggcggcgcgcaggagcgggcggcggcgcacacggcgtcgttttgacgatagtattgtatgtagagtgaaccgcaacgacccgccggatgtatcacgcatatattgatacagtntgagctatgacaccgtanttagagtacgggcacgggtaggcggcggtatgtacaggcgcaaggactcaagagagagagcaatgagttatttgcaccgaacaggacgggggtgttgtttattgacacgacacacacatatatgtttggggtggtggtgggggggtttttttggggtgcacacacatattgacacgcacaacccacaagagagtttaagaccccgcgcagagtgtgttcacgaccgcggagagagaagatgtagaggagagggaagagaggggaaaacgaatattttatgtcaacacccaattttttgttagatgcgcacatatcagcagatgaaagagaggacgtaggcgatatttgtttcgcgcgcnacgtgttgccgccacctttatatccccgccgtatattttggcgcaccaccattttatccccacccatatatttattcacacgaccccacagccacacgacgcgtgttatattacccccgctcttgtgttgcccccccatctttatgagtgagccccagattttttcgcgccggtttgtatccccccgttttttttcccacacnttttaatcccgcctgttctgttttcactattggtgtaccgcgctcacccagacacaccccccaccgttatcttgcgcgtccgccaaacattggtgtggcgcacaaaattttctacccttctctttctcccgtggtagatccccataatgatatacaggaggcgtgtcccctccattatttacagacacacccctcagtttgtttttagcggggggtcgtcgcggtcgncggttgttttccccccatananaccacacaatcaggggaataacccc

SEQ ID NO: 2223 - DNA, 513 bp, Glycine max
  misc_feature (62)..(62): n is a, c, g, or t
  Probeset Number=SeqID_12002
acacaacatcttcctctgtactcaagaagacttcaccaacttttcttcttcaatcgacgatnagcaccggcgcaggaagcggcacgaccaaaggcggtagaggaaagccaaaggccaccaagtccgtctctcgttcttcaaaggccggtcttcagttccccgtcggaagaatcgctagattcctcaaggcaggcaaatacgccgagcgtgtcggcgccggagctccggtctatctctccgccgttctcgagtacctcgccgctgaggtgttggagcttgctggaaacgcggcgagggataacaagaagacgcgtattgtgccgaggcacattcagctcgcggtgaggaacgatgaggagctgagtaagcttctgggagctgtgacgattgctaacggtggtgttttgcccaacattcattccaaccttttgccttccaaggttgggaagaacaagggagacattggatctgcttctcaagagttctgagtttcatcttggtctctcttttgtt

SEQ ID NO: 2224 - DNA, 1512 bp, Glycine max
  misc_feature (1)..(1): n is a, c, g, or t
  misc_feature (1120)..(1120): n is a, c, g, or t
  misc_feature (1224)..(1224): n is a, c, g, or t
  misc_feature (1292)..(1292): n is a, c, g, or t
  misc_feature (1365)..(1365): n is a, c, g, or t
  misc_feature (1381)..(1381): n is a, c, g, or t
  misc_feature (1391)..(1392): n is a, c, g, or t
  misc_feature (1429)..(1429): n is a, c, g, or t
  misc_feature (1431)..(1431): n is a, c, g, or t
  Peptide Sequence Number=SeqID_9727
  Probeset Number=SeqID_12003
nataataaaggttgagccaaggtctgctgttgctgataggctctctacaatgtgtgtccttccgcttctattggctggggttttgagtgctcctggaaaacatgaacaattagcagaatatttgaggaagctgctactagaagaaaattcgatgcagaatcaatcaaccaagcacactcctgagattattaatgctatccgcttcatttgcatatatgaagaaaaccatggtatgatatttaatatactatgggaaatggttgtcagctctaatgcgagcatgaaaataaatgctgctaagttgctgaaagttattgtgccacacattgatgcaaaggttgcttcaactcatgctttgcctgctctaattactcttggatctgaccaaaacctcaatgtgaagtgtgccagcattgatgcatttggtgtagtggctcaacgctttaaaaatgagatgatagttgacaagatacgtgttcaaatgggtgcttttcttgaagatggatcccatgaagctactattgctgtcattcgtgcattggtggttgcagtaccacatacaacagaacgacttagagattatcttttatccaagatttctcaacttacagccgtgcctactgctgcttctagtgatttgatgcttcggcaagaaagagccaatgcattttgtgaggcaatccgggctttggatgctacagatcttcctgcaaatagtgttcgggattacctcctgccagctatacagaacctattaaaagatttggatgcactggatccagcacacaaagaagcccttgaaatcatcatgaaggaaagaatctggggcaagtgttggtggtggtgcaagcaagtcgatggcttctcatcttgggattgcatcatcagtgagcaacttctttggtgatggtggcttgcttggaaagaaagacagcacagaagcacagcaacagcccagtgtcattgtataccccaacaaggctgctgctacatcacaacaacaaccaccaaacactatcaaaaagcgcatcatgctggtacatttcagcgacatactttagcaagggcgaaaatcccccaaattgaaaggtcatcaaaccaataaagaatgcactattcncgccacatggcaaaatacttcatgggaccacctctccacacaacatccctgctcggaatactccaactcccaatacggcccatcataccatctaataccagagnaaagacctcttgacccaaaaacccatgcatcatcggaacactaacatactaccccccaaatactcgangagagacatttttcatttaagacacttccgccatactattcctcatgaagccgagcagcaaacctcacacaangcacataatctctcanaacaatatgnngacactatccgaggcggaattcaccaaactatacggncntgagctactagcccacagaagatcttatttactgtgacgcccggtcgaaccgagaaaataccactatcgatctatcagaaa

SEQ ID NO: 2225 - DNA, 228 bp, Glycine max
  Peptide Sequence Number=SeqID_9728
  Probeset Number=SeqID_12004
ggaaatattctggggagaagagctttatgcttatatggtatatggggctatcataggtggtatagtaacctactatttacgacttattgatcttgaaatatgagatattgaatggagaaggatgatggagaggtgatggttatgtgaactttctgaaagaatttttttctatgagattgataatggaataggatcttaggctagttagatatatatttaaggattaaa

SEQ ID NO: 2226 - DNA, 1621 bp, Glycine max
  misc_feature (25)..(25): n is a, c, g, or t
  misc_feature (84)..(84): n is a, c, g, or t
  misc_feature (86)..(86): n is a, c, g, or t
  misc_feature (112)..(112): n is a, c, g, or t
  misc_feature (114)..(114): n is a, c, g, or t
  misc_feature (191)..(191): n is a, c, g, or t
  misc_feature (203)..(203): n is a, c, g, or t
  misc_feature (205)..(205): n is a, c, g, or t
  misc_feature (228)..(228): n is a, c, g, or t
  misc_feature (254)..(254): n is a, c, g, or t
  misc_feature (264)..(264): n is a, c, g, or t
  misc_feature (285)..(285): n is a, c, g, or t
  misc_feature (292)..(292): n is a, c, g, or t
  misc_feature (386)..(386): n is a, c, g, or t
  misc_feature (395)..(395): n is a, c, g, or t
  misc_feature (398)..(398): n is a, c, g, or t
  misc_feature (441)..(441): n is a, c, g, or t
  misc_feature (486)..(486): n is a, c, g, or t
  misc_feature (520)..(520): n is a, c, g, or t
  misc_feature (535)..(535): n is a, c, g, or t
  misc_feature (555)..(555): n is a, c, g, or t
  misc_feature (584)..(584): n is a, c, g, or t
  misc_feature (593)..(593): n is a, c, g, or t
  misc_feature (602)..(602): n is a, c, g, or t
  misc_feature (606)..(606): n is a, c, g, or t
  misc_feature (608)..(608): n is a, c, g, or t
  misc_feature (615)..(616): n is a, c, g, or t
  misc_feature (623)..(623): n is a, c, g, or t
  misc_feature (651)..(651): n is a, c, g, or t
  misc_feature (716)..(716): n is a, c, g, or t
  misc_feature (982)..(982): n is a, c, g, or t
  misc_feature (1047)..(1047): n is a, c, g, or t
  misc_feature (1052)..(1052): n is a, c, g, or t
  misc_feature (1096)..(1096): n is a, c, g, or t
  misc_feature (1127)..(1127): n is a, c, g, or t
  misc_feature (1145)..(1145): n is a, c, g, or t
  misc_feature (1236)..(1236): n is a, c, g, or t
  misc_feature (1282)..(1282): n is a, c, g, or t
  misc_feature (1401)..(1401): n is a, c, g, or t
  misc_feature (1460)..(1460): n is a, c, g, or t
  misc_feature (1526)..(1527): n is a, c, g, or t
  Peptide Sequence Number=SeqID_9729
  Probeset Number=SeqID_12005
agtgctggaagtatgaatgtgtganagcgatgcgcgcgttaatcgaggaagagaatagtgcggatatcgtagatcgcgagttcngngagatgtcgagtagtgggacgggagnangtactacatacgtggcggtaggcgcgtgtacgattgaagagctgtatctgtagcgacagaggcgtgcactcgatatntgtgcgaatgangntggcaatagtgcatgagtgtagntgcaagtatacgcgtgacggagcgancagacgtctncagcgacgcggtgcaacgtantaggagnacagagagatatagagattgagacgacagttgtgtgggagaggcggccgcggtgcacgagagcaggcaaatatcatatgacgtgagggcgtagntagtgatgnggncgaggtgaagcgtggtacgatctgtgaggtagtgacgtgatanggcgagggtgagtggacgactcaccatgattgtagagggtagacnggagcgtattcagttccatagtcataaaaactcnatcgcgcatacattntgttgttgacacactaaatnaaccaataactacagacacgatcagcacncttcatcgncacgtgcgngtcntntccgganntaccacncgcggtggcgttattttttattacaatnatcaagcacaatgaacgtaatattcaatatacttattagagcgttgttttattttgttgtggtcntcttttcggtgttattatatatacttctacatcaagcaacaacaaaatagatgacagacataacacctagaattgtaagtcgagcgacgcatacttcccacatgtatagtttgatgagtagatgtcatggggtagagaccacgtgtggtgtggtccaccgcaccgcggacgcggtgtgtggtgtgtatgtgctcgcgatgcggaccgcacgcagtgtgtgttcggatataggttatgtatagaagacagagtgtgtgagcatatanagaccaagacacgatctctcgcttaagacttaacgcagtggagtatatattatatcatcagtggntatanttagtatggtggagcgcgacgcgcgacgcgatagtgcagatatncgcattgaatgtcgccgtgtcatggctgagncacacacacgacacgcanagcagacgaaacaggacggggcgcgagagctcgtgtgattgtgtgggacacatcgtgtgtgtggtgagagtgtagtgaggtgcattgcggnccacacagtcctctgcgccaacgcgccggcggcaggtatgacgatncagtcgactccgacgccatttccggcatcagcactccatcacgtcaaatcacacacaggaacacgagatcagccaggtgtgtctagaaaaaggcgaagacacagaaaaggcgaaggcanagcgtgcagagttgtactgcggcagtgagtctgcgcatagtcaggctcgtgtctcactnttcaccaggcgtgactgcagcgctaagcgagggaatcgccgagcgtcacacaggttgttttcgcanntcaccacacgcacgcagcgagtagcgacgcagcacgcgggttcttttggttcgcggcgtcgcgcgcgcgtctgtccgtggtgtgtgtttaccat

SEQ ID NO: 2227 - DNA, 1462 bp, Glycine max
  misc_feature (21)..(21): n is a, c, g, or t
  misc_feature (58)..(58): n is a, c, g, or t
  misc_feature (535)..(535): n is a, c, g, or t
  misc_feature (823)..(823): n is a, c, g, or t
  misc_feature (851)..(851): n is a, c, g, or t
  misc_feature (1131)..(1131): n is a, c, g, or t
  misc_feature (1185)..(1185): n is a, c, g, or t
  misc_feature (1219)..(1219): n is a, c, g, or t
  misc_feature (1275)..(1275): n is a, c, g, or t
  misc_feature (1283)..(1283): n is a, c, g, or t
  misc_feature (1327)..(1327): n is a, c, g, or t
  misc_feature (1391)..(1391): n is a, c, g, or t
  misc_feature (1395)..(1395): n is a, c, g, or t
  misc_feature (1437)..(1437): n is a, c, g, or t
  misc_feature (1442)..(1442): n is a, c, g, or t
  misc_feature (1459)..(1459): n is a, c, g, or t
  misc_feature (1462)..(1462): n is a, c, g, or t
  Probeset Number=SeqID_12006
tgggtgagcgctgcactcccnccacacacccgccgccgccttacaccaatacctgttnttggctcggcttcgtctctgtcttttctcactagtacaatatctttagtttattgctctagagaggaattgtactagtgcgaaatgctcatctacagtccccagcagctgcctccacctccactagccatgaagtccgagacaatcgacgtaagatacaagaatagcgatgccgtagggtcgaacgcggcaagtaactaccagcaagatcacgtactttacactcaccacgtggtttccgctctactcgatgtgtgcatccttgcggagacgtgcgcctagacctcgcgacccttatgttgaatcaatagggcgacctcggatacgcgtataaatctgagaggtcttgagtcgtagtgtcgctatgttatctgtcctatatatatagatgacgatcagaatagtgtgattaataggacgtgtaagaatcactctaaggcgccacaatcggcgactaatcctctgtctacattagtcntcttagtcgttcgaagaggaagatgcgagatacacactttacgcgtgccaccactgtatatctcttcactcatccatggatcggtgtgacgctcgacgtcccgcgcatggtagtgtggtagtgtagatgcaggttagatccgaaagaaagcgtattgtcggctctcacgagactatgaagtgtggagcgatggtgcgagactagctgggtctgctgtgacactgttgtcgtgtagtctcgtacttctcatcatgtcgccacgtagttgtgtgcacgacacacacgtgntgactctacgactagatgcatgtctganaccgagtagctgctcgaggattgtacgcctcacgcgcgtactgggactcgaagcagagatacatgtgtattcgctatacgcatgtgtagagtgatcatcgcaaatcttatatagctgtctctccgctcatgacaacgagtgccacgtcgtgcactcgccgtcgtgacgctctcgtcatgatgatgagatcgactctgctgcgtgcttcgacgcgatcatacgctcactggtgctcgtgtgtgatgcagttagagacgacttaccgatagtgcagactgantaccctgtcgtctaccagttgcctgctagatgagtgaggatggtgtcgctatcnagctacgagctgcatcgtacctgcgtcgtaagcnatctcgccacgagctcggcgagtgcgatagtcactgtactaccttgtcgtcgcacncacgaccncaagatgactaccgtaatcgacttatctcaacatgttggttatnacagttcttgagtgaggtcgcgctgtacggatcgtgatagcagcgcgattgcgtgtctcgcacnctanatctgaggtgaaatgcgcgatctatcatgcgcgagcgctgtntctantcatgacgccaacgcanccn

SEQ ID NO: 2228 - DNA, 1414 bp, Glycine max
  misc_feature (1)..(1): n is a, c, g, or t
  misc_feature (47)..(47): n is a, c, g, or t
  misc_feature (88)..(88): n is a, c, g, or t
  misc_feature (94)..(94): n is a, c, g, or t
  misc_feature (167)..(167): n is a, c, g, or t
  misc_feature (174)..(175): n is a, c, g, or t
  misc_feature (187)..(187): n is a, c, g, or t
  misc_feature (223)..(223): n is a, c, g, or t
  misc_feature (228)..(228): n is a, c, g, or t
  misc_feature (264)..(264): n is a, c, g, or t
  misc_feature (969)..(969): n is a, c, g, or t
  misc_feature (1065)..(1065): n is a, c, g, or t
  misc_feature (1131)..(1131): n is a, c, g, or t
  misc_feature (1331)..(1331): n is a, c, g, or t
  misc_feature (1333)..(1333): n is a, c, g, or t
  misc_feature (1344)..(1344): n is a, c, g, or t
  misc_feature (1371)..(1371): n is a, c, g, or t
  misc_feature (1377)..(1377): n is a, c, g, or t
  misc_feature (1383)..(1384): n is a, c, g, or t
  misc_feature (1386)..(1387): n is a, c, g, or t
  misc_feature (1390)..(1391): n is a, c, g, or t
  misc_feature (1393)..(1394): n is a, c, g, or t
  misc_feature (1396)..(1396): n is a, c, g, or t
  misc_feature (1398)..(1398): n is a, c, g, or t
  Peptide Sequence Number=SeqID_9730
  Probeset Number=SeqID_12007
natatatattgatagagtcgaatgagtcgatgatagagtggcgcgtngaatagtgtattctttgtccgctgtcgagtgtcgagagtgngatggnggcgacgagtcgctatgaaatctgtgcgcagtgtgaagtagagagagagcgtaataaccgagaagtatgaganagagatnntgcgggcgtagnggggacatgttggcgtgcgcgagtagtgcgttgtgntagtngtattcattgtatagagagagtatacgtagcgtcgnatgctagttgtgattattcggcgtgagtgtgagtgtggtgagatgtggagatagggaaggaagtggcgcggcgtgaggttgatgtagcgtgtgtgtaggtggtgatggtgtgggaggtgtgggcgtgagaggagatgtgagtgaaccagagagggatcgactaggagtagagaggagtgagcggagagtggtgtggaaggttgagcagacgaggtgttagtgtttgcggtcactgtatgttatgtataagaggtgttagtgatgttactcgtgatgtgagagtttcagtccgtggtggtgtgttgagatgtttcccgatcttagatgcggaggtgttgttgtaatgcgtaactacgagtggggtgtagtgtacaagtgttgtctattgatactatggggagacggtgcggacgagtgatacagtccgcgaggaaaagaacgatagggcgagaacgatgtgtgacgagcgacaagagagacctgtagcaggatcgcgtagagagaggtacggtacagggatgtataggtgcatcactcccgagtaattggtaaagagatagataattataatgtgtgcatacgtctgtttagtggggcgttggttagaaggttgcgatgtcgttgtgatgttaggtctgcatatttattactaattgcgtttgctgagacgtgacataacgagcgagaagcggtaacataagtaantcagtgcggtaatatatacgtcttgattttgctatctgcgatacctattggtggagtgtggcgtggggtggtcgagtgcagcgcgatgcggcaacngtgagatgagataacgtaggaagaagtctgtacgaggagactctggatacgacgagatccctttcntttacactaactatagtgagagtgcgatatttatttattgttgtgtgtggtgtatgggagtattatgatgatagtagtatgagcttcaacagtctggtagattagcactgtcaggctcggcggggtggaatcttctacatatattgataagaggagcgcgcgcgagacgtgcgggggtgtgcgagggcctgcgagtaggngnatataattatntaattgagaagcatacatagacagacntatagncagaannannttnnannangnggggagggacacaaat

SEQ ID NO: 2229 - DNA, 630 bp, Glycine max
  misc_feature (1)..(29): n is a, c, g, or t
  misc_feature (630)..(630): n is a, c, g, or t
  Probeset Number=SeqID_12008
nnnnnnnnnnnnnnnnnnnnnnnnnnnnnattcagtgaaaattattgaactaaaggcgaaattacgattaacgagatcttctgctccacccgaatcatcgacatcgacggtaaagaaaagcactggccattgccatcggccaaattcgatttccactatccaaacagctgtggtgtgcgctacgaagccgaagagatccgcaaagccatccgtgccggtaaaacagaacacgaaaacgtgccacacagcgacagtttgggaattgcccgtgttcaagatgaactccgacgacaacttggtgtccactacgaaggacacgatgactaaattattatatatattcctcttgttacattttttttaaattaccacttgaatccaatggtcgccagtatatacggtagtttttagattttagtttcgaaatatttctgcatataaatttgtatataatggcgaccaaaacctcccaacttccaatgaattaaaatgatgtacatttttttattcattgtcatgaccacaaactgttctattgattaaaacaaaacaaaaataagttaacgaactaaattacttttagaaaataaatctaatttcatggaaaaacagaaaaaaaaaaaaaaaaan

SEQ ID NO: 2230 - DNA, 461 bp, Glycine max
  misc_feature (456)..(456): n is a, c, g, or t
  Peptide Sequence Number=SeqID_9731
  Probeset Number=SeqID_12009
ctctcggcctttcccacgggagtcccctcgctcccggcctcctagctctagctctctctccgcctccgttcaaatgggatcctcgcctgcgccttcgccttcgccttcgacttcgccgccgatgccgatgatagggagggccggcaacctcaccgtcttcatcacgccgccgtcgccggccagcaccccgcgctcctcgcgcccgtccgactccccaaggccggacttctccacccctacctcccgcacgggtacggcaccgcctccgccgcagaagagcgctagcccgcccgcgccgccggtcaagttctcgccccctgcaccgctcgtgaaggtgtccctgcctcctgtgcaggtgcccccgccgcagtacggataggcttctgcggggggcaagcacgacggatcggtgttcggcttcttatgggacgccgtcgcgcgcgtgcaggaagcgcncgcga

SEQ ID NO: 2231 - DNA, 1402 bp, Glycine max
  misc_feature (1)..(1): n is a, c, g, or t
  misc_feature (11)..(11): n is a, c, g, or t
  misc_feature (40)..(40): n is a, c, g, or t
  misc_feature (111)..(111): n is a, c, g, or t
  misc_feature (128)..(128): n is a, c, g, or t
  misc_feature (164)..(164): n is a, c, g, or t
  misc_feature (208)..(208): n is a, c, g, or t
  misc_feature (281)..(281): n is a, c, g, or t
  misc_feature (556)..(556): n is a, c, g, or t
  misc_feature (641)..(641): n is a, c, g, or t
  misc_feature (809)..(809): n is a, c, g, or t
  misc_feature (937)..(937): n is a, c, g, or t
  misc_feature (939)..(939): n is a, c, g, or t
  misc_feature (950)..(950): n is a, c, g, or t
  misc_feature (969)..(969): n is a, c, g, or t
  misc_feature (985)..(985): n is a, c, g, or t
  misc_feature (989)..(989): n is a, c, g, or t
  misc_feature (1000)..(1000): n is a, c, g, or t
  misc_feature (1148)..(1148): n is a, c, g, or t
  misc_feature (1268)..(1268): n is a, c, g, or t
  misc_feature (1312)..(1312): n is a, c, g, or t
  misc_feature (1327)..(1327): n is a, c, g, or t
  misc_feature (1368)..(1370): n is a, c, g, or t
  misc_feature (1372)..(1376): n is a, c, g, or t
  misc_feature (1378)..(1380): n is a, c, g, or t
  Probeset Number=SeqID_12010
ncgtagttacngtagctcgctgatttgtactgctcgttgnttattgtaggcgtccgagcagaaggatgtgtgtctcgccgctcgtgcatatgctcgcgtgttagaatggangttgcgcgcgcgctgtnatatagtcaggttgtggcgcgtggtgaggacttcgntttcgcgtgggttgcgcatgagagaagtgtccaccacatcacanaatatatcgactcgtgtgtcttctgtattcacgacagttctaatatgggcgtctgcgtagcgggatccattgntagtcgacttagttagagctagtgtgttgagaggagatggagaggacatggatagtgtgttggtgcgaaggtggtactgcactcctgtattgtctctctctgatgataatctactgatcatttgtcgtggattggccgagctgagtcgaagatatacatagagccagcagtttagaggtatatgtgttggaggtgctgcgtcgtatttcgtccagtgcagattatgtgctctcaaatttcgacttaccgtagggaggtcgcgcagaagggatttnttatgtcactcttgtctcgagtcgaccgttttctttatacatgtttagtgctagtgcccgtatctagcatactcttattctcaantatacgtatttcgtgtattggtaacattgttgtgtcatggaggttgcgactacagataaccctgataataacgccagatacatacaagggggtatggttgacaatctgccgctcgagatattcggtgacaattgttatatatttatcatagtatacggaggatatcgntgctcgctctgtcgagagaacggagcagagaggagcgacgcgtgcgtcgcgaccgtaagtgtcatatcttggatatataggtagtcgaggaaagaggtcaaattgaggcggccgtctgagtcgtggantngtgtgcgtgangagcgatgtggtgctcganagagacgcatcgcagntttngtggtcgagtngagtacatctctctatcgttgatgtatctccctctacagctagcccaactgatgtcagactacgatagtagtatacaatactatatgctagtagtagataataattctatgactatgtatgacgctctctccatacattctattctanattcgacaactccagcaacagacacatacgacaactaaacccgagtgttgttagtgatgatgttgatgatggggggagggggggttgggggtcgctgatcgttatgtcttgatctactgnatggttgttgtgactcccggttactctccattttcgggtgtggnttgcgacacaaaganacattaaataacagacaacaaccacgacatcagaacaaaannnannnnnannncaccacacaaaaacccacaaca

SEQ ID NO: 2232 - DNA, 428 bp, Glycine max
  misc_feature (422)..(422): n is a, c, g, or t
  Peptide Sequence Number=SeqID_9732
  Probeset Number=SeqID_12011
tccttgcaggtgtatggcgtgttggcctttcaggcagcgcggttggttgttattcaaattttggtctttctcgaaggctgctattggctacccctgttggcttggtggttcattgttccgtgcccttgtgtattattcatggaggtacctcttcggttgaggcgacttactctatgctctccattctggatggcggcgattttcgtgcacgagacttccggctgtgtgctttctgcgttggggcctcccttgtttctctttgcgggtggcacatggcttcggctttgtctttgattgtggctggggtggtcagggattggctcttgattgcggtctcgtcctctgtttgttaggacactgtcaccccgttttgcttatttggtcccggttatggcgtttttgtggcctgcgtattatactcnttgctt

SEQ ID NO: 2233 - DNA, 860 bp, Glycine max
  misc_feature (858)..(860): n is a, c, g, or t
  Peptide Sequence Number=SeqID_9733
  Probeset Number=SeqID_12012
gcctagaataataataataatttaatctaattaatatttaacttgtaatttcttttatattttttgtaaagaaaaaatatacaactatattaagcataaaaacattactttctaattagttttatcatttatatgaaaataaatagatacgtttttttattcctaattattagaaacataaattctttcaaatatattaattatacatttatagaagaaacaagtagatgcatttctttaaaatgattttccataattataaatgtatacttgcacattacaaatactttattattctttttaatttctttttatctcactttttactatcacattaacacattatattatctattatacctacacttctctttctttcttttttcttttatctccctaagtgtcaactaagatgacatgtattatttttcaatatttttttcataaattttaaggggaccgtaattcttttaacatggtattttaaatacactttgtgaaaaacttaggggtcatggtccgtgcatgtatacttccattttcaattttatatgaaaaaatataattctgtttatatcttgtaattaatccaccacattaatttttgtacaaaaaatgccgattgttgcagatgcgctgcacgcttctgatcagagaagaaaccattgttggcagctacaaatgcgagataattctttagtataggagtttacaatgttttgtatttaagtaatgaactgcaaaatcttgtttccagaaacttagtatgctattgttgtattttattgtataatatatttgtaatgctgtttgtttttcattattgtgcttagatctgtgatatctaaaatttcaccnnn

SEQ ID NO: 2234 - DNA, 1575 bp, Glycine max
  misc_feature (1)..(2): n is a, c, g, or t
  misc_feature (4)..(4): n is a, c, g, or t
  misc_feature (19)..(19): n is a, c, g, or t
  misc_feature (50)..(50): n is a, c, g, or t
  misc_feature (69)..(69): n is a, c, g, or t
  misc_feature (76)..(76): n is a, c, g, or t
  misc_feature (81)..(81): n is a, c, g, or t
  misc_feature (134)..(134): n is a, c, g, or t
  misc_feature (137)..(137): n is a, c, g, or t
  misc_feature (140)..(140): n is a, c, g, or t
  misc_feature (166)..(166): n is a, c, g, or t
  misc_feature (171)..(171): n is a, c, g, or t
  misc_feature (181)..(181): n is a, c, g, or t
  misc_feature (198)..(198): n is a, c, g, or t
  misc_feature (200)..(200): n is a, c, g, or t
  misc_feature (212)..(212): n is a, c, g, or t
  misc_feature (214)..(214): n is a, c, g, or t
  misc_feature (234)..(234): n is a, c, g, or t
  misc_feature (236)..(236): n is a, c, g, or t
  misc_feature (309)..(309): n is a, c, g, or t
  misc_feature (355)..(355): n is a, c, g, or t
  misc_feature (603)..(603): n is a, c, g, or t
  misc_feature (656)..(656): n is a, c, g, or t
  misc_feature (674)..(674): n is a, c, g, or t
  misc_feature (690)..(690): n is a, c, g, or t
  misc_feature (724)..(724): n is a, c, g, or t
  misc_feature (726)..(726): n is a, c, g, or t
  misc_feature (739)..(739): n is a, c, g, or t
  misc_feature (841)..(841): n is a, c, g, or t
  misc_feature (953)..(953): n is a, c, g, or t
  misc_feature (1021)..(1021): n is a, c, g, or t
  misc_feature (1089)..(1089): n is a, c, g, or t
  misc_feature (1147)..(1147): n is a, c, g, or t
  misc_feature (1407)..(1407): n is a, c, g, or t
  misc_feature (1431)..(1431): n is a, c, g, or t
  misc_feature (1501)..(1502): n is a, c, g, or t
  misc_feature (1504)..(1504): n is a, c, g, or t
  misc_feature (1551)..(1551): n is a, c, g, or t
  misc_feature (1556)..(1557): n is a, c, g, or t
  Probeset Number=SeqID_12013
nngnagagagcatgatggntagctagagcagacacgatcgacatcatgcntagcaatgtaagcagtctngcgcggntcgcntaccagacgcgcgcatgacacgcgtcgtcatcacagcacgcggtagcatcacnagnatnactgagtcctggggtatgtgtgacgntggtnatgatagcgngacgcgagagaacatgncncgtcagcatagngncgtgtgactcaagcgcatcncntcacgacggacatcaatcgaggctgtctcagtgtgtacagacgaagtggatatacgactatacgatacagatngtcacgatcaatgagttaagaggaagtaagtacggcacgtacgtanctgatgacagagcatcagcacgtcgtagatgaagagtgatgcggagtggatgtaattaggagacgaggagaatgatgacaggagagtgatagaggcgcgcaccacagagacaagcacgagtgacagagcagcgcgcgcgccagcggagagatcacacgataacacgatacagacatatacaactatcatacatatgacacataatccaagacgatgacatcacgctgttaagagacagagtagatgangggtgcgtcggggtgtgtgcgcggtgatgcataggtcgtctactacatgtacncggtcaagccgtgtggtntggggtgtctgcgcancgtgacacgagatgttgtacagacgcaggagagngnggtgtgtggtgtngaggatgtagacatggcgcgtgccgcatcattcaatcattgtgatatagttaattatatatacttttacatatatagtgagtaggtggttgtgtttctcctnctcagcacccgcgaccgcacgagcgctcacatctataaacatggcgcgacggaacaaattagtgaggtggggttgggcgagtcggggtgtggagtacgttcaacattacatntcttgtgtcgagattgcggaggaggttttagccactcgtatgtaatatagagaagtgattcttatttnttgtggggtggtgtggcgtgtggaggggtgatgggtgctattgtggcgcgttgcagcgatgttttttngtgggcgacaacaaaacatcagagagaaacgagcaagagccacacccacgcacgccgncgccatccgtgttcgccacaggagtagagacaacagaggaacgcacgatgaaagaaagaacagaaacacaaggtcgctactattcttcgcgacttttctgtctacgtcccataaacaacagacgctctcatagaataaaaaatatgagaaacagcaacaagttaaatgagcgttgaggtgggtgtggtcgctcggtcaaactgtggtggaggaacgagaaacagaaacgggggggtacaccacaaaagcacagcccagancggcatcactcggtgggagggggnaccacggtggggggacagggtccgccgccaatcgaggagcagagtagatctttcaacttctttttttgtnntnttttagaggtgtggggtggtgttgccgcgcaaacaccaccccccccnccccnncccgggcgacacacccac

SEQ ID NO: 2235 - DNA, 1473 bp, Glycine max
  misc_feature (16)..(16): n is a, c, g, or t
  misc_feature (18)..(22): n is a, c, g, or t
  misc_feature (24)..(25): n is a, c, g, or t
  misc_feature (27)..(31): n is a, c, g, or t
  misc_feature (33)..(34): n is a, c, g, or t
  misc_feature (36)..(38): n is a, c, g, or t
  misc_feature (49)..(50): n is a, c, g, or t
  misc_feature (54)..(54): n is a, c, g, or t
  misc_feature (72)..(72): n is a, c, g, or t
  misc_feature (145)..(145): n is a, c, g, or t
  misc_feature (150)..(151): n is a, c, g, or t
  misc_feature (160)..(160): n is a, c, g, or t
  misc_feature (176)..(176): n is a, c, g, or t
  misc_feature (178)..(178): n is a, c, g, or t
  misc_feature (290)..(290): n is a, c, g, or t
  misc_feature (354)..(354): n is a, c, g, or t
  misc_feature (393)..(393): n is a, c, g, or t
  misc_feature (406)..(406): n is a, c, g, or t
  misc_feature (467)..(467): n is a, c, g, or t
  misc_feature (493)..(493): n is a, c, g, or t
  misc_feature (519)..(519): n is a, c, g, or t
  misc_feature (578)..(578): n is a, c, g, or t
  misc_feature (611)..(611): n is a, c, g, or t
  misc_feature (763)..(763): n is a, c, g, or t
  misc_feature (839)..(839): n is a, c, g, or t
  misc_feature (921)..(921): n is a, c, g, or t
  misc_feature (926)..(926): n is a, c, g, or t
  misc_feature (992)..(992): n is a, c, g, or t
  misc_feature (1064)..(1064): n is a, c, g, or t
  misc_feature (1344)..(1344): n is a, c, g, or t
  misc_feature (1370)..(1370): n is a, c, g, or t
  misc_feature (1397)..(1397): n is a, c, g, or t
  misc_feature (1466)..(1466): n is a, c, g, or t
  Peptide Sequence Number=SeqID_9734
  Probeset Number=SeqID_12014
ttgtgtgtcccccccntnnnnngnngnnnnnannannntgtggtggcgnnactngttatcttgttgtgtcanctctatcacacgcgctcacgcggataagaatactatagctaccactcactcgcgtaagaacggcgcgaaactntcctnntgcgtgttnatggaaccggagcacncncacgagtcggcgagacggggactgagcggagtatagttgttgtctgctgtctacattgactctgactcgcgtcatcgggtgataatatactagaaaaaagcagaaacaaacnactatgatgccgcatgaacattatgaggtatatactcggcaacactaatccccgccggtatagnggaaaggcggaggagataataatcgctcgataatcacgnacatatgtgtgtnaatgtagatatgtcgcgtcggataagtctgtacacgccggggtggtcgggcgcgtggatanacatgagtgacatcatatgactagcnagcgtaggtaaaagagaggtagtaanaacaatctcgcgagcggaacagactatatgcgtgtgcgatacattgtgcgtgacgggcnttagggtgcgcgcgctgatcgtggtgacattgngctgcgtcctatgaggataaatgtggattcttcgctagttgtcggtcgttcttgtgcgtgataactactatacagggcactcacactacatctacaccactctatctacatcacatactcgcgctgtgtgcgcggaaagaacatgtgcacgngtctgtgtatctattcgtcggagcgcgtgtgtgtgtgtgacgctgaattctttgttgttgtgcgccacacgcctcnactacacatgcagcggagatggtagatacgtgtatgacggtgcaacgcacacaccacccccaacccacccaccgcacagcangtggngattatcgcctgtcctactgctggtcgtgtacatattgataggctctagtgatatattgttgttantctggctactatcacttgcggtacaatattcaatgctggcgtagttggcttagataaggctatacatacagngcgcttatctatatattgcgcgtttctcttatattacatcaccaccgtctttcatccgcatgctgctgacactgcgcactgtcggcgaggtcatacagatcacataatgtgggcgactaacacctcgtgtcgattctgggtgagactcttatgacactcgtgctctctgcgtcgtctcttcaccgtgtcagtttgtatgtgtttatgtttggtttgtgtcactaacagcgctgtcacgcaggaaccactagtgctgtgggcgcgggccccgacaagaccngacctcgcgcgtccctgccctactantgcgtgtatatgtttgtcttggatacntcatccgttccgatgaactacgcgcatcatcaactgcactctcccgggaacgcgtatctcaatgtgtgntgcaccg

SEQ ID NO: 2236 - DNA, 737 bp, Glycine max
  misc_feature (1)..(1): n is a, c, g, or t
  misc_feature (737)..(737): n is a, c, g, or t
  Probeset Number=SeqID_12015
nattacccttgtagcgataggaaatcagtgtatttgatgggatgattatatagtagaatatccaatgagtgtggattattttgttccccctatcttattacgggtaacacatttggatgattatatagaagaataactcagtttcttcgacaacagtgactgaatctgggagtgtcaccattagattggttgacttgataagcgcttcgtcggttgaaattctagaacctgtggatggtacgcaagaggctactattcctatttctagtcttccggctatcgtttgtttttctcctagttatgactgtcccatgcacatgatagggaatcgacacagatgtttcggcttggtaactcagctggatggcgtcatatcctctgggtctaccggcggtatgagtcatgcgttttggtctgcgaaccttccttgttaaccctatatcttcccagcggttcccccctttggttaagtttgtggggaccctttgccggggtgaacccgtttgcccctcaaacaaatgaaaaattttgttggggcgttaacgaaaaaatctggaaaaaattggtgtttatttggggaaaccccttttgtaaaatgtccgccaaaattcacaattattttgtttttatgagggaaatcatatccctcctcccgaaaaagggttgggaaggatgaaataatttttacgccgaaattcttgtggggggttcttcccccctccttggtttttaaaagn

SEQ ID NO: 2237 - DNA, 1340 bp, Glycine max
  misc_feature (23)..(23): n is a, c, g, or t
  misc_feature (183)..(183): n is a, c, g, or t
  misc_feature (990)..(990): n is a, c, g, or t
  misc_feature (995)..(995): n is a, c, g, or t
  misc_feature (997)..(997): n is a, c, g, or t
  misc_feature (1211)..(1211): n is a, c, g, or t
  Peptide Sequence Number=SeqID_9735
  Probeset Number=SeqID_12016
gtccttcacacctccccttcttngaaccagttgtaataattaatatgtctcgactctccaaagactgagtgtatcacatatcaggtcttactattgtagagacggaggcgaacgaaaatcagatcagtgctcacagcatattcgatttaggagtcaccggataatgctctgtctctacttcanatcgtccatataaggtgaagcagcgcagcacgcgcatcgacagacagcctacgaccatcccctgaacagctactgattagaaactagtctcgcagcgtggtggatatgacgaagggcacagacagaggaacagtgcgccccagcatgtagatctatctcatatctttatatatgttgtggtattactataatacgtcgtaacctaacacctcatacaacgcgacaatttgatactctagtctcatatatgcctattacgagttaatgtgggaggactaatgatgatacggtcttcctctctactactccactcaatataatctatctgtcgagctctagtgtgaccgataagacgaggagatgatctattgtatataggagagataggagaagagaacatacaattaggaacgcaccctatatatactaccatgccacaactcgtatactatctgagtatatataaatatcgcgagacacaccaattccttaccatctacgtctaagtcataatacgagatactcactcttcttacatgtaccgcgctataactacgagcacggctatattatcatatcacacagcacggctacacaagactcatgatctggttcatcttatttcgaatatatacatcgcgctgtgccagataccactacgactcacgatagatgtctgtgtacactagataactcactcgtgcacagaacacactacatcgcatcagatcatatacatcacctctacatcgtagattgatgatgtgaacagcgtatatctgctcagcatccaacctccgatctcantggcnancgactgctgagcacgagctgacgtctgcgatagtgcgaaatctgataagtcctcacataataaatacaagacagctaagtctgtacagacgatcacacaacatcgagcacgactatagaacaatagacaatatataacacattcacatcgcgcgaagcgacacacaacatgactgctaacgtcaatctctcgctaatgttatgtgcgccagcanactcacgagacgcctacggcggactacacaggagtagcagaacgaagccgtacgctgcagttcatatgagctcgcgatacggtgccgcgctgccattactatcgtaagtatatgcaccgaactacggag

SEQ ID NO: 2238 - DNA, 1555 bp, Glycine max
  misc_feature (1555)..(1555): n is a, c, g, or t
  Probeset Number=SeqID_12017
ttctccttctccttctccttctccctatatatatacaagtcccaattcccaatagtgctcgcaccagccaacaaaaaataaaacaacacataataagcaagcaaaacacacacaaaaggaaataccatatattatacacaaaccaaaccatatatcttattctattttctccctctccaccactccccttctttctcctcctcctcaaccttaatcatggagaatattggagaagagtacaagcattactgggagaccaacatgttcctccaaacccaagaacttgacagttgggggttggatgaggccttatctgggtactacgattcgagttccccggacggcgctgcttcgtctgcggcatctaagaacattgtttccgagaggaatcggaggaagaagctcaatgaaaggctttttgcgcttagatcggtggtacctaacattagcaagatggacaaggcttcgattatcaaggatgctattgagtacatccagcacttgcacgagcaagagaagattatccaagctgagataatggaacttgaatctgggatgccaagaaagagtccaagctatggttttgagcaagaacagcttcctgtggttctcaggtccaagaagaagagaacagagcagctatatgattctgttacttcaagaaacaccccaattgaagtccttgagctgagggttacatacatgggggagaaaactgttgtggtgagtttgacatgcagcaaaaggacagacacaatggtgaaactgtgtgaagtgttcgaatctttgaagctcaagatcatcactgccaacatcacttcgttttcagggaggcttttgaagactgtcttcattgaggttagtcttcatgacaccaccttcctatttttcatataataataatgatgattccttctcttatggtcacaatgtgacacatgattaatacatgagtgtgttcgatcctatttttaggaaattagttataaaattaaaaatatatatttattataaagattataaaaaaatgacatcataaattttgattaatatttactttaatagataactttttacataaatcactcgttttgaaagattaatctttagttctcgactacttggctagattcatccaaaatagttccttctctttactttatttattcgcattaaattggctctggtgaattggtaggtgtgtgagatctggatttcatttttttactcctaataataaatgaacccaatgttatattatatttatatcatgtatgtatattatatggcacaaaataaagaagttacagctagaattagggcctacatgcttggaaactacgagaccmctttagctaaagtggaagtgcggaacacccattgcgaatagtattagacttttcagggcattcatgagggctttaactagaaattccgagtaaagccaagaggtgtaatatactcatattcatgataaaattattagtgaaagtcmcaataaaacttatagttattttttgaaatggaatttcaaggaaatgaccttttgaatatn

SEQ ID NO: 2239 - DNA, 424 bp, Glycine max
  Peptide Sequence Number=SeqID_9736
  Probeset Number=SeqID_12018
tcatcaactcggctataaaacagtacatcaggccaccgtctaaagctcggaggcacaggcgagtgatccaggggcaagggtagccaagctaaacaaccccaaaggacaggggcagccccgcactcggctgtaaaacagtacaagaggccaccgcctaaagctcagtcgcacaagggtgggaccatgggtccaaggaaccaatgcacaaagcgaaacgcgaatcataaagcaaaaagcaaatccctacagcctgcagccggcaccggatcctgccggcagccggacgataatccccaaggtcctcggtcttccgactccagaaacatgaagagagcagcgaccgacgaaggacgaagccgcgagccgagcaacgctgagggcagcggacagcgaacaccgggcgcctggagcgatcctcgagccg

SEQ ID NO: 2240 - DNA, 1706 bp, Glycine max
  misc_feature (11)..(11): n is a, c, g, or t
  misc_feature (16)..(16): n is a, c, g, or t
  misc_feature (26)..(27): n is a, c, g, or t
  misc_feature (46)..(46): n is a, c, g, or t
  misc_feature (106)..(106): n is a, c, g, or t
  misc_feature (116)..(116): n is a, c, g, or t
  misc_feature (267)..(267): n is a, c, g, or t
  misc_feature (347)..(347): n is a, c, g, or t
  misc_feature (625)..(625): n is a, c, g, or t
  misc_feature (633)..(633): n is a, c, g, or t
  misc_feature (755)..(755): n is a, c, g, or t
  misc_feature (1009)..(1009): n is a, c, g, or t
  misc_feature (1091)..(1091): n is a, c, g, or t
  misc_feature (1128)..(1128): n is a, c, g, or t
  misc_feature (1140)..(1140): n is a, c, g, or t
  misc_feature (1187)..(1187): n is a, c, g, or t
  misc_feature (1312)..(1312): n is a, c, g, or t
  misc_feature (1319)..(1319): n is a, c, g, or t
  misc_feature (1346)..(1346): n is a, c, g, or t
  misc_feature (1362)..(1362): n is a, c, g, or t
  misc_feature (1369)..(1369): n is a, c, g, or t
  misc_feature (1428)..(1428): n is a, c, g, or t
  misc_feature (1435)..(1435): n is a, c, g, or t
  misc_feature (1458)..(1458): n is a, c, g, or t
  misc_feature (1564)..(1564): n is a, c, g, or t
  misc_feature (1576)..(1576): n is a, c, g, or t
  misc_feature (1584)..(1585): n is a, c, g, or t
  misc_feature (1596)..(1596): n is a, c, g, or t
  misc_feature (1638)..(1638): n is a, c, g, or t
  misc_feature (1660)..(1660): n is a, c, g, or t
  misc_feature (1686)..(1686): n is a, c, g, or t
  misc_feature (1706)..(1706): n is a, c, g, or t
  Probeset Number=SeqID_12019
agatggttaanaagantgtgcggcgnngcgcccctctcttccgtcnccctcttcctcctctcttcctctcgccaccacactgctggggttctctccaccggctggnagggcgcgcntggtctcatagtaactacagatgccaccctccacgggtgtatcgcaggatattctacgcagcacagatccactctaccatagataacatatcttaaatgcaaaagataacgacattgctgcagtctccctctaccacgtagtagcacgagnagaaacgagatcgcagtcgtattcacattcgcattagacgtagttcgcttgttccagggttcctcacctgcttgcgtagnctaaactaggacagacagagccagccgcacaccatcgcagcgtacacactgctgcccttcgatccgtgctctgactctccgctcagctgatggcagtgccgctacgcgtcatcctcgctctgatcacttccagctacgctccgtccaccgcagtcaccgactcccctcgaggcgtcacaactactctaagtcgtcagtcgaagtagctcatatcgctctattctatatcttcttcgtgtctacgccagcttcacttcgtcgctttctctgcctccggntcactctntctccctctcctatacaagagcgtattcgtctctctcaacacacagtctctgtccatcatcttttctgcttcctcactgttgtacggcctgcggaactgcgaatagccgctttggatagggntacgccgcccattggccatccggccctggactagatcagactctcctactcgcactattcctcattctactcactctctgcagcatcatacacaccacagtctcgcactaggatctgatagtgccttccatctcaagacagtttcgcctatgaacagatctttgctacgcatgtcacaccgtttgctgccctctccctcactcgccgccccctcatcccgctatctacgcatctcgcacttcgctccgctgctncgaatgcgacgtctgatgcgctgcgcgtctggtcgtacgtaccacattctatcatcgctacatatagagcgctcttcgcgtntgtgtgtgcgagcgtgttgcggtctagagtgacagcnactctccacgangtacgcgacgtcatcacgcgtatcgttctctgcgctgtccagtgtcnttaagtaccatctctctctcgaatcgccaactagtatgtgtcatcagactgctgcgattgacacacatctctctagtgacgtgtctcatcgacatatcgtatgctgctatatacagtccccctanctactcnccgcatgagtcgtggtgcatgtggttncgtgcttgtttattcngtatatngctttatctactatatgatagataatcgctcatatccttctcgatctgactcgttatgntcctagntatgctctgcgtctgtcgtgctntcgtagctcgcgtgcgcggctgtgcttcgttgtacgatctgtatagtgcgacagtcgagcgagatcgtactcacgtatatgtgtcaacgcacgatagtactcactncgtagtgtaggncgagcgcnncgcacttctgntgatactccttcaatcgcactgttgatctctcgtcctattgnagctatactcgattcgtatganctatgctcgcatcatgtatctcgatnagtaatggatgagttgacgn

SEQ ID NO: 2241 - DNA, 1667 bp, Glycine max
  misc_feature (1)..(1): n is a, c, g, or t
  misc_feature (116)..(116): n is a, c, g, or t
  misc_feature (203)..(203): n is a, c, g, or t
  misc_feature (214)..(214): n is a, c, g, or t
  misc_feature (310)..(310): n is a, c, g, or t
  misc_feature (324)..(324): n is a, c, g, or t
  misc_feature (341)..(341): n is a, c, g, or t
  misc_feature (373)..(373): n is a, c, g, or t
  misc_feature (396)..(396): n is a, c, g, or t
  misc_feature (513)..(513): n is a, c, g, or t
  misc_feature (566)..(566): n is a, c, g, or t
  misc_feature (675)..(675): n is a, c, g, or t
  misc_feature (851)..(851): n is a, c, g, or t
  misc_feature (1016)..(1016): n is a, c, g, or t
  misc_feature (1284)..(1284): n is a, c, g, or t
  misc_feature (1459)..(1459): n is a, c, g, or t
  misc_feature (1494)..(1494): n is a, c, g, or t
  misc_feature (1591)..(1591): n is a, c, g, or t
  misc_feature (1618)..(1618): n is a, c, g, or t
  misc_feature (1634)..(1640): n is a, c, g, or t
  misc_feature (1653)..(1657): n is a, c, g, or t
  misc_feature (1662)..(1667): n is a, c, g, or t
  Peptide Sequence Number=SeqID_9737
  Probeset Number=SeqID_12020
ncgtcatattattgagatcacatttgcaatatgataattacactttgctaatatatgtgtctattaaatagtgacgatgatcaaacataatatatagctcggacataacctatcgnaccgtctcgcgcggtcgcgttgccgtgggattcacacgcgtgtcacacgcgtggcgcacctagacgaccactacaacatactgtgcngtcctacacanagcaggtctgcgcaaggtgtagagatctcgctgtgtagatgacatacaccgacttattcgtacccagcactgcaccacgcatcactactcagatcngtacgctcaacctngcggagacagagagcantgtcatctcatatgcgatcgctgcacactcancgatctcgtgcatatcactcatnttgtatagcgactcactggtccgcgtcatgtgtctactcattagcttcgagacactaatatagagcagagatgtgcacgattcaaggaggacacatattctacctctatcctctctngtgatacagccacactatactcgcttatacaatcatattatctagtcatcgcngcgacagcgagcgtactgtaatttcgttgcacgctgatagtgatagtgtgatacgttatgttcggtgactatatatagagattgttgtatgtgtaattgatttgtcganaatagtgcggagatagaacatatagtcatatagtgtgatgcgatgtatgtcgattcactctactattctacaagccaccggcgccctcggtagctgtatacgaatcagtgtatacgagagcaagtcacgatacgagagagatcgtcaagcagagtctcaatcctattatagtattnagtttctatacgtccattaacctttgcttcctcatctatatcctcatctcatcgttttattatgctcatgcatcttctttcttatctctcatatattgataatactgtgtcacacgactattcactctgtcactcacatcaattcaaatattcattctctaaagnaagttctcactatgtgagactatggctatgtctttaagcatgcgactatgagttattcttcgttcattattattctctcttcaatcgccataactcaagtcgctttttaacaagctgtcatctccaccaactttccgcctacctgtccatctacacacaccacactcgcacacgcccctttcgtccactaatgtccatccctccacgtagttcaccacactcacacattctctcatacgctatgctaatactctcatatccctcacanctaacacgacacacacccgacacatccaacgattacataacacccaaactcaacaatcacgcacactcgacaagatacagaccacagaacagacgagatggcacaagagcgcgcgcagaggagtcgagtaaagtctgtcaggtgtattatcgagtgttgaaggaactatgtcatngatggtattatgttgtatagtgttatataattatntattactatcatatttttataatatactctacattattattatataagtcatttctcatactattcttcctgattgaatatatcccatcatattatntatatttttattttttgattaataaantttcctatttattaannnnnnnaatttccccaaannnnnaaaannnnnn

SEQ ID NO: 2242 - DNA, 513 bp, Glycine max
  misc_feature (108)..(108): n is a, c, g, or t
  misc_feature (146)..(146): n is a, c, g, or t
  misc_feature (256)..(256): n is a, c, g, or t
  misc_feature (259)..(259): n is a, c, g, or t
  misc_feature (265)..(266): n is a, c, g, or t
  misc_feature (275)..(275): n is a, c, g, or t
  misc_feature (281)..(282): n is a, c, g, or t
  misc_feature (293)..(293): n is a, c, g, or t
  misc_feature (299)..(299): n is a, c, g, or t
  misc_feature (302)..(302): n is a, c, g, or t
  misc_feature (306)..(306): n is a, c, g, or t
  misc_feature (308)..(309): n is a, c, g, or t
  misc_feature (314)..(314): n is a, c, g, or t
  misc_feature (320)..(320): n is a, c, g, or t
  misc_feature (327)..(327): n is a, c, g, or t
  misc_feature (329)..(330): n is a, c, g, or t
  misc_feature (338)..(338): n is a, c, g, or t
  misc_feature (340)..(340): n is a, c, g, or t
  misc_feature (343)..(345): n is a, c, g, or t
  misc_feature (348)..(350): n is a, c, g, or t
  misc_feature (367)..(368): n is a, c, g, or t
  misc_feature (373)..(374): n is a, c, g, or t
  misc_feature (377)..(377): n is a, c, g, or t
  misc_feature (381)..(381): n is a, c, g, or t
  misc_feature (387)..(387): n is a, c, g, or t
  misc_feature (390)..(391): n is a, c, g, or t
  misc_feature (395)..(396): n is a, c, g, or t
  misc_feature (401)..(404): n is a, c, g, or t
  misc_feature (409)..(409): n is a, c, g, or t
  misc_feature (415)..(416): n is a, c, g, or t
  misc_feature (423)..(423): n is a, c, g, or t
  misc_feature (433)..(433): n is a, c, g, or t
  misc_feature (437)..(438): n is a, c, g, or t
  misc_feature (443)..(443): n is a, c, g, or t
  misc_feature (446)..(446): n is a, c, g, or t
  misc_feature (449)..(449): n is a, c, g, or t
  misc_feature (455)..(455): n is a, c, g, or t
  misc_feature (462)..(462): n is a, c, g, or t
  misc_feature (465)..(466): n is a, c, g, or t
  misc_feature (469)..(469): n is a, c, g, or t
  misc_feature (472)..(472): n is a, c, g, or t
  misc_feature (475)..(481): n is a, c, g, or t
  misc_feature (489)..(489): n is a, c, g, or t
  misc_feature (495)..(496): n is a, c, g, or t
  misc_feature (500)..(500): n is a, c, g, or t
  misc_feature (504)..(504): n is a, c, g, or t
  misc_feature (506)..(506): n is a, c, g, or t
  misc_feature (513)..(513): n is a, c, g, or t
  Probeset Number=SeqID_12021
ttgaggtttaagaaagaggaagcaattgcacttgggcctcaagccctgtatctgagattgccgtttggtgaaattgaggttcttaaggaaaacttggacttgatcaanagacagagtggtctacatgatgcggaaattttacctgnagcagatgttgattccttggccagagccggaccacttgcttccttacaaaatcaaaatccggcatctccgagaacaccaactgctatctctataactcaaaaagctaccngtnttgcannagcgtactntttccnntgaggacatcngaattngantttncnntactntatctntgctttntnnaggactgncnccnnncannngttgtgcattcctcaannttaannacngaancttctnatnnctannatgannnngacgnaatatnncgtttgngatcctatgnatanngtgcncgncgntgatgncaagatngcnnaanttnatnnnnnnnggttttantcggcnntttntctntntgaatgn

SEQ ID NO: 2243 - DNA, 1469 bp, Glycine max
  misc_feature (539)..(539): n is a, c, g, or t
  misc_feature (875)..(875): n is a, c, g, or t
  misc_feature (1214)..(1214): n is a, c, g, or t
  misc_feature (1367)..(1367): n is a, c, g, or t
  misc_feature (1464)..(1464): n is a, c, g, or t
  Peptide Sequence Number=SeqID_9738
  Probeset Number=SeqID_12022
agagccacacaacaataaataataatgtaattatgtgaaatatttccaaatcattctataatcaccatataactttaattatcaccatacccaacaacaaacgtatttgtccaccagatcgtattttcgaagatagtaaacattttttcacaatagaacagacagcgagtatatcagcacgcaccacctctattatagctcgcgccccagtatatgctccctccacccgctcccagtgtgcatttctacctcgtggagtcgaaattattttatttctaattacacgcatacgaataatagaccaccccgagcatataccatgatagtataaattacattgttattattcccccatccctagtagttgtatgttaatttggccatacccatcttcctctcttatttaactccctccctcctcacaccactatctacacctctcatatatattttatatcccccgccgtactattatttaattttagttattgttattcaagtactcccccgccccgaaaggatcaaaataaaagaacatnaataatatatgcgcgccaacaaataattctatgcctccgaaatgctcagacgactataaataaagtatatcatagacttataatcacgatcttggcacagaaatacattgctcgcgccaacaggcccagcgccggtttgcgattataaattaaactcacaagacaattacccaataaaactcgaagtgggaatgttagtagtcatcaaatagccatgaatcatcgctgacacacccattaattcatggcccccgcgcgccattaaccacgcaccccacttgaattaaaacgcaccactaccaacacacaccgacaccaacatatataattatgcantactcatcaacgcgcacttgcggcgacctgtgaaagatataccactatgacaactcagactaagccctactatatacacccaagaacagtcatggataatgttgtgatgctatctctactatacatcgtatatttataaacgagcattattattcatacgcctagcatactacacaatattatagtggttgtgcccgtcgcctaacattattatatacttgattatatcgataacttcgctcatgcgtacacgatcttacacatacatcgtgtaacaactaagacagaacgtagatactctcgcatgatctatttcaccgacgcgctctacactactancgtacagtgtattatcccttatcattgatgtacatattcaccgtctaatcaaataatatactatcatatatgttagcgacgactacatagatcatcatgctatatacgtatagtataacgaacattattaggagaccacgatgatctactcgnacagcacatacgtgacatatagtattacctcggtctcgctctagactatatataccaccacacgctacagactacttctagaaagatatgacgtcancagag

SEQ ID NO: 2244 - DNA, 1983 bp, Glycine max
  misc_feature (13)..(13): n is a, c, g, or t
  misc_feature (25)..(26): n is a, c, g, or t
  misc_feature (299)..(299): n is a, c, g, or t
  misc_feature (469)..(469): n is a, c, g, or t
  misc_feature (638)..(638): n is a, c, g, or t
  misc_feature (690)..(690): n is a, c, g, or t
  misc_feature (703)..(703): n is a, c, g, or t
  misc_feature (739)..(739): n is a, c, g, or t
  misc_feature (770)..(770): n is a, c, g, or t
  misc_feature (983)..(983): n is a, c, g, or t
  misc_feature (985)..(985): n is a, c, g, or t
  misc_feature (1011)..(1011): n is a, c, g, or t
  misc_feature (1027)..(1027): n is a, c, g, or t
  misc_feature (1067)..(1067): n is a, c, g, or t
  misc_feature (1079)..(1079): n is a, c, g, or t
  misc_feature (1094)..(1094): n is a, c, g, or t
  misc_feature (1179)..(1179): n is a, c, g, or t
  misc_feature (1206)..(1206): n is a, c, g, or t
  misc_feature (1210)..(1210): n is a, c, g, or t
  misc_feature (1225)..(1225): n is a, c, g, or t
  misc_feature (1244)..(1244): n is a, c, g, or t
  misc_feature (1251)..(1251): n is a, c, g, or t
  misc_feature (1269)..(1269): n is a, c, g, or t
  misc_feature (1279)..(1279): n is a, c, g, or t
  misc_feature (1311)..(1311): n is a, c, g, or t
  misc_feature (1336)..(1336): n is a, c, g, or t
  misc_feature (1364)..(1364): n is a, c, g, or t
  misc_feature (1368)..(1368): n is a, c, g, or t
  misc_feature (1376)..(1376): n is a, c, g, or t
  misc_feature (1395)..(1395): n is a, c, g, or t
  misc_feature (1421)..(1421): n is a, c, g, or t
  misc_feature (1424)..(1424): n is a, c, g, or t
  misc_feature (1446)..(1446): n is a, c, g, or t
  misc_feature (1459)..(1459): n is a, c, g, or t
  misc_feature (1496)..(1496): n is a, c, g, or t
  misc_feature (1509)..(1509): n is a, c, g, or t
  misc_feature (1512)..(1512): n is a, c, g, or t
  misc_feature (1529)..(1529): n is a, c, g, or t
  misc_feature (1545)..(1545): n is a, c, g, or t
  misc_feature (1556)..(1556): n is a, c, g, or t
  misc_feature (1568)..(1568): n is a, c, g, or t
  misc_feature (1609)..(1609): n is a, c, g, or t
  misc_feature (1626)..(1626): n is a, c, g, or t
  misc_feature (1670)..(1670): n is a, c, g, or t
  misc_feature (1676)..(1676): n is a, c, g, or t
  misc_feature (1679)..(1679): n is a, c, g, or t
  misc_feature (1689)..(1689): n is a, c, g, or t
  misc_feature (1711)..(1711): n is a, c, g, or t
  misc_feature (1715)..(1715): n is a, c, g, or t
  misc_feature (1723)..(1723): n is a, c, g, or t
  misc_feature (1728)..(1728): n is a, c, g, or t
  misc_feature (1751)..(1751): n is a, c, g, or t
  misc_feature (1803)..(1803): n is a, c, g, or t
  misc_feature (1884)..(1884): n is a, c, g, or t
  misc_feature (1894)..(1894): n is a, c, g, or t
  misc_feature (1908)..(1908): n is a, c, g, or t
  misc_feature (1915)..(1915): n is a, c, g, or t
  misc_feature (1921)..(1921): n is a, c, g, or t
  misc_feature (1928)..(1928): n is a, c, g, or t
  misc_feature (1933)..(1933): n is a, c, g, or t
  misc_feature (1937)..(1937): n is a, c, g, or t
  misc_feature (1940)..(1940): n is a, c, g, or t
  misc_feature (1983)..(1983): n is a, c, g, or t
  Probeset Number=SeqID_12023
ggcggaaaggccntcgcgctaagtnntttcggtgtgtgctgtgtgtgtgtgtatcagcgcgagagcgcgtcgtggcgtcgaattcatgcacgagagaagcgttactttatgacgtgtagtggataacttctatgtcttatatataagtgaggaggcgttactcgtgcggagcatgaggcgtggcgtgagcggaatagagtggcgatagatgatgatgtatggtggaatactgcagcagcgcgaggcacatagccgagtgtcttatactgcgcgatgctgcgctgatctatgtagacgtngctcgctacggaattgcggtcatctcctcacgacccacgcgatggcaccacgcactcgtgcgacccactcactcacatgtctgtgcgggtgagtcgagatgtgcggtcgcgatcgcgtcgcgctgatacgtgtggtctattcatattattcatctactacctctattgtngcggttcgttcctcgttcgtactgctccgcaccgcgttatgatcctctctcttacgatagctgtcggcgacagcgctggtctatcagtcatattatgacgagcacgatgagtgcgcgagagtaggctcgcgtgtaagagctctggtcgatgcggcggagtgagagacgntgcagtcgttcggcgtggtgcatgtcgtcgctgcacgcgcagtcacgcctgngcgacgtcggagntgatcgtgtggacacgacagcgagcgctgtgatgtnggtactagctgtcgtggagtggaatgaggancgtatctcacagacaacgcatgtactcgcgcgccggacactgctttctgatcacgccgtgtctgctgttctgttagttgtctgtgttgtagcgacgctgtgatactattatgtactgtgctcggtctgtcgtcgcggagacgacaacgtgtacgatatgcgttattctatgtgtgagacagaagatgtgtgtgcgtcgcagccgttgtatagncntacgctatgctgtcattcgcgacatntacgtgcgagtcagcntgtacgccggtcgctgatactagtatagatctatgcatcngtagtatgtagnactgatgtgaccgcntacgctagacgagtgtgatgtctaccgcgtcgttcgtcagcgcgtatgtgagtactctgacgctggaagtagacgtgacagacangagacagcggagaatgcgtcgcgcagncggntgactgctcgtctgntatggtcgatgtgcagtantcgatcntgatcgcatgccgttagntacgacgcantgtgacttgtagtgtatcatactgccactcangtcgcacgacgtagtctatgattangttgtgtactgcaccgatactggctatngtangacgatgnactgtcatatgactgtcantgtgatgatgtcatcgtactatcgantangtatctccatacaagacgcgancgacagtgatgcngctcattcatgtacgacggtctcatcgagtactatangataccgcagcancgnacatgcgacacgctgangtcgacgtgatgtcgnagctacgtgantagcgagcttantcccggataagcctgatgtagtgagtcagcgtccatgatangtgctgactcagtgtantatgattcctgcagctcgtgattgtgcttgacgagtgctgttgngatgantangtatgtcgcnagcatatcatgtgtctacatangctngtagcgtncgctntgctcgtcacatgtggacttagncttcgcatcgatcgtagtacagatactcggactaaactgacgtctacgacanctgtgacgagtgctgatcaatgacgatggacgaagacgtagtggtattacagtcgtgagacgtgcactcgcgtatgagtanctggtacttntcggacagatgcgnctgcggncatgantactgtngacantgtncgnagtaggtgcgagtacgtgacgatcaccagcatcgagcgtcacn

SEQ ID NO: 2245 - DNA, 894 bp, Glycine max
  misc_feature (601)..(894): n is a, c, g, or t
  Peptide Sequence Number=SeqID_9739
  Probeset Number=SeqID_12024
aagtgtagtttgccgctctcggcacctcctctcgcccgggcagctgcttccatcccccgctttcagatttctagacactcgacagaaatggcttccaactacgtggacaccacgggggaggaggggaggctccacacccacggccaccacagcaacagcaccacgccgaccggtgaggcagcgtcgcccaagaatacacggaggaggtggcccgggtcggcgtcggcgccgtccggcgcaggccacgggcctgcttccaagtgcgtctgcgcgccggccacccacgccgggtccttcaagtgccgtttccaccgcaccaactctcagggccacggccacggccagggccagggaagccgcccttcttcgcctccttcaccggccgcggccaacgcagtgccgcggcacccggcctcgccgtcctcgtcctccggcaccgtcgcgacccagtgacgtgacccaagtatcagcctcgaaaatcaagaacgctcgacaacagagagggacgggaaggtcatatcggccctccctttccccccgggccggggggcgcaaacggaaggtggcccggcgggtgaaccccggggggtcttttgggtcnnnnnnnnnnnnnnnnnnnnnnnnnnnnnnnnnnnnnnnnnnnnnnnnnnnnnnnnnnnnnnnnnnnnnnnnnnnnnnnnnnnnnnnnnnnnnnnnnnnnnnnnnnnnnnnnnnnnnnnnnnnnnnnnnnnnnnnnnnnnnnnnnnnnnnnnnnnnnnnnnnnnnnnnnnnnnnnnnnnnnnnnnnnnnnnnnnnnnnnnnnnnnnnnnnnnnnnnnnnnnnnnnnnnnnnnnnnnnnnnnnnnnnnnnnnnnnnnnnnnnnnnnnnnnnnnnnnnnnnnnnnnnnnnnnnnnn

SEQ ID NO: 2246 - DNA, 1681 bp, Glycine max
  misc_feature (177)..(177): n is a, c, g, or t
  misc_feature (487)..(487): n is a, c, g, or t
  misc_feature (539)..(539): n is a, c, g, or t
  misc_feature (562)..(562): n is a, c, g, or t
  misc_feature (593)..(593): n is a, c, g, or t
  misc_feature (695)..(695): n is a, c, g, or t
  misc_feature (1032)..(1032): n is a, c, g, or t
  misc_feature (1051)..(1051): n is a, c, g, or t
  misc_feature (1096)..(1096): n is a, c, g, or t
  misc_feature (1148)..(1148): n is a, c, g, or t
  misc_feature (1162)..(1162): n is a, c, g, or t
  misc_feature (1164)..(1164): n is a, c, g, or t
  misc_feature (1199)..(1199): n is a, c, g, or t
  misc_feature (1279)..(1280): n is a, c, g, or t
  misc_feature (1304)..(1304): n is a, c, g, or t
  misc_feature (1313)..(1313): n is a, c, g, or t
  misc_feature (1390)..(1390): n is a, c, g, or t
  misc_feature (1439)..(1439): n is a, c, g, or t
  misc_feature (1498)..(1498): n is a, c, g, or t
  misc_feature (1605)..(1606): n is a, c, g, or t
  misc_feature (1613)..(1614): n is a, c, g, or t
  misc_feature (1616)..(1616): n is a, c, g, or t
  misc_feature (1634)..(1634): n is a, c, g, or t
  misc_feature (1636)..(1639): n is a, c, g, or t
  misc_feature (1644)..(1645): n is a, c, g, or t
  misc_feature (1647)..(1649): n is a, c, g, or t
  misc_feature (1651)..(1653): n is a, c, g, or t
  misc_feature (1655)..(1662): n is a, c, g, or t
  misc_feature (1664)..(1664): n is a, c, g, or t
  misc_feature (1667)..(1667): n is a, c, g, or t
  Peptide Sequence Number=SeqID_9740
  Probeset Number=SeqID_12025
atgctgatttcctctatggatattatgtgatatattacataacacatgtcttcttattatggagcaggcgcacgatggagtcaagtgaggtcgtggtcttcgagtcgatggtgtttgagatcgagaagattaactgttgctgtctaactgccgatcgtacatcagtctcgtgatctncccgcggcattgtatagctcgctgcagtgcctgcaagatagggtctctagtgtatataatgtgtatgtgttagaggtattgtatgtgttaatcggcgtttattctcagagtgtcgcgatgagtgtgatattgtcgtcacgagcaacttaatgcctggtatcatttgcgctctcaagaataatgctcgaagaagagtggagtgtatttgctacgtagtgtgtctctaggtgtcatacacattaggttattattctttggtgttgctcgtgaaatcagcatgatgttcgcttatcaaacagctacgtaatgnaagtatatgtaatggtaatgtggtgttgattcgagcattatctaatacaccntgatcaagcgcggtgggtcgatnttcttgtgtaatattcttcttgttcatactncgacgctcatgtgtcacgtgtataatgtttgctatactaatactccttacttctgtcataattgcaacgtgcggatccgtgactctaaggcccgtcacgtanccagatgtgcgcagcgtttacgcacgcccagctctaacaaaaatgaacgcgacggtaaagagcgtgcgcgtgacatcagcgagtcgtctaaagttaaagcgtcactatacaatcgactgaattactggacaaaggcctgagtgttcgttagcaggcgcactcgtatgctattcctaactaactccgtgataactagagtagggtgttgcaagcgcttataataattagtacgcattcgtgtcgttattgctgcgttggcgtcgtggccactccacaaactcccactacacgcgcggcgaccggcactgtcagcgggacgaccggctatgtgaatcanatactacaggtcgcccatnatactggtgtcgctgccggataatccacacctaattctgtcggtngtagagtctatattctatgagctgcgagtgcgataccacgatagtaatagangagaaggagcacancncatagtggctccggcggggtgggcgcgccgattcngcccgcagaccgagcggtggcgcggagagcgagacggcgtggtggtgttgtgagagtaggatatagacggcttgctgatnntctttgcctgttctttccggtctngcggtctantatcgtctcattactctctcgtcgctcatcagtgactatatgggtagacagctctgatgatctgttggcgtggtcgntccggcgggtgatgcggacgacatgtgagattgtaacaaattacgtggngtgggtgaagatgggcggtgatcaagctaagttgtgtatataatcttggatgtagtgtnggagagtcgtgtgcgtgcggtgcggggctcttctctctctcacaccactcaaggcatactacatacgacatacgagaactcttctcgtgcccgtgcacccaggcagnnggcgcgnngnaagaaagaaagataggcncnnnnacccnntnnnannncnnnnnnnncnacnccaaaacacccaca

SEQ ID NO: 2247 - DNA, 701 bp, Glycine max
  misc_feature (4)..(4): n is a, c, g, or t
  misc_feature (7)..(7): n is a, c, g, or t
  misc_feature (9)..(9): n is a, c, g, or t
  misc_feature (13)..(16): n is a, c, g, or t
  misc_feature (21)..(23): n is a, c, g, or t
  misc_feature (26)..(26): n is a, c, g, or t
  misc_feature (33)..(33): n is a, c, g, or t
  misc_feature (38)..(38): n is a, c, g, or t
  misc_feature (43)..(43): n is a, c, g, or t
  misc_feature (45)..(49): n is a, c, g, or t
  misc_feature (54)..(54): n is a, c, g, or t
  misc_feature (67)..(67): n is a, c, g, or t
  misc_feature (69)..(69): n is a, c, g, or t
  misc_feature (71)..(71): n is a, c, g, or t
  misc_feature (74)..(74): n is a, c, g, or t
  misc_feature (76)..(76): n is a, c, g, or t
  misc_feature (84)..(85): n is a, c, g, or t
  misc_feature (89)..(90): n is a, c, g, or t
  misc_feature (93)..(94): n is a, c, g, or t
  misc_feature (98)..(98): n is a, c, g, or t
  misc_feature (102)..(102): n is a, c, g, or t
  misc_feature (109)..(109): n is a, c, g, or t
  misc_feature (116)..(116): n is a, c, g, or t
  misc_feature (120)..(120): n is a, c, g, or t
  misc_feature (122)..(122): n is a, c, g, or t
  misc_feature (125)..(125): n is a, c, g, or t
  misc_feature (132)..(133): n is a, c, g, or t
  misc_feature (136)..(136): n is a, c, g, or t
  misc_feature (138)..(139): n is a, c, g, or t
  misc_feature (145)..(145): n is a, c, g, or t
  misc_feature (149)..(149): n is a, c, g, or t
  misc_feature (151)..(152): n is a, c, g, or t
  misc_feature (155)..(155): n is a, c, g, or t
  misc_feature (157)..(161): n is a, c, g, or t
  misc_feature (165)..(166): n is a, c, g, or t
  misc_feature (169)..(170): n is a, c, g, or t
  misc_feature (172)..(172): n is a, c, g, or t
  misc_feature (175)..(175): n is a, c, g, or t
  misc_feature (191)..(194): n is a, c, g, or t
  misc_feature (197)..(197): n is a, c, g, or t
  misc_feature (199)..(199): n is a, c, g, or t
  misc_feature (203)..(204): n is a, c, g, or t
  misc_feature (206)..(206): n is a, c, g, or t
  misc_feature (209)..(210): n is a, c, g, or t
  misc_feature (214)..(214): n is a, c, g, or t
  misc_feature (216)..(218): n is a, c, g, or t
  misc_feature (223)..(224): n is a, c, g, or t
  misc_feature (228)..(229): n is a, c, g, or t
  misc_feature (232)..(232): n is a, c, g, or t
  misc_feature (240)..(241): n is a, c, g, or t
  misc_feature (258)..(259): n is a, c, g, or t
  misc_feature (270)..(270): n is a, c, g, or t
  misc_feature (272)..(272): n is a, c, g, or t
  misc_feature (278)..(278): n is a, c, g, or t
  misc_feature (283)..(286): n is a, c, g, or t
  misc_feature (291)..(291): n is a, c, g, or t
  misc_feature (293)..(293): n is a, c, g, or t
  misc_feature (295)..(295): n is a, c, g, or t
  misc_feature (309)..(309): n is a, c, g, or t
  misc_feature (313)..(313): n is a, c, g, or t
  misc_feature (316)..(316): n is a, c, g, or t
  misc_feature (323)..(323): n is a, c, g, or t
  misc_feature (344)..(346): n is a, c, g, or t
  misc_feature (351)..(351): n is a, c, g, or t
  misc_feature (354)..(355): n is a, c, g, or t
  misc_feature (357)..(358): n is a, c, g, or t
  misc_feature (364)..(364): n is a, c, g, or t
  misc_feature (368)..(368): n is a, c, g, or t
  misc_feature (374)..(377): n is a, c, g, or t
  misc_feature (380)..(380): n is a, c, g, or t
  misc_feature (383)..(383): n is a, c, g, or t
  misc_feature (391)..(391): n is a, c, g, or t
  misc_feature (395)..(395): n is a, c, g, or t
  misc_feature (399)..(401): n is a, c, g, or t
  misc_feature (408)..(409): n is a, c, g, or t
  misc_feature (413)..(413): n is a, c, g, or t
  misc_feature (432)..(432): n is a, c, g, or t
  misc_feature (434)..(434): n is a, c, g, or t
  misc_feature (436)..(436): n is a, c, g, or t
  misc_feature (446)..(446): n is a, c, g, or t
  misc_feature (450)..(450): n is a, c, g, or t
  misc_feature (466)..(466): n is a, c, g, or t
  misc_feature (480)..(480): n is a, c, g, or t
  misc_feature (527)..(527): n is a, c, g, or t
  misc_feature (564)..(564): n is a, c, g, or t
  misc_feature (569)..(569): n is a, c, g, or t
  misc_feature (694)..(694): n is a, c, g, or t
  misc_feature (696)..(696): n is a, c, g, or t
  misc_feature (700)..(700): n is a, c, g, or t
  Probeset Number=SeqID_12026
aatnatntnatannnnaagannngancccacanattcnatatncnnnnncaaanttacacacaagtnananaananaaaaaatnntatnnganntaanatanataaaanacaaganatananaanataaatnnaancnncatatnctcntnncancnnnnnattnnaanngnatnaacatatagtaaatannnncananaatnntnaannattntnnnttacnngatnnganatcttatnnaattatagatcacacannaccaaataatnanatatanatatnnnnaatanancnagaccacttgatanaaanatnacagagnagagtgttgagatctctatannnctttnganncnnagatgncaanaatatnnnnacnaanaaacatgnactnatgnnncagcttnnccancacctttcagcaagtgttngncntaggagcagnaccngtaatatggagaaganccgcaccatcaggntgccttatacaccgatccaacaccacgcggcgcgagcgtggcggcancgaagatgctgcaggggaaggagctgtcatttatcantatcncggactcggataccgcgattgaatgcgtgcgccagtttgaaggcagtgcctgcgtgatcgtcaagcacgccaacccgtgcggtgtagcggtggcggccacgcctctcgagggggggcccggtacncnattng

SEQ ID NO: 2248 - DNA, 2426 bp, Glycine max
  misc_feature (2408)..(2426): n is a, c, g, or t
  Peptide Sequence Number=SeqID_9741
  Probeset Number=SeqID_12027
tacggctgcgagaagacgacagaaggggatttttgagtgtttgtgagtttgtctgtgacactctctctttctctctctctacgcttcacttttccgtaataaacccttcaaaagcgaaagcggtttctcgtttttggaccttatctctctttctaaggttcgattctgcgtactttgggaggaacagacacacatgaaggattcgaattcggatctgtttgacccggtcatggcgatggagtccgagtggtctcgcggcggcaccacctccgatgccgatttcgccttcgccttcaacgacagcaacttctccgacagggttctccggatcgagatcatgcacgaccccgtcgacgcccgccctgattccgacgcctgcgccaccattgccgactgggcccgccaccgcaagcgccgccgcgaggatatcaaaaaggataacggtgcggatcttgcttcggtgccagacgagcaagttttgaacgggcatcaatctgaagcggatgagtgtgagaatcaagatgaagaggctgatgcaatggttgaagaaccccattctggtgatgaagctacaaatagtaatgattcagactggagcatggactgctctgcaggtgcagttgttagagttaaaacactgcatatctttcctcctaacctgcctctggaaatgccattaatctataagactttaggaaatcaaataggagaactttgagcattgaactgtattcccccaagataacgtctctaatgaagatccgcttattaagcaacatttagtacgctttcagcattacgatgaagatgcgtttgcaatggttaaagtaacctcccttgatggttgtgaataaatttgaagttgcttcatgaattagaatatggatcgcgctactgttgtgagtgtttgtgcaccatacatctgcattgctttttctggatcttccttctcctgtcttaatggctgatgcagtccaaccattgactgatgctgcaaagcagtatcttgctggtcgatacaaggatataaccaagttccaggaagaggttattggcttgcccctagctggagtagaggcaatattgtctagtgatgatctccaggtcgcatcagaagatgctgtatatgattttgtgttgaaatggtctcgacagcagtacactaaactggaagacaggcgagaagtcctgggtacccggcttgcacaattaattcgcttcccttacatgacctgccgaaagcttaagaaggtcttgacctgttctgactttgaccatgaagttgcatccaagcttgtacttgagggcctatttttcaaggccgaggctccacaccgccaacggcacgctggcagcagaagatactgcatcttcaaaccgttcgttttgtggagagagcatacaagtaccgcccagtgaaggtggtagaattttagcttccccggcagcagtgtgtgatctacttggttctgaagcgggaggagtgtaacaacctcttcccatccgggcgggtttattcccaggcgttccatttgggtggacaaggtttcttcctatcagcacattgcaacatggaccaacaaagctctttccattgctttgggctgtttttgggaatgcaggaaaagggctcagtgagctttgccgtcgactatgagtttgctgcgaggtctaggccgacagaggaatttgttagcaagtacaaaggcaactacgtgttcactgggggaaaggccgttggctatagaaacttgtttgccattccatggacttcgttcatggctgaggatagtctttactttatcaatggtgtccttctccttagagctgagctcaccatcaaacactgacccccatttctagttgtaaactttctatctattccggttggtagccttgcccttttttttagatctcaacttatcattttatggtaagattagtgatatatcaaaagcttaaataggaagcttttacactatagtggatagttttgctattcactgagaaaatggccgtcggatatataaacttgtttgcaattccatggacaacgttcatggctgaagaaagtctttactttatcaatggtgtacttccccttagagctgagctcaccatccgacactgactgggatttatacgtgtaaaccttttcttctagtcggtagctctgactttttttgggcaatgtgtctcattttccgataacctgctgtaatattcaggcaatgtgcactaggtggctagtgctggatgtgagatcaaatgaattgcaaggactttactttttctttcccttagaattaaaagattttcgggacctgcaggaaggacagttctcgtttctttggtggtttcattttaacaaccgaaaatacaagttggaacaacttaagttttgtcgnnnnnnnnnnnnnnnnnnn

SEQ ID NO: 2249 - DNA, 1807 bp, Glycine max
  misc_feature (1)..(1): n is a, c, g, or t
  misc_feature (54)..(54): n is a, c, g, or t
  misc_feature (112)..(112): n is a, c, g, or t
  misc_feature (244)..(244): n is a, c, g, or t
  misc_feature (282)..(282): n is a, c, g, or t
  misc_feature (294)..(294): n is a, c, g, or t
  misc_feature (299)..(300): n is a, c, g, or t
  misc_feature (303)..(303): n is a, c, g, or t
  misc_feature (375)..(376): n is a, c, g, or t
  misc_feature (439)..(439): n is a, c, g, or t
  misc_feature (451)..(451): n is a, c, g, or t
  misc_feature (496)..(496): n is a, c, g, or t
  misc_feature (582)..(582): n is a, c, g, or t
  misc_feature (629)..(629): n is a, c, g, or t
  misc_feature (649)..(649): n is a, c, g, or t
  misc_feature (873)..(873): n is a, c, g, or t
  misc_feature (1325)..(1325): n is a, c, g, or t
  misc_feature (1459)..(1459): n is a, c, g, or t
  misc_feature (1468)..(1468): n is a, c, g, or t
  misc_feature (1550)..(1550): n is a, c, g, or t
  misc_feature (1703)..(1703): n is a, c, g, or t
  misc_feature (1712)..(1712): n is a, c, g, or t
  misc_feature (1730)..(1731): n is a, c, g, or t
  misc_feature (1773)..(1773): n is a, c, g, or t
  misc_feature (1775)..(1776): n is a, c, g, or t
  misc_feature (1791)..(1791): n is a, c, g, or t
  misc_feature (1794)..(1795): n is a, c, g, or t
  Peptide Sequence Number=SeqID_9742
  Probeset Number=SeqID_12028
ntatgacgcagcgctcgcaagcgcacatcgcgacgagtgagtgcataggagtanttccacgacgaacgagaggcggagcattacagaatgtcgctgtgcagtctctacatgntcgtcatggttagcgagagtagtatcgctgaaggacctcgcgaccgagtgagggaggagcatgtcccggcaggcatgctcgcgtgacctatcatatacgctcgatgtctccgcagtaggattctaagagcanagcgcactcatctcatctaggaccacgcaacacacacnaggagcggggangacgnnagnatgcatacagcgatcctttgcgtgactcttgactattgcgagtactgtatctcctccatcccgacagacggnncgcatacaccgcgcatctgccatcagagcagcgtctgccgtcatatattattagagatagggntgtgagtaaagnatataagagtcaagtgacgtccaatcatagtatccgcatcttgtnatcacctcgcgagatctgtcgatcgtattgatcgccatacaaagagaaactcacgcagtatcttacacacgacacctacatcaagnagatgaactatacacaagagcttgtagtcctgatatgcaagaacggngagagatgatgtttctagtnttgtttatcgagttgtcgatatacggtgcctgaacgcccgcggtcatgctcgagctgcgcatctgactaagagtgtatctgacataatcccactagtgtcgtacgtacacgtagtgcttctaggtatccttagcttagctatgccatagacgcggtgatatgagtgcgcgcggagtgtatatatatatgcggatacgtgacacacgatatctcggcgtacaatngtgtcttactatataacagtatctttatcatgaataggcgttgcatccgctatgtatatctctcactagttagagccgcgtctcgattttccaatcgtcgctcgtaataatatgaacacgatattcaatctgctactcctcggcaccggaccaacgcgagtggcgacaacaatacgcgtcaccattcacgccgctggagacaacggactcgctcgttttctctccgtatcagtcgcgctgtgcatatcatagattaactgaatcagctctctcctggttgactaagtatggttccgtagcgctgtcggttggctccgtcgctctcgctcagactgtgacttcgcgtgtcgtcactgagctactactcgtaaacagacatacacgagacgaggagcgggcgtgtccaccacgagcaggtcacgacgtggaacaccgagggacatgtatagtgngtgcctccactacttgctcgtcgtcttctcatctatgtttgattattcagtcttccgccgcggtgcgcttctgtatctcagcgcgcacgtcgaggtactcagtgagtatatcgaggtatatatatattcgtgtngtgttgctntcgtctgttactgctcgcgattgtggggacacatcgcgagctacgtgaccgttatcgtgatgattcattctgttaattatanagctgtttcgtcacctctctgctcagatcgtcacacacaggagagtgccgtgaacgcaacacaggagacacaattgatgctccaatatagatcaccactctagacctgtgctcctcctccctctctccctctgacccggcgtctgcgagacgnacgcagcgncgaactcttttgaaaaannaatacgtgtattagtgtgtgctcactcagacttacgcacatntnntgctaattatgtaanaanncagcttggtagt

SEQ ID NO: 2250 - DNA, 731 bp, Glycine max
  misc_feature (430)..(430): n is a, c, g, or t
  misc_feature (432)..(432): n is a, c, g, or t
  misc_feature (435)..(435): n is a, c, g, or t
  misc_feature (438)..(439): n is a, c, g, or t
  misc_feature (445)..(445): n is a, c, g, or t
  misc_feature (449)..(452): n is a, c, g, or t
  misc_feature (454)..(456): n is a, c, g, or t
  misc_feature (458)..(459): n is a, c, g, or t
  misc_feature (462)..(463): n is a, c, g, or t
  misc_feature (465)..(467): n is a, c, g, or t
  misc_feature (469)..(470): n is a, c, g, or t
  misc_feature (472)..(472): n is a, c, g, or t
  misc_feature (474)..(475): n is a, c, g, or t
  misc_feature (478)..(478): n is a, c, g, or t
  misc_feature (480)..(485): n is a, c, g, or t
  misc_feature (489)..(489): n is a, c, g, or t
  misc_feature (491)..(492): n is a, c, g, or t
  misc_feature (494)..(529): n is a, c, g, or t
  misc_feature (531)..(546): n is a, c, g, or t
  misc_feature (548)..(574): n is a, c, g, or t
  misc_feature (576)..(595): n is a, c, g, or t
  misc_feature (597)..(597): n is a, c, g, or t
  misc_feature (599)..(618): n is a, c, g, or t
  misc_feature (620)..(648): n is a, c, g, or t
  misc_feature (650)..(672): n is a, c, g, or t
  misc_feature (674)..(686): n is a, c, g, or t
  misc_feature (688)..(698): n is a, c, g, or t
  misc_feature (700)..(725): n is a, c, g, or t
  misc_feature (727)..(730): n is a, c, g, or t
  Probeset Number=SeqID_12029
tgggtaccgggccccccctcgagccggtcttcgaactggcgatcggcgcggcgaccgcgctctgggcgggcagctatctcggcgaccacgtcgcccaaatctcgcgcgatccgatcggcgcgattcccggcgccctgattctggcgttggcggtcttcaccgtcgccatcagcatccgccaactcgcgatcatcggtggcctggactactcaggcgccgttatcgattcgcagcaacgactcgcccggctgaaggcccttcgggtccgatcgactcaggcgatattcctcgctggagtgccattgtggatggtgttcccgatcttcctattgcagtcggtcggacgctacgaggtctttcgcgcgttcgatagcggctggctcatcgctgacctcgcgttcggactcgccgtcgccctcggctgatcgtngncgnccnnggcggntatnnnnannngnntgnnannncnnancnnctntnnnnnngacngnnannnnnnnnnnnnnnnnnnnnnnnnnnnnnnnnnnnntnnnnnnnnnnnnnnnntnnnnnnnnnnnnnnnnnnnnnnnnnnntnnnnnnnnnnnnnnnnnnnntntnnnnnnnnnnnnnnnnnnnntnnnnnnnnnnnnnnnnnnnnnnnnnnnnntnnnnnnnnnnnnnnnnnnnnnnntnnnnnnnnnnnnntnnnnnnnnnnntnnnnnnnnnnnnnnnnnnnnnnnnnntnnnnc

SEQ ID NO: 2251 - DNA, 1650 bp, Glycine max
  misc_feature (1)..(3): n is a, c, g, or t
  misc_feature (521)..(521): n is a, c, g, or t
  misc_feature (739)..(739): n is a, c, g, or t
  misc_feature (1097)..(1097): n is a, c, g, or t
  misc_feature (1199)..(1199): n is a, c, g, or t
  misc_feature (1234)..(1234): n is a, c, g, or t
  misc_feature (1302)..(1302): n is a, c, g, or t
  misc_feature (1337)..(1337): n is a, c, g, or t
  misc_feature (1340)..(1340): n is a, c, g, or t
  misc_feature (1355)..(1355): n is a, c, g, or t
  misc_feature (1372)..(1376): n is a, c, g, or t
  misc_feature (1437)..(1437): n is a, c, g, or t
  misc_feature (1445)..(1446): n is a, c, g, or t
  misc_feature (1457)..(1458): n is a, c, g, or t
  misc_feature (1607)..(1607): n is a, c, g, or t
  misc_feature (1635)..(1635): n is a, c, g, or t
  misc_feature (1650)..(1650): n is a, c, g, or t
  Peptide Sequence Number=SeqID_9743
  Probeset Number=SeqID_12030
nnnttttccgtggtcctctcgggtactctttatccacccactctatatcttattcaaataaactgcggggctccaccgtcgggtgggaaggaccgatttttcaaaataggaggtataccaccgcgcgctgcctgttaatcccgtcacgtagcacccatgtaccctagtaagcatgtctgactcctgagataacgctacgcctagaattacttttgctccactcctcattcgtcgtctcttctaatacaaccacctcagtacaacctacgcctacactgtctttgcgtctggattttgtagctcgttccgttcctcgcggccggtaacgtcgtaggaagcgtcccagccggcgtagacgggcgcggagcgcaggcgtagcagcgcgccttggtgtgtggcccccctcggatgcgcaggctaaaactgatcagacctgcagagtccgcgcccactcgcggcatgcctcctcttgtacaggtgcgtgctctcaccgcccggtgtgctggttacgcagccaagtncaaagtagggcgcgcgcgcggcaccatgtcaagattatccgccaccctcatttgttattatctcctagcgccccttccatctgccaccctcgcaccccattaccgccccttaccacgcgcaacatacttcacctcattttataactgttatcatctatagcttgtcgaccgagccccatccctccgtcgcgctgtgtgtttgcgacgcggacccgggntcccttattcctgccctgcgcgcggactcggcatccgtatagtttacgtgcgaccacgcgccccgctcgcttattctgttgttatacggccgccgccgcgacgtacgaccaacgtgtgttgtcgttttatactcttacgcaggcacccgcgtgcacctccacttgctcgtggcgactgaccgcatgctcggtcgatattatagcgacgatcgcaccgtcgaggcccgcatgcgccgccgagtcattagatcgtacaaccacgtactgtccttactacatgtacattcctagacgacctccgacacgaacacgctcgcaacaccgcacattgctatcacaatacatatatctcatctcnacatccagcgctggtgtcgtatcgaatcatgagctcgagatatcctatagatcatgtgtacatacgcgataccagacgtgtccgcgcctatcgacgctcgtncatcatctctcaatcataatcgcagtgcgaggagngcggcgcacgatcatgtgtcgactgtacttctgctcgctagtgcgcgatgattcctcattattataanatcatgatctcctcgcacgcgccgtgcttgcacgntanttgtttgctcactgngcagcgctcacgtacgnnnnncccctcgcctctctcatcaatacacaccacctcgttgacgatgttatcagtcttcgatatntactcccnnaaagagctatnnttcatcgaatcaggatacctagtcctgcgctcacgcgaacacgcacacgcctcgtactatatattacctcccgctgtcgcgtacacctcctattacatatgatccacatcatcggtcgctgcactctcatctcccgctctcgtatatantaatttatatgcaccgtgactgctgacnatttctatcgcattn

SEQ ID NO: 2252 - DNA, 1926 bp, Glycine max
  misc_feature (31)..(31): n is a, c, g, or t
  misc_feature (34)..(37): n is a, c, g, or t
  misc_feature (43)..(44): n is a, c, g, or t
  misc_feature (47)..(48): n is a, c, g, or t
  misc_feature (56)..(56): n is a, c, g, or t
  misc_feature (58)..(58): n is a, c, g, or t
  misc_feature (102)..(102): n is a, c, g, or t
  misc_feature (111)..(111): n is a, c, g, or t
  misc_feature (122)..(124): n is a, c, g, or t
  misc_feature (270)..(270): n is a, c, g, or t
  misc_feature (318)..(318): n is a, c, g, or t
  misc_feature (328)..(328): n is a, c, g, or t
  misc_feature (330)..(330): n is a, c, g, or t
  misc_feature (442)..(442): n is a, c, g, or t
  misc_feature (445)..(445): n is a, c, g, or t
  misc_feature (458)..(458): n is a, c, g, or t
  misc_feature (616)..(616): n is a, c, g, or t
  misc_feature (628)..(628): n is a, c, g, or t
  misc_feature (630)..(630): n is a, c, g, or t
  misc_feature (653)..(653): n is a, c, g, or t
  misc_feature (689)..(690): n is a, c, g, or t
  misc_feature (695)..(695): n is a, c, g, or t
  misc_feature (697)..(697): n is a, c, g, or t
  misc_feature (699)..(699): n is a, c, g, or t
  misc_feature (757)..(757): n is a, c, g, or t
  misc_feature (803)..(803): n is a, c, g, or t
  misc_feature (855)..(855): n is a, c, g, or t
  misc_feature (896)..(896): n is a, c, g, or t
  misc_feature (932)..(932): n is a, c, g, or t
  misc_feature (948)..(948): n is a, c, g, or t
  misc_feature (1008)..(1008): n is a, c, g, or t
  misc_feature (1017)..(1017): n is a, c, g, or t
  misc_feature (1052)..(1052): n is a, c, g, or t
  misc_feature (1124)..(1124): n is a, c, g, or t
  misc_feature (1160)..(1160): n is a, c, g, or t
  misc_feature (1219)..(1219): n is a, c, g, or t
  misc_feature (1234)..(1234): n is a, c, g, or t
  misc_feature (1335)..(1335): n is a, c, g, or t
  misc_feature (1346)..(1346): n is a, c, g, or t
  misc_feature (1383)..(1383): n is a, c, g, or t
  misc_feature (1432)..(1432): n is a, c, g, or t
  misc_feature (1459)..(1459): n is a, c, g, or t
  misc_feature (1465)..(1465): n is a, c, g, or t
  misc_feature (1474)..(1474): n is a, c, g, or t
  misc_feature (1484)..(1484): n is a, c, g, or t
  misc_feature (1506)..(1506): n is a, c, g, or t
  misc_feature (1552)..(1552): n is a, c, g, or t
  misc_feature (1570)..(1570): n is a, c, g, or t
  misc_feature (1597)..(1597): n is a, c, g, or t
  misc_feature (1599)..(1599): n is a, c, g, or t
  misc_feature (1656)..(1656): n is a, c, g, or t
  misc_feature (1691)..(1691): n is a, c, g, or t
  misc_feature (1745)..(1745): n is a, c, g, or t
  misc_feature (1751)..(1751): n is a, c, g, or t
  misc_feature (1768)..(1768): n is a, c, g, or t
  misc_feature (1782)..(1782): n is a, c, g, or t
  misc_feature (1786)..(1786): n is a, c, g, or t
  misc_feature (1825)..(1825): n is a, c, g, or t
  misc_feature (1861)..(1861): n is a, c, g, or t
  misc_feature (1865)..(1865): n is a, c, g, or t
  misc_feature (1867)..(1867): n is a, c, g, or t
  misc_feature (1881)..(1882): n is a, c, g, or t
  misc_feature (1926)..(1926): n is a, c, g, or t
  Probeset Number=SeqID_12031
gtgtgtgtgggccgcgtgtgtgggcctcttnttnnnnttttannaanngcacggananaccactcacatactcctattgtcaccccgcgacatgctcctganaacgataanaaagcacgcgnnnaattaataaataacaaacctcttcaactatcttagtgcagtatatgtgagctgtgagtggtaccacttgagcggcctgcattgctgtccagtcacgactagatagatgcgtttctgaaagttagatgttggctaatgcatgatagntacaaatatgaccacactagacaatgctgctctccacaatactctccncaacccagcnanacaccacgataaatatataatttagcatgactattgtactcagctacctagccgacagtatctgtgatagaatgactgcgagcgcgactcggaggcctggtatctgttatgntcnactattattatgncccaggccctctctatcctctacagctctgcgcatatacaggagagagcttagtatgatacatatggtgtgtgggtcgcattgtgtgccagtggctattctgtatgttacaccttacactagcagacgccgacagacgccaactattatgtctatgtnactattgcatananaattagtaatgatagtgtattgngacggtacagcgcgagatgcgatgactgaggaaaannaccancncnacactgggagattgatgcgctgactgatgacgctagctgatggtgtatttgatggagntgagtcgtcagacggggaggagacgcgtagccatattacaagatcnctatacataatataaattatcactcatcgtgtaatgttcatactacaactcnactccgcctagagtgtatgtatgtgagtgatatctgcgganctgtagctacgccacctctcatcttatcatatatantctactatcttctctnattcctactaacactccgactaaacgtgacacatctatcttcgtgtactcgccgctcganagagcatgntgatagtagaggcgcgacgacgcatcgtcgctgtngtgatgtagtgtatgtatcatcttagtctgcactatacgcctgcgtatggggttcattgctagaggatgatngacgcggtgctgactcacaaggtctctgggtggagnaccgcacagctcgacacgacatctatatgacacgcgcgctgccgtctctacacagatcnctcgtgtgctccgtnatgtgtatctgctcgtcgatgtcagtcgtgtgacaccctgcgcgcgtgcgcgcggcggccctgctatagatgtatgtgcctcactacagtgacagcggtanccgtagcctanctagatcttctctctcgtcatcgcgcacctgtctgtnagatatcatcatctgctgtagttcgtagtagagttatattaattttatnacgtatgtccgtccgcctccctactcncacacncacacgatncagactttanatttatgatcatctctataacnatgctcacgctatctcgctgctctatatctactagcacatacgtangagcagtcacgcagtgancattacgtgtcgcacttgtacgtgtancncgtgtggcagtgtgctcgctgtgacgaatctacgcatccctttgagttgtacgtctntagatcatctatgtctgatgaatgatgcagagcancgaggtctgagcgcacactatagagcgactgtgtgtgtgtgcgcgtgatgcgancgagcnatcagacgcacgtaccngtgacgagaatcangtgngtgttgtgcccggccccatatcactcatatatccatatngttgctctacatactatacatatgaataatatgtantgtnanatctcaattgctannacactatgccgtctcgatgctcgcgcgttcatgctcgatctcgn

SEQ ID NO: 2253 - DNA, 417 bp, Glycine max
  misc_feature (405)..(405): n is a, c, g, or t
  Peptide Sequence Number=SeqID_9744
  Probeset Number=SeqID_12032
aacaacaacaataacaacaatggctacttcaagaacattcatgtcctctaatctattcattttcttccttgtcatggctacaaccaatggtcaggctccagcaccaaccccttcaggtccaaccaacataaccgcagtcctagaaaaggctggtcaatacacaatgttcataagactcctcaagagcacccaagccgcagaccaaatcaacactcagctcaattcttcctccagccaaggcctaactgtgtttgcccctaccgacaacgcatttagcagcctcaaatccggaaccttaaactcgttatctgaccagcaaaaggttcagcttgttcagttccatgtccttcctacactcttgaccatgcctcagttctaaaccgttagtaacaccttacgcacgcnagctggtgatgg

SEQ ID NO: 2254 - DNA, 526 bp, Glycine max
  misc_feature (491)..(491): n is a, c, g, or t
  Peptide Sequence Number=SeqID_9745
  Probeset Number=SeqID_12033
ctaatgacgcgtctctacttcagaaacggtggcaaacgaatctggttctcaagcttcctccaaacctcaggttgccccatcatcctcctccctctcctcttctccttcctcacacgtcaccgtcaacaacaagaacaagaagaaccaaagactacactcttcctcatcaaaccttcactgttcttggcctctgttgtggtcggtctcctcatcggcttcgacaactacctctacgcttacggcttagcttacctcccagtctccacctcctctctcatcatctcctctcagctagccttcaccgctttcttcgccttcttcatggtgaagcaaaggttcacgcctttcactataaacgccgtcgttttgctcactctcggcgccggaagccttgcccttcacgcggacggtgacaagctccccaaggagacgcgcaaggagtatatagttgggttcgttatgaccgttgctgcagctgttctctacgcgtntgtgttgccgcttgtggagctcgcttacaagaaag

SEQ ID NO: 2255 - DNA, 2635 bp, Glycine max
  misc_feature (1)..(1): n is a, c, g, or t
  misc_feature (4)..(4): n is a, c, g, or t
  misc_feature (14)..(14): n is a, c, g, or t
  misc_feature (37)..(37): n is a, c, g, or t
  misc_feature (44)..(44): n is a, c, g, or t
  misc_feature (46)..(46): n is a, c, g, or t
  misc_feature (54)..(54): n is a, c, g, or t
  misc_feature (88)..(88): n is a, c, g, or t
  misc_feature (108)..(108): n is a, c, g, or t
  misc_feature (115)..(115): n is a, c, g, or t
  misc_feature (120)..(120): n is a, c, g, or t
  misc_feature (154)..(154): n is a, c, g, or t
  misc_feature (179)..(179): n is a, c, g, or t
  misc_feature (196)..(196): n is a, c, g, or t
  misc_feature (219)..(219): n is a, c, g, or t
  misc_feature (230)..(230): n is a, c, g, or t
  misc_feature (240)..(240): n is a, c, g, or t
  misc_feature (242)..(242): n is a, c, g, or t
  misc_feature (261)..(261): n is a, c, g, or t
  misc_feature (264)..(264): n is a, c, g, or t
  misc_feature (267)..(267): n is a, c, g, or t
  misc_feature (271)..(271): n is a, c, g, or t
  misc_feature (285)..(285): n is a, c, g, or t
  misc_feature (296)..(296): n is a, c, g, or t
  misc_feature (314)..(314): n is a, c, g, or t
  misc_feature (317)..(317): n is a, c, g, or t
  misc_feature (321)..(321): n is a, c, g, or t
  misc_feature (326)..(326): n is a, c, g, or t
  misc_feature (337)..(337): n is a, c, g, or t
  misc_feature (341)..(341): n is a, c, g, or t
  misc_feature (349)..(349): n is a, c, g, or t
  misc_feature (353)..(354): n is a, c, g, or t
  misc_feature (396)..(396): n is a, c, g, or t
  misc_feature (403)..(403): n is a, c, g, or t
  misc_feature (416)..(416): n is a, c, g, or t
  misc_feature (418)..(418): n is a, c, g, or t
  misc_feature (445)..(445): n is a, c, g, or t
  misc_feature (454)..(454): n is a, c, g, or t
  misc_feature (460)..(460): n is a, c, g, or t
  misc_feature (468)..(469): n is a, c, g, or t
  misc_feature (471)..(472): n is a, c, g, or t
  misc_feature (486)..(486): n is a, c, g, or t
  misc_feature (491)..(491): n is a, c, g, or t
  misc_feature (506)..(506): n is a, c, g, or t
  misc_feature (534)..(534): n is a, c, g, or t
  misc_feature (572)..(573): n is a, c, g, or t
  misc_feature (586)..(586): n is a, c, g, or t
  misc_feature (610)..(610): n is a, c, g, or t
  misc_feature (613)..(613): n is a, c, g, or t
  misc_feature (626)..(626): n is a, c, g, or t
  misc_feature (636)..(636): n is a, c, g, or t
  misc_feature (641)..(641): n is a, c, g, or t
  misc_feature (646)..(646): n is a, c, g, or t
  misc_feature (681)..(681): n is a, c, g, or t
  misc_feature (705)..(705): n is a, c, g, or t
  misc_feature (722)..(723): n is a, c, g, or t
  misc_feature (734)..(734): n is a, c, g, or t
  misc_feature (750)..(750): n is a, c, g, or t
  misc_feature (757)..(757): n is a, c, g, or t
  misc_feature (764)..(764): n is a, c, g, or t
  misc_feature (773)..(773): n is a, c, g, or t
  misc_feature (777)..(777): n is a, c, g, or t
  misc_feature (822)..(822): n is a, c, g, or t
  misc_feature (824)..(824): n is a, c, g, or t
  misc_feature (827)..(827): n is a, c, g, or t
  misc_feature (831)..(831): n is a, c, g, or t
  misc_feature (833)..(833): n is a, c, g, or t
  misc_feature (850)..(850): n is a, c, g, or t
  misc_feature (872)..(872): n is a, c, g, or t
  misc_feature (894)..(894): n is a, c, g, or t
  misc_feature (897)..(897): n is a, c, g, or t
  misc_feature (914)..(914): n is a, c, g, or t
  misc_feature (916)..(916): n is a, c, g, or t
  misc_feature (919)..(919): n is a, c, g, or t
  misc_feature (927)..(927): n is a, c, g, or t
  misc_feature (931)..(931): n is a, c, g, or t
  misc_feature (945)..(945): n is a, c, g, or t
  misc_feature (962)..(962): n is a, c, g, or t
  misc_feature (977)..(977): n is a, c, g, or t
  misc_feature (990)..(990): n is a, c, g, or t
  misc_feature (1015)..(1015): n is a, c, g, or t
  misc_feature (1026)..(1026): n is a, c, g, or t
  misc_feature (1087)..(1087): n is a, c, g, or t
  misc_feature (1103)..(1103): n is a, c, g, or t
  misc_feature (1118)..(1118): n is a, c, g, or t
  misc_feature (1128)..(1128): n is a, c, g, or t
  misc_feature (1139)..(1139): n is a, c, g, or t
  misc_feature (1167)..(1167): n is a, c, g, or t
  misc_feature (1246)..(1246): n is a, c, g, or t
  misc_feature (1253)..(1253): n is a, c, g, or t
  misc_feature (1274)..(1274): n is a, c, g, or t
  misc_feature (1279)..(1279): n is a, c, g, or t
  misc_feature (1335)..(1335): n is a, c, g, or t
  misc_feature (1342)..(1342): n is a, c, g, or t
  misc_feature (1352)..(1352): n is a, c, g, or t
  misc_feature (1413)..(1413): n is a, c, g, or t
  misc_feature (1482)..(1482): n is a, c, g, or t
  misc_feature (1569)..(1569): n is a, c, g, or t
  misc_feature (1588)..(1588): n is a, c, g, or t
  misc_feature (1600)..(1600): n is a, c, g, or t
  misc_feature (1643)..(1643): n is a, c, g, or t
  misc_feature (1658)..(1658): n is a, c, g, or t
  misc_feature (1709)..(1709): n is a, c, g, or t
  misc_feature (1743)..(1743): n is a, c, g, or t
  misc_feature (1775)..(1775): n is a, c, g, or t
  misc_feature (1900)..(1900): n is a, c, g, or t
  misc_feature (1938)..(1938): n is a, c, g, or t
  misc_feature (1959)..(1959): n is a, c, g, or t
  misc_feature (1993)..(1993): n is a, c, g, or t
  misc_feature (2053)..(2053): n is a, c, g, or t
  misc_feature (2285)..(2285): n is a, c, g, or t
  misc_feature (2388)..(2388): n is a, c, g, or t
  misc_feature (2407)..(2407): n is a, c, g, or t
  misc_feature (2428)..(2428): n is a, c, g, or t
  misc_feature (2538)..(2538): n is a, c, g, or t
  misc_feature (2618)..(2618): n is a, c, g, or t
  Peptide Sequence Number=SeqID_9746
  Probeset Number=SeqID_12034
ncgnaatagcatgnctatgcactgccatgaacgatantgacgtngnacggatanggaccggcgagactgcgactacgatagtcgactncgacactagattcagtagtngcatcgnactantacatcgctaatctactcgctggtcatggtcatnagtacttcgtcgtctactgatgatnatattactgcatgctcnatcactcctccactccgaagtangaatcagctgncgacgacgtnangcagcgcgtctcgtcgtanacngcnatcntcgtcagatgcagnagctataacgntctcctcatgtactgcgnagnatcnatgantactacgtagncatnctagtgtnagcnntcgcagtacatgatcacgagacacgtctacggcatagcatancatgcancatagcactctgncnacagcacgcatcgtgacgtagtctagntatagtcgnctcgtncgagtaanngnntcatcatcatcagncagcnagcatcacgatcgangctggtcgagcacgatgccatgagctgnttatgacatactgtaaactcagcgtcgacataggtagnntgtggacgagtangtacgctagatacgtgcatgcatncantcatactacagtngcgcatgagntgacnactgngttaaagcgctcatcgatacactgcgcacgacatngctcgtgccctcgtactgaaacangcgtagctatctactgnncaacgatgacnacactcatcagcagancatcacnacacgantcatacagntacntcgtccatgagtcggcgtatcgcatcatcgtgactacgcgactcntnacnatangnactacacgctactcgtntactcatgctactcgtcgtgantctctgtatcatccagcaccanctncagcagccgtgctatcncngcnctatacanttgngcgcatacgcaganggacgaggagcgactgnctgagaatagcatcngtgctatgcggcngtagtataatcactacaacatgtgnacagtcatggnacacggtcggcactatagcatactacatacgtatgactccgagcagtgcagcgcgtcagcngctgtacgtagcgtgngttgatgactgcacnttgacgtcancacgtcatcangacgatatgatccattcacatagctacncgaggccgcgatacgcagtgagctgctatacatgtgtgcttatctcggcacatcagcagctatcagacgtctgacagtngacaatngatatcgcgtcgtggcgctcncgacngtcacgatgacgatggcatcacgctctcggatagtagagcgtactctagtgcagtngacgtcncgacacatcncagtggcatcgtcatgcagcacgcatcatagagtcatgataatatctagtgtcgcgcgctngcagatacaagtgtatgacaatgagatggtacgtgtctacgcacatcgctcatgacgagtctacgcagntagtggagtgctaggatgcgtatatgatcgcagacgacagagcatacgtacatcatgccacgctatagcaacagtcaatgagacagntagtgaagtatatactgtngtgcagatcatncgctcacatgctgagcatcgtcgctccacgcgacgctcactcncgtgacatgcgacgncactcgcacagcgtcactacgacgccatattatacgtcatgctacgtcacncctctcgactctctacatgtctctcgctgttgtnatctgtgtcatctcttgcagtgtgctgtctgntctgcagcatgctcggtacagacactcattcagacgcatgtcggcactgacatctgctcgacgtgcagtcactgacagctcgtgctaggttggcagtgcggcatacgtcgtgtgtatactataanaagaacacgacgtacgtccgatacggcttcctacgcgncacatcatcagcacatcactncgctctgctacgctatgcgtactattatactctntccatctcacctctcacgtacgcattgctctctcgataactcatggtcacgacgctcttngatcatgaagctgccgactatcatggcgtctgcagagcagcgacgcttcgatgatcgcagcagcgcgctcctgtgccacatctcgcgcgacgacagcacgtgtaattgcatgcatacgtactttgacgtcggcacagcagttactcatgtatatagcatagagtgatgcgatgcgcgtcgatacatacgatactcacagaatacaatgaggtgatactagactactcatganttgtagaacgatagtcacacatcaatcacacaactgagtagatagatgtcgatagcacgagtaagtgaagtgcggagccgactcgtagcaggactctagtgcngcgcgcatcacgaatatanatctacagaatactcgacacnaccgcagcaccgtgagatagtgagtgatgcgcagctaccgcatcaccaccctgagagtgcacattcgctctctctctccctgacactcatcacctagacgcgggatgagngctatccggatgctatcgagctcgacgcagcaggtgctcgatccttctgagctgtacgtcagccaccatactggtcgagncacctagaagcagatag

SEQ ID NO: 2256 - DNA, 589 bp, Glycine max
  Probeset Number=SeqID_12035
ttttttttttttttttttgaaagggaacggaccgactgcgagaaatcaaaccacaacgtgttacattacattacatggcatctcatgaaacttgaagctacacatatatatttgatagtaacataagggaaagagaagacggcgaaaatagaaggtgaaagttactggacaaacaacatctcttattcattcatctctttcatccttgcttccgaacacaactgtactgaattagctcgtatacagacaccgacctaaggccgccacgatgatgatgactggttggagcaagagcatcgatgagcgcggaggatcttgacagagatcaaagtggaagagctctgagcgacgggtgctcaacgagagctcacgaggaaagggtgctggcacacgccgcattctatcgtctccgagccagaggctgggacctgcacctggaggtgcactgtgcagatggggcatgcgacctcccgcattcgcttgccagaagatccgtctgaagacctcgaacctgaagatgacttcttgtttatatccatcgcttcctgaagttttctggcgagatcctcatggctcggaacaacaggtc

SEQ ID NO: 2257 - DNA, 1505 bp, Glycine max
  misc_feature (9)..(9): n is a, c, g, or t
  misc_feature (41)..(41): n is a, c, g, or t
  misc_feature (82)..(82): n is a, c, g, or t
  misc_feature (84)..(84): n is a, c, g, or t
  misc_feature (107)..(107): n is a, c, g, or t
  misc_feature (150)..(150): n is a, c, g, or t
  misc_feature (152)..(152): n is a, c, g, or t
  misc_feature (161)..(161): n is a, c, g, or t
  misc_feature (169)..(169): n is a, c, g, or t
  misc_feature (201)..(202): n is a, c, g, or t
  misc_feature (212)..(212): n is a, c, g, or t
  misc_feature (216)..(216): n is a, c, g, or t
  misc_feature (221)..(221): n is a, c, g, or t
  misc_feature (225)..(225): n is a, c, g, or t
  misc_feature (230)..(230): n is a, c, g, or t
  misc_feature (232)..(232): n is a, c, g, or t
  misc_feature (239)..(239): n is a, c, g, or t
  misc_feature (262)..(262): n is a, c, g, or t
  misc_feature (288)..(289): n is a, c, g, or t
  misc_feature (293)..(293): n is a, c, g, or t
  misc_feature (316)..(316): n is a, c, g, or t
  misc_feature (322)..(322): n is a, c, g, or t
  misc_feature (445)..(445): n is a, c, g, or t
  misc_feature (448)..(448): n is a, c, g, or t
  misc_feature (481)..(482): n is a, c, g, or t
  misc_feature (498)..(498): n is a, c, g, or t
  misc_feature (507)..(507): n is a, c, g, or t
  misc_feature (509)..(509): n is a, c, g, or t
  misc_feature (512)..(512): n is a, c, g, or t
  misc_feature (547)..(547): n is a, c, g, or t
  misc_feature (584)..(584): n is a, c, g, or t
  misc_feature (594)..(594): n is a, c, g, or t
  misc_feature (623)..(623): n is a, c, g, or t
  misc_feature (654)..(654): n is a, c, g, or t
  misc_feature (680)..(680): n is a, c, g, or t
  misc_feature (713)..(713): n is a, c, g, or t
  misc_feature (730)..(732): n is a, c, g, or t
  misc_feature (736)..(737): n is a, c, g, or t
  misc_feature (789)..(789): n is a, c, g, or t
  misc_feature (850)..(850): n is a, c, g, or t
  misc_feature (854)..(855): n is a, c, g, or t
  misc_feature (857)..(857): n is a, c, g, or t
  misc_feature (878)..(878): n is a, c, g, or t
  misc_feature (903)..(903): n is a, c, g, or t
  misc_feature (905)..(905): n is a, c, g, or t
  misc_feature (918)..(918): n is a, c, g, or t
  misc_feature (920)..(920): n is a, c, g, or t
  misc_feature (987)..(987): n is a, c, g, or t
  misc_feature (1142)..(1142): n is a, c, g, or t
  misc_feature (1295)..(1295): n is a, c, g, or t
  misc_feature (1313)..(1313): n is a, c, g, or t
  misc_feature (1473)..(1473): n is a, c, g, or t
  misc_feature (1482)..(1482): n is a, c, g, or t
  misc_feature (1487)..(1488): n is a, c, g, or t
  misc_feature (1490)..(1490): n is a, c, g, or t
  Peptide Sequence Number=SeqID_9747
  Probeset Number=SeqID_12036
cgtgcatgncatagttcagacgatgcgtcaatgctgtgcantgtcgtgttagagagagtcaggcaacgccatatgatcatantnacacgcgtagatatgtgtgttanctggttctgtgtgtgtcgtgagacagaactaactgagtgacananctatgcaanaggagagnacatggctaagcagtacgagtgactgaggagnnttggtagagnggcnaaggnattngagtncntattatngtatcgcgactgtgtaatctgcntattttactagatataagacaacacnncacncgtgctcattcatgtaggacccncctgcntttttattatttattgaaatgttataataggtctgatcttatgaagttaataggtcgcacagcggtgtgttgtgtagctctaaggcaactgatcagtatacatatggataggtgcagagtgtnatncgtgtgttagtggtatattatgtgataatcctnntgtggtgttgtggganagagggggngnganatatatggagtgtgatacgcataagcgtgtgtggntcgtgagaggaggcgcgtgcagggctgtacggcagcncgtacgcggnggtgtattgtgtgtgtgggtcgtctcatnatattatgacaacaacaccactacactgccntaccatagtatagctgtatgatctcnccatcacgctcgagctcctagtatattatacanttattatatacgtatcnnnccgnntctttattatcttctttttcttcttttattattataattctttctatttctnacaacaacttaaataatacaaagcaacaaagagcgacgacaaagaatatgtttattgttcnttanngngcacgttgacggcgtgtctgngggtcgtggagcaggagacgtgcancnccgcgcttccgcntntggtcttcacttccaaacaacataggtaaaaagactggttgctgtccccagtccaaccacgaacganactatacatgtcagatataatgagagaattatttttttgtttattacaatattgctatcttgtgtcctttcttgtgctttgtattcgttcgttgttttgttatatatacaggtagatgtatattctattatgtactatattatgttgtgatagtngtggagagctaagatatttgttactatttatatttttctatatgcggagcacaatcgtatcttttttgattatctattatattgttgtgatcgcgtagccttccgttgttcgtgattgttgcaggtggtgtgggtgagggtctcgcacagaanaatacttgactactatgnttacgcctatattcccgtagccagctcgaccggtgggcggctcagcgctatgtatagggagggagagagctcttcctctatcgtgggggggggggactctcaggggtgtgtcgaggcgggttggcgggagcagacgcgcggcagctcggggcgtgtgctnaaggagggnaaggnnanggcgggaaaaaaaaa

SEQ ID NO: 2258 - DNA, 1672 bp, Glycine max
  misc_feature (29)..(29): n is a, c, g, or t
  misc_feature (34)..(34): n is a, c, g, or t
  misc_feature (38)..(38): n is a, c, g, or t
  misc_feature (52)..(52): n is a, c, g, or t
  misc_feature (62)..(62): n is a, c, g, or t
  misc_feature (68)..(68): n is a, c, g, or t
  misc_feature (72)..(72): n is a, c, g, or t
  misc_feature (94)..(94): n is a, c, g, or t
  misc_feature (96)..(96): n is a, c, g, or t
  misc_feature (134)..(134): n is a, c, g, or t
  misc_feature (170)..(170): n is a, c, g, or t
  misc_feature (221)..(221): n is a, c, g, or t
  misc_feature (230)..(230): n is a, c, g, or t
  misc_feature (252)..(252): n is a, c, g, or t
  misc_feature (312)..(312): n is a, c, g, or t
  misc_feature (386)..(386): n is a, c, g, or t
  misc_feature (389)..(389): n is a, c, g, or t
  misc_feature (433)..(433): n is a, c, g, or t
  misc_feature (450)..(450): n is a, c, g, or t
  misc_feature (593)..(593): n is a, c, g, or t
  misc_feature (674)..(674): n is a, c, g, or t
  misc_feature (870)..(870): n is a, c, g, or t
  misc_feature (900)..(900): n is a, c, g, or t
  misc_feature (938)..(938): n is a, c, g, or t
  misc_feature (984)..(984): n is a, c, g, or t
  misc_feature (1019)..(1019): n is a, c, g, or t
  misc_feature (1036)..(1036): n is a, c, g, or t
  misc_feature (1040)..(1040): n is a, c, g, or t
  misc_feature (1066)..(1066): n is a, c, g, or t
  misc_feature (1143)..(1143): n is a, c, g, or t
  misc_feature (1213)..(1213): n is a, c, g, or t
  misc_feature (1363)..(1363): n is a, c, g, or t
  misc_feature (1430)..(1430): n is a, c, g, or t
  misc_feature (1598)..(1598): n is a, c, g, or t
  misc_feature (1659)..(1659): n is a, c, g, or t
  Probeset Number=SeqID_12037
ctgcgacagaacgtctcaatcgctgggtngagtnaganaagtagtctagatnatcattatgnacacgnatgngtatcggaacgaaacgtaggangnctcgctaatgtagtacgtgatcgtagtggtcattatangagtgctgagtcatcacaatgtcatcgtatacgatnatgttgtgacatatcgcatatcgtgtgtatatatacacgcagtcgtagagnacgtgagangagagtgaagtataaacgtgtntagtcgagtgagaaatactagatgaccatgaatgaccgaggacctaccataccagatgancaatagctgcagacaggacacagcccagcagcatcatacatagacgtgcgtgccacatggagattcagatcacntgncgccgacacacgagatgatgagcatctgtgtttgtatatcatangcacgagctatgcgccngtcgagagtagtatgtggtacgttagtgcaggggcgtgcgccactagccatattgtcacacgtagacaacgagacgatgatcaaggaaaatggcgcagcatcagaggttatcgatagatgactcggtatgaggtagatctagnttcgtcagctaactctagaggtatgcagcgtagtggatctgagactgcctaaacccatgatagtaacgacgcgtgttgganactcagacaccgatgtacggtgcgcaaggctcgtctgcagaggtcgatgactcccatacagcgccaaatagatagtgcaaggagcaagaatagatattagtctcctatcaatatatcagcctctactgaggatatgatgtcgcacagagacacaataatatggttggctctatatctagtaattaggtgctcagtncaataacatacctagaatacaaagtctagncggagagcagagcacgtgtgctgctgctctacagatgnagttcggatacctccacaggacgtcctgcgacagcctacaggcggngtcgatcaattatcggcccagcggcgacattgtgnggattcgtatgtgaacnctanacctaggtcgcgtcgcctagcacatntactagcgtgacagtgagatggagacgccatgcactatagagagatgcaggactcgactagagctagacgagacgtngggctgtgagttcgataattagagactctggtatggatgctagtataccgaggagatgagggtcatcgancacgatcagtcttgtgatacaactgtttcaacctaatacgcgaggagcggggagtgcgctgcgatgacaggagagctgcgattacatagacatagactgtatatattctctagtagctagtacgacaaggtgaatctaggatgatgaggnagatagactggatgagatgatagatcaacttatgtagacgcatgtactgcgatctaagaccacaacnagttctagggtacttctgagcgaggagtggtaactgtaataacacacacgtgcgacctcagacgcagtaagctgagaagaaggaggagagtgaccttcccatcccttacctcgtatcgatcgctaggagagggaggcgcgcagctcctatttaattgtgaaccgcacnaatagtgatttatgcgctggcagcgctcgaagtaatacaagaggggaagagaagaagaaanaagataaaataac

SEQ ID NO: 2259 - DNA, 1524 bp, Glycine max
  misc_feature (149)..(149): n is a, c, g, or t
  misc_feature (173)..(173): n is a, c, g, or t
  misc_feature (296)..(296): n is a, c, g, or t
  misc_feature (364)..(364): n is a, c, g, or t
  misc_feature (430)..(430): n is a, c, g, or t
  misc_feature (467)..(467): n is a, c, g, or t
  misc_feature (560)..(560): n is a, c, g, or t
  misc_feature (602)..(602): n is a, c, g, or t
  misc_feature (640)..(640): n is a, c, g, or t
  misc_feature (656)..(656): n is a, c, g, or t
  Peptide Sequence Number=SeqID_9748
  Probeset Number=SeqID_12038
ctcgtacggcagtagtcgtctcatggctcggtgtgctatacatctcgacgacgtgcgtgcaatgcgtcgagatacgagcgcactcgtggcatctagacatgagtgtatactgagcagagaatgcagctgcctgggcgcgcaggtagagngatgagcgtgcgatgatgcatacnatatcgtaaggtatttactatggacccgcatcacacgtacctatctcagtcacgcgctgcgtcactccgatcatagcagcatcagagtatattctctcggtccccgatgcaacgagatgtatnagttgcagcatggtccctgcgtaacttatgcgcagacacgtgcatctatacagatactctaccctgcntcgttctgctctccttgagatgctgcggttgctctacacgctctcaagcgaatattgatcgacagngtcgtggccgtcgtgagagatcgtctcgactcacagntatgtaatatagtgcaagccgcggcggctgctgcgcacactcagttcgcagcgtggttagcatatatcatcagatactcactgcatcactcgngtatgcatgagtgaatagtgtgatctgataccatattctctntcgttctatcatggtcatcctgcgtagagcgggcgcgngcgcgctgacagcacnatcacggtattgcgacacctctcagaccgagcgtgtctagatactcactcacggctatgcgtcatgcgcaatataatcataacatcacctccgctcccgtcaccatccctgcctctgccagtgcaatacaaacagatctgacgtgaacaatcgtcgtcggcgacgtatctatactgcagatgtccaggttagggtgcatggatgagtgtagggagagtcccacgttagctgggcgggtgcattccgcttagtcgacactaccggtgaacgcacgagtgtattagtcgtatataatatagaatgggggcggaccgttgatggcaccgtcgcctacgcgcgttgttatggagtctgctgtctcggcaactcaaatatttgtgaaggacgtcggatgcttgacccagaccgtattaaagtagtaggcggcggggctatatctgctagttggaaattcgtggattaacctttagcatgtacggctgtgcggcgtgcgttggcttttctgatcagaggaggtgctaagcggcgcgtgggttctgcgagctccacggcgcgcgtctttggtgtttaaacataaggtcttctactacccatgtccccgtagtttcccctcccctatcatcacaataattcgaaactgtgttacgcttgccttttcaaacagggctaaggcaactttcctgagctacagtaagacaaagagaagggggcacgaatacatcctgtcgggcggggcgtggggggagggaacatattcgtctaagacacacgggccttcgcctccagcggcgggccccgcagggttttagtgggtgtgccccagacgtcgaacagtcacttacgatgagtagtacctaagaggcacgag

SEQ ID NO: 2260 - DNA, 453 bp, Glycine max
  Probeset Number=SeqID_12039
catactatttcgaggagttggtcaccttctggaacatcgcattcccacggtggctggagctgctgatccgtttgcaggccaatggcctgcgtcggttcgagctgcagtgtgcactccctttactcaggagctgcctggagggtgggaagaactggcacgttgtgcagcagatccctgaggtgcgcatcacaagcaccgatggcaagaagtacataaggtacaacaaggcccgccgcatctacgagacgaatgctcagtgtgaagagaagtctacctaaaaatcttggagtacttggcagctgtttggtagacatgtttggtccgaccgtccctactgctccaggagatgtcgtggtttacatcagggagtcgtcgtgttgttactagaaatggtttgatgaggcctgaggaatgagtaccgtatttttggtgaatcagacagcagatggtctt

SEQ ID NO: 2261 - DNA, 920 bp, Glycine max
  misc_feature (601)..(920): n is a, c, g, or t
  Peptide Sequence Number=SeqID_9749
  Probeset Number=SeqID_12040
accgtttgttctattcttaactcaacttctgctacccactctcttcttccaagtccaaccacgcttttctctacagtcatgggcaaggtcaagatcggaatcaacggatttggaagaattggccgtttggttgccagagtccctctgcaaagagacgatgtggagctcgttgccgttaacgaccctttcataaccaccgataacgtgacctacatgcttaaaaacgacagcgctgcccgacactggaagcatcacgatgtccccgctaccgggggggaggggcgggtctcttcccggacaacccggcgactgcctttggcgccccgaaccccggacgaaggccgcagggcgggcaacctggaatcggaaacgattgtccgccctcgaccggaggttcacgccgaaaaaatcacaggaccgcccgcaccagtcgaacgcgccggggccccgaacccgtaagggacggaagcacccacacaaccggatggcccccctgagctagtttttgattcggcttcaccaccccccaggatcatcacgtacatcgcccccgccaggagacacccggaaaccgcacgacaggcacaactcacccgtcggnnnnnnnnnnnnnnnnnnnnnnnnnnnnnnnnnnnnnnnnnnnnnnnnnnnnnnnnnnnnnnnnnnnnnnnnnnnnnnnnnnnnnnnnnnnnnnnnnnnnnnnnnnnnnnnnnnnnnnnnnnnnnnnnnnnnnnnnnnnnnnnnnnnnnnnnnnnnnnnnnnnnnnnnnnnnnnnnnnnnnnnnnnnnnnnnnnnnnnnnnnnnnnnnnnnnnnnnnnnnnnnnnnnnnnnnnnnnnnnnnnnnnnnnnnnnnnnnnnnnnnnnnnnnnnnnnnnnnnnnnnnnnnnnnnnnnnnnnnnnnnnnnnnnnnnnnnnnnnnn

SEQ ID NO: 2262 - DNA, 1717 bp, Glycine max
  misc_feature (1)..(31): n is a, c, g, or t
  misc_feature (36)..(38): n is a, c, g, or t
  misc_feature (65)..(65): n is a, c, g, or t
  misc_feature (69)..(69): n is a, c, g, or t
  misc_feature (396)..(396): n is a, c, g, or t
  misc_feature (1102)..(1102): n is a, c, g, or t
  misc_feature (1145)..(1145): n is a, c, g, or t
  misc_feature (1658)..(1658): n is a, c, g, or t
  Peptide Sequence Number=SeqID_9750
  Probeset Number=SeqID_12041
nnnnnnnnnnnnnnnnnnnnnnnnnnnnnnnccccnnnccgaaatctgccagcctatttagtatnaganctagcattatctaatagagtgtttattagtaatgtttgaagatgcagagaagggatggcagagagatggcacgctttgtttacagacaagcgggcggataagagggtgtgtgggtgttatagtgcgtttgagcatagatgaagagggcagccgctgacaaataacactatgcttcagccccacagccgcggtatcgacgctctacatgaccttcatgccttgcgtgctccgtgacactacaatgatgtgcgcctcacacgaatcgccacacatcgtcacgcgatcaatcactcactccgctagcactaccgccctcacacacccgcnacgatacgcgccgataacgaaaacgccgccaccaccacgcacaaacaaagacatgggcgtagtagcctccgtctctctcctctcgtcggtctgtgtcgcgcggccccgccgcgcggcaccgcgcgcccctccagcccgctccgcggcttggtccgggcgagtcaggctttgagtgtgtccgaggcgagcggtgcgtctcgaccctgtacgcgatgggcgccgccggcgggcgaagttatttcgtaggcgatcctatggaggaggtccacgtgcacatatattcgcatctcctgagacaccagtcaaccaccaaccgaacccgtgattgtttatgctagcagagcgacaagtcgagatcgcacacggggcgcgcatgcactggagggtagtgtacagactattagatccgaatcactatctacgctcgcgctgcgctctctgtccggtcaacggcggctcgggcagtcggaccgcaccctccacccgtcgtctgtcgcctgtctacgagataatccctgttaattatttcgcgctcattgctccacatcacgcgcatttactcatgtctgctatcaacatctctctcgtgcgtggtgtgtgttgtaaacgataggacatgatagtgaatgaagcacacaaaaccatcgttgtgtacgttgtgcccacactcccgcggatttattttgcgtgttatctgttgtatgtntagagtcggaggtggtcagtaccacgacgatgatatgttaatnattaagtattagatgtacactagaaactacctatctctcctcatcatcgcgcgaatgaaaggaatatatggtgtatgcgtcataatctttcattgtagatttgagtacggtgacttgtgtgctagatatatatcttcgccggtcgatcacgcccctcatacatatgctcctccgcgccgattctatcgctattgtttctgaatatcaatagttcatcttatctctctcatatcaccgtgtacttgtatctctatactctctgacacaatacaatcacaacgcagacacctctactacacacgatcgatgcgtgaaagtatacccctgcgagctagccatagctaaccgagaagagacggacgaagagcacgaccgtcgtgagtggttgcgggtacgcagcgcaggcgaggagtcatcgtgagaggagtgacacgtgcacctagtggactactctataggtgtgccgtgtactccgtatgcaacatctctccgatagacggtgagacgatcgcnagtaatcgcacggatcacatctacgactatcaatcagtcgacacgaccatacacattag

SEQ ID NO: 2263 - DNA, 1396 bp, Glycine max
  misc_feature (202)..(202): n is a, c, g, or t
  misc_feature (267)..(267): n is a, c, g, or t
  misc_feature (407)..(407): n is a, c, g, or t
  misc_feature (456)..(456): n is a, c, g, or t
  misc_feature (615)..(615): n is a, c, g, or t
  misc_feature (656)..(656): n is a, c, g, or t
  misc_feature (900)..(901): n is a, c, g, or t
  misc_feature (1061)..(1061): n is a, c, g, or t
  misc_feature (1076)..(1076): n is a, c, g, or t
  misc_feature (1193)..(1193): n is a, c, g, or t
  misc_feature (1209)..(1209): n is a, c, g, or t
  misc_feature (1248)..(1249): n is a, c, g, or t
  misc_feature (1281)..(1281): n is a, c, g, or t
  misc_feature (1288)..(1288): n is a, c, g, or t
  misc_feature (1314)..(1315): n is a, c, g, or t
  misc_feature (1318)..(1318): n is a, c, g, or t
  misc_feature (1356)..(1356): n is a, c, g, or t
  misc_feature (1359)..(1359): n is a, c, g, or t
  misc_feature (1371)..(1371): n is a, c, g, or t
  misc_feature (1380)..(1382): n is a, c, g, or t
  Probeset Number=SeqID_12042
ccagatcagagtcctccagactcgtctacaacacgcctcgacgcaggcgacacgtgtatgtgtatcagcgtggattatggtacgtatagcaccatattcacatagtttcatcggattgctctatgatggtaaatcgtgtgttcgatctcttatctctgcggccctagaacacgattcccagagcagagagagagagagccancgctacagcacaacgagtgtctcttgcatgtgcaactagttagttctctctggcactcgtaccantaatatgtgtagtagtccggtctgcgtcgcaggatgcagacccgagtacaggagctaggaggatggcaaggcaaagaatacagaatgtagaagaactggcgcgcgggccgcgatagtcactcacctgcgcgtagcgtccnggcacgagattggcacaggtcctaacacagacatactgcgatcattganctagatagacatatctatatataccttgtgtgatggtgttgatttaccatataggacagtctaatctagtacgagctgtcgcggggagggggtggtgtgaacctttgtggtggggcggggctgttatgtcggtggggtcactacacacacaagacaggngggtatggtatgccttgctagcctggcgtgtggtgctgtgnctcatcctaacgtcatactataatttcatcgtcggttgaatataactacaataacctcaacaccactcaacatgcctgacgtattaaacttagtgtagagaaaggtggtggggtgtttattacatcctctcctatatggcaatccaaatttgtatctgttatgttttctagtgctgccctcaatccggacgacaccacgagatgtatgcgagtagataccaagagtatgtgtggggctgatttnntctatgcctcactatctaaataaacaacttactatagtgtcttcccgcacgacagtggggacccacacactacactaactgttttgtgggtagaggggttttaagagcctgatagaacaaaggccggcgcgtgtgatggagtacagagaccgagatatanaacaaaaaaataaanagaggataatatgggatattgtttcttgtatggtttctagtttctttatgtcattctccttcgagcccgattaacgacgcttgtagtatatcattatgtgttgttaattctgttatnattctactggcttgtntgctttctgcttcgtttttgagatgggggggaggggaannccctcgctcctgtcatgtcactcctcttattngggggcnctcttggtagcccataatttagcccnntcnagggagggtattatttttttaatttgtgtctttaatanttnagaaagccgggnacgggggannnccacacccccaaaa

SEQ ID NO: 2264 - DNA, 733 bp, Glycine max
  misc_feature (27)..(27): n is a, c, g, or t
  misc_feature (59)..(59): n is a, c, g, or t
  misc_feature (65)..(65): n is a, c, g, or t
  misc_feature (68)..(68): n is a, c, g, or t
  misc_feature (563)..(563): n is a, c, g, or t
  misc_feature (577)..(577): n is a, c, g, or t
  misc_feature (651)..(733): n is a, c, g, or t
  Peptide Sequence Number=SeqID_9751
  Probeset Number=SeqID_12043
ataaattatttttgtatgctaattgcntaaaatgatgggggatgtctcatgattcatanatacanaanaatactgtactttgtttttagtttcagtaaatcacttcatcttttgtctgcgggttgagagcttattttttatgaggcgtagaaacatgttattcaagtatacaaggataacacaataataattatttctttctgtgatagcgttgcctacctcaaatcactacaactttcttgtatttgcaaattgcaatcacgatgattgttgaggaatttaggagtttgttgcagtgcactcaaaaataaaggatagaaggttcattttgtagtccttgattattaatgtaaataattagatataggtgaaggggattgaattttgcatttgcatgtactgtggactagcagaagactgaggttaaccataggaggcactagtaactttgactagtatgtatgacaaaaaaacatctctttgaaatcagttacaagccatgacttaatgctggcttcacacttttaagtcacttaactagtttgcttgaaagtgtgtgggtnccatgcctatttanaaattgactccacctcttaatagctgatcttggcaagttcattataagtttctgttgatatcctagagggaaannnnnnnnnnnnnnnnnnnnnnnnnnnnnnnnnnnnnnnnnnnnnnnnnnnnnnnnnnnnnnnnnnnnnnnnnnnnnnnnnnn

SEQ ID NO: 2265 - DNA, 1272 bp, Glycine max
  misc_feature (1)..(1): n is a, c, g, or t
  Probeset Number=SeqID_12044
naaatcctctctctctctctctgtttctcaatttctctggagaatcatggtgaatgccaaagggtcaaccaaaaaatcgaatcttgatcggttcctccattgcacaacacccttagtccctccccaatctctcccaaaggcggagattagaaaactaaatcgattgtggcatccttgggacagagaaaaggtagagtttttcaggcttagtgatctatgggattgctacgacgaatggagcgcgtacggagctagcgtccccattcatctcgccaacggcgaatctctcgttcaatactacgttccttacctctccgccatccagattttcacctctcattcctccttgatcagggaagaatctgaagatggggaaagctatccctttagtgactcaggtagcgatgagagtgtctccggggaagatggggtcttgcatctgaatgatcgtttgggttacctttatctccagtactttgagagatcagctccttatactagagtccctctcatggataagatcaatgagttggctcagagatatccgggtttgatgtcgttgagaagcgtagatctttctccagccagctggatgtctgttgcttggtaccctatttatcatataccaatgggaagaaccattaaagacttgtccacttgtttcctcacttaccacactctttcttcttctttccaagatatggagccggaagagaacggaggggagaaagagaggatgagaaaggaaggggaagacataactctcctcccatttgggatggctacttacaagatgcaaggcgatgtctggctttcgcacgaccacgatgaccaggagagattggcttcgctttgtagcgttgcggattcgtggctaaaacagcttagggtccaacatcatgacttcaactacttctgcaccatgtcgatgactagtcctcgtggctaaaaacaaacccggtttccatgtttgtttgtttgtctgctcattgtcatcgtaaaagtcccaccgtttctttgtttatggaaccgctggcgttttctaaaaagagtgatctggcttttgtagcgttttggttaggatatagcgttttaagacacctaaccttttgagaaaagtgtatgtcggtatatagagtttgttgtcttgttgaaacagagtaatcgttgttacttgttgcgtgttgaaacagagtaaatgctttcttgtaagtttatattacatcatccttcacttgaaactttttttgtgcctcaaaaaaaaaaaaaaaa

SEQ ID NO: 2266 - DNA, 282 bp, Glycine max
  Peptide Sequence Number=SeqID_9752
  Probeset Number=SeqID_12045
atgagaatttaattgtttcaccctgcttgagtgcttgtggtccaaataaaatattgatgaagttgagatcccagggaggtatcaaggctttactaggagttgtaagatgtgatcaacctgatgttctttcacaagttgcacgaggaattgccaacttcgccaaatgcgagtctcgagcttctagtcaaggtttgctttcttgtcaatatttattgccaatggtgcaaattttactgaaaatggacatagttgtagcttgccagctgcaaggccattgactta

SEQ ID NO: 2267 - DNA, 554 bp, Glycine max
  Peptide Sequence Number=SeqID_9753
  Probeset Number=SeqID_12046
ggaaaagtgaagtttggagacccccccctcccatgtgtggggtctttcgatgtggatgtgagcttaaaagggaatctaatcctgtcccgccaggtggatcagcccggcataattgcccgtgttggaaacatcctgggtgaccaaaccgtgaatgtgagctttatgagtgtgggaagaccatcgggtaggaccaaggctattatggctattggtgtcgataaaaaacccaccaaggaggctttttccaatattggacccgggccccccctttaaaagttttttttccccaagctctagccctagttgggtaatggtatcccccccccccaataaaaaaggtatggggatcccccacccatggagggggcgttttagaaagtaaaaaagctccttttggttaaaaaaaaatgttttttttttccaattttcaagggcccatgcccttcaaatgatttagatctgtttttcccccgtagaaaaggtattttgatgtgaaatatttggagggaaggattcagaataaacccccccctgtttccggctagtagtttgtt

SEQ ID NO: 2268 - DNA, 1526 bp, Glycine max
  misc_feature (1)..(1): n is a, c, g, or t
  misc_feature (188)..(188): n is a, c, g, or t
  misc_feature (237)..(237): n is a, c, g, or t
  misc_feature (316)..(316): n is a, c, g, or t
  misc_feature (921)..(921): n is a, c, g, or t
  misc_feature (1026)..(1026): n is a, c, g, or t
  misc_feature (1045)..(1045): n is a, c, g, or t
  misc_feature (1066)..(1066): n is a, c, g, or t
  misc_feature (1158)..(1158): n is a, c, g, or t
  misc_feature (1284)..(1284): n is a, c, g, or t
  misc_feature (1333)..(1333): n is a, c, g, or t
  misc_feature (1417)..(1417): n is a, c, g, or t
  misc_feature (1420)..(1420): n is a, c, g, or t
  misc_feature (1422)..(1422): n is a, c, g, or t
  misc_feature (1426)..(1426): n is a, c, g, or t
  misc_feature (1526)..(1526): n is a, c, g, or t
  Peptide Sequence Number=SeqID_9754
  Probeset Number=SeqID_12047
ngtcgggagcgtgagaacagagctacatgtcagcgatattacgtcgatggtgatatagtcgtcattgttcatgctcgtatcgattgagtgggtctgatgacgtgtcacgagatattgcaatattacacgacggtgcagatgtattgcatctgcatcacttcatcgtccttactctgagcatcaatcancgtgtgacgcgtagatacgcgagtctagctagtattctcagatgtgagngagcatgcagtagtgaagtatatacgttgtggttatatcacatatatattcgagacgtatatgactagtgtctattgcntctctgcttgctgactagacgctaggatcatcatgttggtgtgagacatgacagcgacgcgatcgatatcgattctcgatcgtgtacgcgcgcggcggaggaggtgtgcggtggattgtatattaagctgatacatgtcatatagactcttacatctcgcagactgatctatatatcttagtataaatgagtcttgttattgtcgaagcgtttggtactatctatgcttgttaatatttaatcaacagaagaatgataatctgttatacatgcctactgatgttacctcttcaatggtctggacaatcatatacattgccatgctcatctctacctctagtcaatatcgagtaccatctcttcactcgctagtgagagtgatgtattatcgtgttgtctctggttatttctatatattgagctaacagagactctccttctagtaatcttgtgtatcggtatgtcttatcatttacttattctgtgtttctctgtctatcttgtacatatcttcatgtcgtctatatcttgtatctgctgatttcgtctatcattatttatattatacattatatgatttaatactgtgtattgtatatatattncacgtgtggtaaagtgtaactacacacacgtcagtacactgccgcgctaggtgaattctttctatgatattactgtatatgctttgtctcttacagggcccatcntcgttctctcttatattancgtgtgttatatatatatgtnttatatattgcacctattagacgactatcaagcaacttctgagattgcaagtacggatgtgcctttcagtctgaagggtgagacgacaccanacccgtctttcatttatctatgtgattggatttccgctccttctcaagtagctgggtggttctggctgttgtgtctttcatctctattcttctccgttatattagtatcattattataaaagtatnattcaaactatttcttaccattcacctctctctctatagtgctagtagntaagagtaacccgtcacgcagcatagtatcattttcgtagtgaaacgtatactcgctcgatcgtggtggggggagtgccacgantantntggntaataataaaaaaaatattctaaacaatttaattatcattggtgtcaggagttgttttagttattttttttgtatatatataataccctacctttttttn

SEQ ID NO: 2269 - DNA, 538 bp, Glycine max
  Peptide Sequence Number=SeqID_9763
  Probeset Number=SeqID_12048
cccacgcgtccgtacggctgcgagaagacgacagtcgcccgcacaacaaagtacaacacagtgcaggggctcaattatggagaaagcaattcaaagacagagagctctgcttgaacatcttcaacccatttcttcaagttcaaatttttcctctcaaacccatcaatctacggatctctcagcttcattatgttttgctgggaattcttcgcttggtcaaacaggtggatcagatgatgacgtggtgattgtagctgcatatcgcactgccatctgcgaagcaaagcgcgggggctttaaggacacccttccagatgaccttcctgccacagctctgacggctgcactacaaaaaaccaatgcggacccctgcgcacttggagatattgtcgcggccacactactggcacctcgacccgatagccgacttgcgtccaccctggctgtctctcatccaggctccccagagactggccctccccgacatgccactctccagagttcatctggactcccggccgcctcccccctagctccc

SEQ ID NO: 2270 - DNA, 1013 bp, Glycine max
  misc_feature (749)..(749): n is a, c, g, or t
  misc_feature (1013)..(1013): n is a, c, g, or t
  Peptide Sequence Number=SeqID_9764
  Probeset Number=SeqID_12049
tgctgatttcaagtctagagtagagctcttctgatctgttcgatctaaagacttcgtgctgtcgtgcttaagatagtgatgtagtcttatggtggtgacaatggtttcaaccaagctattgagctttccactgaggttctccaaaacgtcaagttcatccaggagaagaaactcatttccgctttcttcgatgagattgcccaagattctagcaagtactgtttcggtgttgacgatacccttaagtgcttggaccttggtgcagttcaaactctcattgtgtgggaaaatctcgagattactcgttaccaattcaaggttcccgctggagctcccgagaaggtgttgtacttgaccaaggagcaagagaaggacactgagaacttcaaggacgacgccacaggtcaagacttggagatcgttgaggctatgtcccttgttgagtggttcgctaacaactacaagcgatttggtgctaacctcgagttcgktaccaaccgttctcaagagggatctcaattctgcaraggttttggtggaatcggtggtatcttgagatacaaggtcgatttgatggcactcaacgagtacgacgaacaagacgtcgactatggcaactcatccgatgaggacatctgacgacgcgataacttgctctgctcgaggcctytagattgcacgcaatagacctacttagcgcccatacactagtcacaaataatcaagtgggcgccactttytactacttntactacaccacaactttattaccttcaacttacaacaagaaagaaatgagcgaataaacagactgatttgaggatggggagaaatcagcctgatcactaggtgcatgcaatcatagggtttcaacgagcttcaaaaacaaaagcaaacagaagggggactccggggggattttgtctatattgatacgtaggagagcttttactcttcctttcacttttatttgttatgctgttgtctctgcaaaataaacaagcatacataan

SEQ ID NO: 2271 - DNA, 1908 bp, Glycine max
  misc_feature (142)..(142): n is a, c, g, or t
  misc_feature (313)..(313): n is a, c, g, or t
  misc_feature (505)..(505): n is a, c, g, or t
  misc_feature (534)..(534): n is a, c, g, or t
  misc_feature (601)..(601): n is a, c, g, or t
  misc_feature (710)..(710): n is a, c, g, or t
  misc_feature (764)..(764): n is a, c, g, or t
  misc_feature (832)..(832): n is a, c, g, or t
  misc_feature (841)..(841): n is a, c, g, or t
  misc_feature (892)..(892): n is a, c, g, or t
  misc_feature (902)..(902): n is a, c, g, or t
  misc_feature (908)..(908): n is a, c, g, or t
  misc_feature (925)..(925): n is a, c, g, or t
  misc_feature (1013)..(1013): n is a, c, g, or t
  misc_feature (1127)..(1127): n is a, c, g, or t
  misc_feature (1129)..(1129): n is a, c, g, or t
  misc_feature (1145)..(1145): n is a, c, g, or t
  misc_feature (1230)..(1230): n is a, c, g, or t
  misc_feature (1241)..(1241): n is a, c, g, or t
  misc_feature (1264)..(1264): n is a, c, g, or t
  misc_feature (1353)..(1353): n is a, c, g, or t
  misc_feature (1444)..(1444): n is a, c, g, or t
  misc_feature (1462)..(1462): n is a, c, g, or t
  misc_feature (1516)..(1516): n is a, c, g, or t
  misc_feature (1569)..(1569): n is a, c, g, or t
  misc_feature (1600)..(1600): n is a, c, g, or t
  misc_feature (1605)..(1605): n is a, c, g, or t
  misc_feature (1615)..(1615): n is a, c, g, or t
  misc_feature (1692)..(1692): n is a, c, g, or t
  misc_feature (1705)..(1705): n is a, c, g, or t
  misc_feature (1709)..(1709): n is a, c, g, or t
  misc_feature (1750)..(1750): n is a, c, g, or t
  misc_feature (1829)..(1829): n is a, c, g, or t
  misc_feature (1846)..(1846): n is a, c, g, or t
  misc_feature (1851)..(1851): n is a, c, g, or t
  misc_feature (1884)..(1884): n is a, c, g, or t
  misc_feature (1903)..(1903): n is a, c, g, or t
  Peptide Sequence Number=SeqID_9765
  Probeset Number=SeqID_12050
gtgaggtggcgccctgctgtgggatacgagttgcgattactagatactaatagtagcagtggtgccgtactatcaccccctccgccccacagccgccccctgagggcaggtcacggcagatatgttcaacacggtgcgtcgntagctctatatataccgtgccgtcgcaggcgtggagatgcgatgccggggatctgtctgtgcgtgatgtgaagtggaggcagcgaggtgtggtgtagtgtagagatgtgacggagcgccccgccactacgtctcacacgtgtctccactattgtggcagaacgtgatgttngttacaccatatctgcccgcacaattcttctgacgttcctatattaccactgctatgctcgtggtcagacctaaacggtgtgttcgacacacacgagcatcgcctgatccgactctctagcgtactggttcgcgcgtgcgcttgctggtggctacatcattcatgatacacctactgaataacgccaatacntgcggatgcagagtagatgttcagtgtancacgatctcgtgtatgtacagacacgcagatcgcgcattcgactctccctatcgtatatatatctgntagcacacttacacatcctgatggatgactctactaccacacgtgtataatcgcggatgatatgcactaatagacatatcctctactatgatcagagatatatcggcgnagctgatcttatcctgtagaatataacacagtcaagtctcatgagacaggtagnagctagaacgtaatatgcgtattgatgataggatcgcggcggcaatatatatgtgatatctgataganttatgtgangaacgtattgaagcaatgtatcctcgtgtcgtttgccacctcgcggcgtangtggagtgtngaatgntcacgtgatgcagtaanaccactattatcccactatgatatatctgggtgttatacgcattctcgcgcactctgtcggtggatcgtctgcattgttgtgactggnaatagtgttggtatatcgcgtgtgtatgaccgttgtgcgcacacagtgtgtagcgcgtgattgttatactcatatgtgtgttatagatagagcataagagacgatcacacaccncnactctacacatcgttnacgaacctgtacaatgatcccggcgagcgctgtggagttagccactgtgtcgcgttcatcgtggtattttagcagtcgcctctcngtgtctcgtanggatccggtgcacaaccagtagnaatcgcgatatgcgcgcgcgctgtagtgacgatcaacatacagacattatagcgtgttgcatgtgcgcttggctgttgtagaatacatngcaatacatcacactgaatgaatgcgcgagcgtggatgaggtgtgtccgcattgcactgcttgctacacaattcgcctattgtacacgcancggtagtctctcgttgancgtgttactcactatgttctcggctatgctaatacgcgcgagtcgtctcatatnctatacgataatgttgataatatggcgcatatatatcgcggtgcactgtgacnactgtagttgtgagacgcggatataatcggnagcgncggcgtgcgncgcgtcgcgtatatgacgacgtccgctactactgttacttagtataactagtcgcagcggacgttgtagcgtagtanagcacgattgatncgtngtctgacgtcgtgatatcgatatatatcgcacacgcgtacncgactcagctgatatatatctatgcgcgcgctcgtctctaatacgacgtacgactgcaccgtcgagtaccgtttatttngagtatcactccgtacnactcngccgcgctcaattatgatgcgacgcgcagatantatatcaatctcagtcgcnctaag

SEQ ID NO: 2272 - DNA, 501 bp, Glycine max
  Probeset Number=SeqID_12051
gaaagaagtgaaatattttgaatattatttacaatgcaaatttgctgatggtgggcatggaaaaccctccaattcttgaactacttgtgctcctccaacgatgctcttagcaataaagaggggagaagaaaatatacggtgaaaagaaaggcaagcatccagaaataatcccgattaggtctcgtacataatgcccaacatatcaaatggctcttagacactgtagtagtaattcactattaaccttgttgggaagtgcaaaaggcagaaaggataaagatctaaatgacctttgacttgtaatatgattatctgatgcgcttatcggggctaaaccttggtgatttccgaatatggagtaaaatattatatgaccatttattcatcgggagcctgagtgccccaacagctccttggaaccatatctgggcatatttgtggacgaaaaaacttttcgagtcttggaaaccgctgacccctcccttttacagatatttggtt

SEQ ID NO: 2273 - DNA, 1387 bp, Glycine max
  misc_feature (1)..(1): n is a, c, g, or t
  misc_feature (178)..(178): n is a, c, g, or t
  misc_feature (250)..(250): n is a, c, g, or t
  misc_feature (670)..(670): n is a, c, g, or t
  misc_feature (882)..(882): n is a, c, g, or t
  misc_feature (979)..(979): n is a, c, g, or t
  misc_feature (984)..(984): n is a, c, g, or t
  misc_feature (1111)..(1111): n is a, c, g, or t
  misc_feature (1183)..(1183): n is a, c, g, or t
  misc_feature (1192)..(1193): n is a, c, g, or t
  misc_feature (1259)..(1259): n is a, c, g, or t
  misc_feature (1318)..(1318): n is a, c, g, or t
  misc_feature (1328)..(1328): n is a, c, g, or t
  misc_feature (1336)..(1336): n is a, c, g, or t
  misc_feature (1356)..(1356): n is a, c, g, or t
  misc_feature (1363)..(1363): n is a, c, g, or t
  misc_feature (1369)..(1369): n is a, c, g, or t
  Peptide Sequence Number=SeqID_9766
  Probeset Number=SeqID_12052
nttacataggtgcaatcagtagagagaactcataggacacacattgcgagtagcactccacaagagtgtcgtggcgagagacccgacgcgtagacacgcaagagcgcgtgagagtgatacgtagatcgtgagctgatagagcgagatgatgctacgctcacacgcatctaagctactntcgtgagctactggcataggctgattgcttgtgttgtgtgtgctggttctgcgtacgtatgtgcgtactagnacctgtctgtgtgacatgcgcgttagctggatggctgtatatgtcctggtacgtgtcgcgatataggtacctgcgcagagcagttctcactagataaagccgcgagccaagcgtgagttttctctcatgctctcgttctcatgcgcacatcattgcgagattcagagtatcgtggtaggggatgatgcgacatgaatgacgtcaggaacggtatcagatgcgatgatgtgtgcagatctagaagatagccttacgagctgtcgtcgcgctcagtgtagctgtatcgcactgctgtgcgcccagactgccgagttcttggtgtacgtcgcaggaacaacgaagtactactttacaattgaggggcgaggatgtcagagtggagttgcgaggagcgtgggcgtgccagtctacacacgatcnaccctgtctactctcgtacatgcctcgcgagcgtggcgatagacttcggagcataacgtgcaccgccatataatagctgacatgggtgacgtgtggttgaggtagatagtataatgatatgggctggtgcttctcgcacctcatccccgctgaactgcggtgcgtccgtgcgtgcgtgggctgagatgtgttgggtcggtctgagatgggcngcagtgctggcgcgggatggtagtgagtgttactctgtacctacttactatgatgagaataatataggagaggaggattccgcacatcacggatgtncctcntgatcattccatagagacacgtctcgaggaatgaggagttctaatatgtcgctcgttagtgtctaagtcgtaatgtatgtgtacagatgatgatcataagacgtcatgtctttgcgccccatctatnagtctcgggcggcgcacccagatctaaagaccacaatactatgtagcgtgataaacatatcactctctctgncgtaggtgnntactccatgcgggacggtctccctagcatcctcagtcgggtgatgtctcatcactattctgcgatnccctcctcctcgcgtggctggagagaacaaccacatccatactacataaaagactatcnatacatacanaaataaanaaaaacaagacccgggaggnaacacanaaagangggggagcaaaccaccac

SEQ ID NO: 2274 - DNA, 440 bp, Glycine max
  misc_feature (147)..(147): n is a, c, g, or t
  misc_feature (238)..(238): n is a, c, g, or t
  misc_feature (274)..(274): n is a, c, g, or t
  misc_feature (292)..(292): n is a, c, g, or t
  misc_feature (328)..(328): n is a, c, g, or t
  misc_feature (335)..(336): n is a, c, g, or t
  misc_feature (338)..(338): n is a, c, g, or t
  misc_feature (345)..(346): n is a, c, g, or t
  misc_feature (349)..(349): n is a, c, g, or t
  misc_feature (352)..(352): n is a, c, g, or t
  misc_feature (362)..(362): n is a, c, g, or t
  misc_feature (364)..(364): n is a, c, g, or t
  misc_feature (385)..(385): n is a, c, g, or t
  misc_feature (407)..(407): n is a, c, g, or t
  misc_feature (436)..(436): n is a, c, g, or t
  Probeset Number=SeqID_12053
acttttcgagaaaggaaaaaaaaagagtttccggcattattccatcatgaacgctcttcccagtcttctcttcttcctcttcgtttgggcattagtttatgccaagggggagcgggcgatgtgacggagttgcaaattggcgtgaancataaaccagggtggtgtgaaggtctgggcgacaagggtgacggagcgaggagggactatcgggggaaactcggtgagggaactgttttcnattcgagcttggaaagaaagagtgggagggaatttnagcttggtactggtcaantcggcggggggtgggaggggggagtggtgtggagtnggtgttnntnagaagcnnaanctnaaaataccancnaaacttgggtatcgagagganggtgggcgacccactattccangtggggcaagagtcgtgtgtggcactgancttg

SEQ ID NO: 2275 - DNA, 337 bp, Glycine max
  Peptide Sequence Number=SeqID_9767
  Probeset Number=SeqID_12054
tcgagtcgctacgtaagacccccccccgcatttttcgctttcctaaacttactgaatttgatcttcttcatgattgttacaaagtactttgtttatagagctgaaatttcagattccatagatgtacttgcacaagaactgaaggagaagacagctaatgcgtcaaactaagtggttccaagtgattagttgattggacattgatatatggacatcttaatattgtaaatacctatttaaagacctactatatttatcgcaaaaaaaaaaaaaaaagaattcctgcaagcaccgaaagatctattaattctaaagcggacgccaccgcggaggagct

SEQ ID NO: 2276 - DNA, 1291 bp, Glycine max
  Probeset Number=SeqID_12055
tcctgaggcaagctataactttattgagcttgcaaattccttgaactacccagtcgagcaacacgatgtgaaaaccactgacggctacatcctcacctactttagaatccaagccaagaacacccaaattagaagtggcttacaacctattcttttgaaccacggccttttggattcatctgattccttcattgtcaacgttgagaatgaagctccaggtttgcttcttgcccaggccggctttgatgtatggtttgctaacaacagaggtaacaagtacagcattggtcacactgatcctgtgaactacaactcttctgatgccaactccaagttctgggatttctcctggcaagagatgacacagtacgatcttcccgcaggtctccagtatgttggtcaacaaaccggccaaaaggttcactatatgggacacagtgaaggaaccaccattatgtttgctgccttgtcaagacgtgaccccaccgtcatcaataaccttggaaaattcattgctttggctcccgccgtgtatgtccaacacagtacctctgtcattgtggaggtcggcggctggattcaagctggctctatccttaaagaatttgactctttaatgaacagaaagaagtttggatggatgacccaaaaatctagaaacacctgggaatatatctgctccgttgccattgatgtctgcattgagagagttagactcctttctgacgccaaaacctctgtcgacaacactagcagattccccatcacttctggacattaccctgccggatctagcgtccaaaacatgtactactggtctcaaatgttcaacaaccccgacttttctatgtacgactatggccgtgataccaacattcaaatctatggcactcccaaccctcctgtctatgatttgagccagatcgtcgaaccagtccacatgtttgttggagagtatgacgagctcgctcccctcgctgatacctccaatttgagaagcaagcttactggctcaagccaagtcgagtacagaacctatccccttggccatgccagcttcatctggggtttagatgttgccacttacgtcaatgacgttatcactgtcttaaactcttaattcacttaataatgatgaatctgtttttatccaaaggtttaatgaaatatttatttttattacggatagaaatgtttaaagtctaggcccatttatgaaaaagggcctcgctcaattaataagatgaatctcaattattcattccgagtcattaataattgacatcgaatc

SEQ ID NO: 2277 - DNA, 704 bp, Glycine max
  Peptide Sequence Number=SeqID_9768
  Probeset Number=SeqID_12056
aataaacacaagagatcgaccgacaccgagacagatcgtgttggtttcattttgcgaggtagatagagaaagggatgcagggcgggaagagctcgagcgcggtgggcgcggccaaggaggcggtggcgaacgtgggcacgtcggcgtgggcgagcaaggagaagaccatggccgtggtgcaggagacggtgaacaaggccaaggcgcacgacccggcggccaaggccgaggcggaggccaggaagcaggagcggatccacgaggcggaggccgccaagcgggacgccatgcgccacaacgccgccgccaaggagcacgccaccgccgcgtcctaccaccccaccaccggcgccggagtggacgcccgcgacgtcgaggtggagggcgcggccgccccgcgcgcggggagcagcgacgacggctacctgccggtgtcgggggcggggcactgggtcggcgagggcggcggtcaccagctgcccgcgcgcggcacgcccggcggccactctgcgtgatgacgaattgacgagactccatccgatgtgatttgcgtgtgaactggctggtttggcaaatagctggtataccttgtgtgcttgttcgagtgtgacccctcctgtagttttgagctctcaagagctgtgcttatttacgttgtgatctgtgaaatgagttttatataatggagatgagggtgtgatttc

SEQ ID NO: 2278 - DNA, 456 bp, Glycine max
  misc_feature (136)..(137): n is a, c, g, or t
  misc_feature (442)..(442): n is a, c, g, or t
  misc_feature (444)..(445): n is a, c, g, or t
  misc_feature (453)..(453): n is a, c, g, or t
  misc_feature (456)..(456): n is a, c, g, or t
  Peptide Sequence Number=SeqID_9769
  Probeset Number=SeqID_12057
tcagctacgtaggccccccccccctacacaccgaagaccggaccaacaagacaaccgacttctacaagatgccttcaggacaaggagcgggtaccaaccccatccacaacaaacagaagaagaagaaggccgtcgnnctcgacgaagatgacatcgcatacaaggcgaagctcgctgctgagaagaaacagcgtgaggatctagccaagaccgttggcaagggcaagggacccctcaacaccggttcccagggaatcaagaagtcgggcaagaaataagcgctggtcataccaacggccgaccggccgacgagagaaaggcgatgcgatacgacgacgatttgacatgaaagataccacaagccaggagtcatgacttggcagggcgctcatatacacatcacattgatgcatgggaataaactatcaatacttttcaaaanannaaaaaaangan

SEQ ID NO: 2279 - DNA, 1583 bp, Glycine max
  misc_feature (1)..(1): n is a, c, g, or t
  misc_feature (9)..(9): n is a, c, g, or t
  misc_feature (16)..(16): n is a, c, g, or t
  misc_feature (19)..(19): n is a, c, g, or t
  misc_feature (31)..(31): n is a, c, g, or t
  misc_feature (40)..(40): n is a, c, g, or t
  misc_feature (46)..(46): n is a, c, g, or t
  misc_feature (60)..(60): n is a, c, g, or t
  misc_feature (80)..(80): n is a, c, g, or t
  misc_feature (115)..(115): n is a, c, g, or t
  misc_feature (117)..(117): n is a, c, g, or t
  misc_feature (132)..(132): n is a, c, g, or t
  misc_feature (159)..(159): n is a, c, g, or t
  misc_feature (164)..(164): n is a, c, g, or t
  misc_feature (166)..(166): n is a, c, g, or t
  misc_feature (244)..(244): n is a, c, g, or t
  misc_feature (396)..(396): n is a, c, g, or t
  misc_feature (411)..(411): n is a, c, g, or t
  misc_feature (473)..(473): n is a, c, g, or t
  misc_feature (479)..(479): n is a, c, g, or t
  misc_feature (687)..(687): n is a, c, g, or t
  misc_feature (757)..(757): n is a, c, g, or t
  misc_feature (794)..(794): n is a, c, g, or t
  misc_feature (847)..(847): n is a, c, g, or t
  misc_feature (939)..(939): n is a, c, g, or t
  misc_feature (941)..(941): n is a, c, g, or t
  misc_feature (970)..(970): n is a, c, g, or t
  misc_feature (997)..(997): n is a, c, g, or t
  misc_feature (1055)..(1055): n is a, c, g, or t
  misc_feature (1215)..(1215): n is a, c, g, or t
  misc_feature (1224)..(1224): n is a, c, g, or t
  misc_feature (1254)..(1254): n is a, c, g, or t
  misc_feature (1279)..(1279): n is a, c, g, or t
  misc_feature (1422)..(1422): n is a, c, g, or t
  Peptide Sequence Number=SeqID_9770
  Probeset Number=SeqID_12058
ntgcgcatngatcgtngcngtcgtcggtgantggagtagngaaganagaatagtaagtangtagatagtgcgcggggcgnctagtagcagatacgtcaataatgtagatcatagnangcatgattgatcgcngagcatcagatgataatgatgatagtnactgntnctcgtgagtttcattgtagataactgacgagagtgtagtgttgcgcagacgtgacggcgaagtagactgagagtcagnagctgtgcttatgatcatcgtcgacgagtagctatattgtatccgcgagattgtagcgtgtgagtgagccgtgagacgatgttgtgattactgtacgtgataaatatacccgagtcggagaggcgagggggatgaggtggagtcgtcgtatntgtggacgcgcacantcaggtatctgagtctgcgtgtgaacgcgtgggagagagagagggagatgtacaatctctanagtggngtggcggtatgtggagagtgatgtgtcagtaggagatttactattgcgggtgtctataggagagatagtgcggtgtgcgatgtacagctgtgttagcgagagagtggtgggagttatgagatagtataaagacaatgatgtcgcgtgagcgctgaccgaatttgcacacggactcatactgcatgtcgcgggaggggggtggcgtgtngctagcccgggtcagatatctctatatatatactctgtagagaacagagaatgtatatgcagcaacgatnggtgcgcgtttatccacaaaatttacatataagagancggtaaggtctagctcgtgacgaacttcttactgttcatacggagtgtatcgntaagtattgatacgtagtgtggggatgcgtggcgagcgcacgtgtatggttatcctacgtcgttctggtgttgcgagacacgtactacagtncnactattcaccactactgatctactacgtngctactccgagttaagtggctgaacangcataggagagtatagaacagcactgtgccgacaacagttggtggaccgataataatnaacagaattagcgtatggtatctgaccgtcactggactgggagtgtatgagacggatgtcttatccaatcgacattgcgttacacatcggacatgtctgtctcggcttatgtatagcgatcgactctgctatggacgtgggcgctatcgtctatcatgcntcgcataantatacgaccttctctgcttcgaggtgtctntctgcgcgcgcgtcatgcactacgnaccagcggagatattagtgatgtactctatatatgtcgtgcatattgagagtagtggttggtgtatctagagatcgtgggtacagacagatgctgtcactccttctcgtcactatacgacgcagtggcgagattatgcgtctntagttgtgttacagcagctccgaacgagcgcgcatcgacgtgcagagtgggagtgaggatgtagtgtggtatataggttatgtgtagggatacgagcagatgtagataggagcacgcgtatacaggtgatcgcgggtgtgtgagaggtagtggcactcgcc

SEQ ID NO: 2280 - DNA, 1805 bp, Glycine max
  misc_feature (22)..(22): n is a, c, g, or t
  misc_feature (26)..(26): n is a, c, g, or t
  misc_feature (28)..(28): n is a, c, g, or t
  misc_feature (63)..(63): n is a, c, g, or t
  misc_feature (66)..(66): n is a, c, g, or t
  misc_feature (68)..(68): n is a, c, g, or t
  misc_feature (70)..(70): n is a, c, g, or t
  misc_feature (86)..(87): n is a, c, g, or t
  misc_feature (121)..(121): n is a, c, g, or t
  misc_feature (176)..(176): n is a, c, g, or t
  misc_feature (182)..(182): n is a, c, g, or t
  misc_feature (239)..(239): n is a, c, g, or t
  misc_feature (253)..(253): n is a, c, g, or t
  misc_feature (324)..(324): n is a, c, g, or t
  misc_feature (337)..(337): n is a, c, g, or t
  misc_feature (343)..(343): n is a, c, g, or t
  misc_feature (356)..(356): n is a, c, g, or t
  misc_feature (388)..(388): n is a, c, g, or t
  misc_feature (409)..(410): n is a, c, g, or t
  misc_feature (529)..(529): n is a, c, g, or t
  misc_feature (748)..(748): n is a, c, g, or t
  misc_feature (832)..(832): n is a, c, g, or t
  misc_feature (1019)..(1019): n is a, c, g, or t
  misc_feature (1091)..(1091): n is a, c, g, or t
  misc_feature (1132)..(1132): n is a, c, g, or t
  misc_feature (1188)..(1188): n is a, c, g, or t
  misc_feature (1208)..(1208): n is a, c, g, or t
  misc_feature (1247)..(1247): n is a, c, g, or t
  misc_feature (1290)..(1290): n is a, c, g, or t
  misc_feature (1321)..(1321): n is a, c, g, or t
  misc_feature (1323)..(1323): n is a, c, g, or t
  misc_feature (1326)..(1326): n is a, c, g, or t
  misc_feature (1332)..(1332): n is a, c, g, or t
  misc_feature (1390)..(1390): n is a, c, g, or t
  misc_feature (1417)..(1417): n is a, c, g, or t
  misc_feature (1480)..(1480): n is a, c, g, or t
  misc_feature (1485)..(1485): n is a, c, g, or t
  misc_feature (1551)..(1551): n is a, c, g, or t
  misc_feature (1557)..(1557): n is a, c, g, or t
  misc_feature (1569)..(1569): n is a, c, g, or t
  misc_feature (1623)..(1623): n is a, c, g, or t
  misc_feature (1635)..(1635): n is a, c, g, or t
  misc_feature (1642)..(1642): n is a, c, g, or t
  misc_feature (1645)..(1645): n is a, c, g, or t
  misc_feature (1717)..(1717): n is a, c, g, or t
  misc_feature (1719)..(1719): n is a, c, g, or t
  misc_feature (1722)..(1722): n is a, c, g, or t
  misc_feature (1727)..(1727): n is a, c, g, or t
  misc_feature (1765)..(1765): n is a, c, g, or t
  misc_feature (1779)..(1779): n is a, c, g, or t
  misc_feature (1805)..(1805): n is a, c, g, or t
  Probeset Number=SeqID_12059
ttttggggggtttttgttgggngggngnggggggggcgagggcgctaggggaggggtggagcntangngntacccatcattattannaaaaagaatggtaagtggatagagataaggtgtntgcgctgcgggttctcgttctttatattgtaaatgtttttagtgacgaactaatncatatnagacatcggcagggtaggagtttatataattgatagtcttcgtcgctacgtgccgcncctctgtttctccnctcttactcacacttaatgaggatttatttatgttatgtgtcgtcgggatgtggacacacgcgcgtggtancgcgtgcgaccgngatgtnggtgtgcacgtcntgtgttggttgccttcggcgccagtcgcggcngcgatcgggagatgaggggtnngtgcgtgcgcggagtgcgggacatcgtgcgtgtggcgagacacacggggatcgaggcggagcctgtgagtcagtcgaggtgtagatgctcgctcccacgctcgactcgatacattgagncaacatctctccgcttctctcctcacaataggtagagtgtagcttcgcgtgatgtagtatgaatggaggccaactgtatattgatgaagagaagaagcgctgagattatatatgtactatacgcacgacatagtagacaagagtaagacgaaagcgagtcgaggagtcgcagtctcatggcttctctctacactatatactaaactcactaactaacancacactatctcatcctctctgctccataattctctatctcaccctactgcacacagctcaagacgcagcagcgcgatgaggaantatataacagagaggagggaaccgccacagtagaggcgatgttagaggtaattacactcgattcacccctaagacacataacacgtacatgagcgagatctagctgcaccgacgacacgatgacacatcacagcgctcgcccggcgcgcgtggctagtacctgtgctgctctgccagatgtgcggangtgcgcgcgcgagcaacgacatgtcataatagatcgacgctacaacacaccaacataactctctctttctantaacatatctgccttgcgcattcttctcctcgagctctcancctcatatatatgtacgctcgctacgcacatctatgtatgtctctgtgtcatctcnatatctatgtgtgctaccgnatagtacagtatcactatactacattacgtctgtctgantatgctcgacgcgtatagatagtacgcagctataacacgtaanactgtgcgcaatatctctcgatctgctctcntngtncatatncagcgactctacgtatataagcatggctatagtacgaatcatcatgacatgctacgtnagataggatgaatgtgagatctatcantcatcatgaactatcgactatcgcaagacctattatatacagcgactcacgatactgcgacgntgtgncgcgccgagtcgcgcgcgagtctgacctaggcactgtatgacgggttctgatgtcgctgatatcgnagacgnaaagctggcganagacagtactggttcacgatacagatacgcatatagaacgtcagacgggactancgtcatagcacncactgcnagntgatcgacatatcggcagcgcgacgaatgagctcatctactaatactatatacgaacaatatatcgaacgcntntanagtantgctctcatcgcgccaatcctctcgctgcctcatccancgcatcctctatcnttacagctgtcgtcctctgaacgttn

SEQ ID NO: 2281 - DNA, 712 bp, Glycine max
  Peptide Sequence Number=SeqID_9771
  Probeset Number=SeqID_12060
ataaaactgcatgttgattgcctttactccgaaaaatgaatttttttataatatttatgttgattattgctatgattttaggggtgagcgaagcaatttggcataaagttgttgcgcctttgtctaagtgtgagaagaaccgagtaattattcgaaatgaacttggtccaggtagaagtctagaatatcattgtcattctaatggtaaagatcaaggcgtccagtttttaaaattcaatgaagaaaggaactttgaatttgtcgatcatttttttggaaaaaaaaataaagtgaattgtgttttgaggcaagggttgtggatgcagagttcttctcgagactttgaagcataccatacaagtaaaagtaatggtaacaattgtggacagactcgtgaatggattgcgagaacagatggaacatactttcaaagaaatcgaattaagccagcagcttttgtgtttgcttggattaataaaaaaccttaaaaaaatctaattgatgtttctgattaagacactcaaaatctttaatcgtttctaattttaattattgttgttcgttttgtaaactttgtcatgattctgctttcgtgtcgaatattaagaaaataaatattgtatctatgtaattatgtatatttttttgtttgtcatctatttataatgtgttttaaataataagtatgcaaaaaaaaattggatttgtggac

SEQ ID NO: 2282 - DNA, 719 bp, Glycine max
  Peptide Sequence Number=SeqID_9772
  Probeset Number=SeqID_12061
aaataataaaagaaggacagttgagattttaggagagagagagagagagaggatggagaatctctggcgaatcgctacaggccaggacccgaaccggcaagattacgaaggaatagagttctggtcgaacccggagcgatcggggtggctcacaaagcaaggcgattacatcaagacctggcgcagacggtggttcgtgctcaagcgagggaagctcctgtggttcaaggatcaatcctccgccttaacccgcggatctatcccgcgtggggtgatctcggtgggagattgtctcaccgtgaaaggagctgaggacgtggtgaacaagcctttcgccttcgagatttcgagcgggaacatcaccatgttcttcatagctgataacgagaaggagaaggaagagtggatcaactctattggaaggtccatcgtgcagcactcgagatcggttactgattctgaagtccttgattatgatcaaaggcggtgacttctttttttagctctatgctatgtttgattccgtttattgtacctgtgtatgtatgtatgcctttctcaagttcttgatccgactctctgtctcttgtgttatggttttgttctgtatctgattctattccacttttgtctttccagcttctatatttgctttttcaacaagttgttagactatatgattgatgttttcgttaagaagcaatgaattggtatctatc

SEQ ID NO: 2283 - DNA, 542 bp, Glycine max
  misc_feature (364)..(364): n is a, c, g, or t
  misc_feature (450)..(450): n is a, c, g, or t
  Peptide Sequence Number=SeqID_9773
  Probeset Number=SeqID_12062
tgggtctcaaaaaattgggccccatggcgggaagagcccccattaggtaaccccccgtgttttttccccggggggggggtccacaccccccctggaaaaaaattattcccccaaagaattagaaagcctacatggggggcagggatcccccccgcccccctagagtttatttgggccccccccagccccccaccaagggatccacattccttttcccccagcctaatcccttccaggatctggttgcgaggaagatgtttttgcccattccgggagagttgtccacagagggtgggctaacctgcaattctgttgccgcagagtctcgagcttttcgtcggtcatcactttacacgtacatcanttccgcgttcccattcgttggccaacgctgcttttgccactccatcacgtcacccatctcttccaaaatgtgagcagagagagtgncgttggtgtcagagactcagaggcgtttgttagcacttggcagcgattcgaagctgtgtcggcggcgtacgatgcggggagacaataagaat

SEQ ID NO: 2284 - DNA, 1645 bp, Glycine max
  misc_feature (7)..(7): n is a, c, g, or t
  misc_feature (16)..(16): n is a, c, g, or t
  misc_feature (68)..(68): n is a, c, g, or t
  misc_feature (71)..(71): n is a, c, g, or t
  misc_feature (96)..(96): n is a, c, g, or t
  misc_feature (106)..(106): n is a, c, g, or t
  misc_feature (117)..(117): n is a, c, g, or t
  misc_feature (130)..(130): n is a, c, g, or t
  misc_feature (152)..(152): n is a, c, g, or t
  misc_feature (187)..(187): n is a, c, g, or t
  misc_feature (274)..(274): n is a, c, g, or t
  misc_feature (317)..(317): n is a, c, g, or t
  misc_feature (321)..(321): n is a, c, g, or t
  misc_feature (324)..(324): n is a, c, g, or t
  misc_feature (335)..(335): n is a, c, g, or t
  misc_feature (400)..(400): n is a, c, g, or t
  misc_feature (406)..(406): n is a, c, g, or t
  misc_feature (412)..(412): n is a, c, g, or t
  misc_feature (499)..(499): n is a, c, g, or t
  misc_feature (515)..(515): n is a, c, g, or t
  misc_feature (626)..(626): n is a, c, g, or t
  misc_feature (633)..(633): n is a, c, g, or t
  misc_feature (644)..(644): n is a, c, g, or t
  misc_feature (811)..(811): n is a, c, g, or t
  misc_feature (884)..(884): n is a, c, g, or t
  misc_feature (1084)..(1084): n is a, c, g, or t
  misc_feature (1132)..(1132): n is a, c, g, or t
  misc_feature (1198)..(1198): n is a, c, g, or t
  misc_feature (1520)..(1520): n is a, c, g, or t
  misc_feature (1529)..(1529): n is a, c, g, or t
  misc_feature (1539)..(1539): n is a, c, g, or t
  misc_feature (1619)..(1619): n is a, c, g, or t
  Probeset Number=SeqID_12063
caggagncatcgatgntcgcgatgtaactactgagtcatagtactgtacagtaatgatgttcgtaatntgnagtgtacatctgatcaacatacacntcagatctgnacagtcgactntcggacttgagantacgagcgatcagttacatctnattcgatcgagttgggacgacgcgttgatagtcantcatgcacatacgattgccgtcaccgctatgatcgtccatcgacaatatcacgtcaaccgatacagtcaaagcgacgcgcgcgagcngctctgtagcggatagcctgtatgatcggatcgcgatgtcaanactnctntgaccgatgtnagtgtactgtctgacgactacgacgtgcaatgagcacggaagatagattcaagacacatgcagtntgagcnaagtangatgacgatacgtcaatacagcatacgagtagttcagtacatgtgtattagaacggtggacgatcgtctgtgatcatacgtcagtcnaatagctggctacgancagcgtcggagattagcgcgtgacgcgatacaagatgatagggaatattacgtccagctaactatacacgtctggcgacagcaacgccgagagatgtacgagcacgtgtgnatcgccntgttctgaccnataagcgatgactacaagtgcactgcattatcatcttctcacacgcgagccgatgagtcgtagccatgctagacgcgagtgcactggtgactacggagactcagagtgtcagtacgtatacagtgcagcatcgtattcgtgatctagtagtatgattcggcgccgtntcgcagcgcaccactgctcgcaactactaacaacagcacgacacagcgactgcacatcatataatactacgtntgctcttccaactcacaatctctacagtcgcagtgacacagaggatgatgcattcagaataaatctctgtcgatgtgtgagtaagtatatggagtatgctgatatagcgagcatactaactaagcatggcctcgcgcactcagagcatcgattgtagatacgtcgtatatctgagtagcaagacatcaatagcgagcggnagttagatagaatgggtcgcgcggaatgtcagtacgacgtcatgactnaacacgaacgtgcgcggcgcgcgcgatgtctactgcactgctagatcatatctgctgctaagacantagacatggtcgtgagataggtggtgtatgatgagtgcgtgtagaggacgacgatacaatcagtattacgtcgttactcgctatggcatcgtcacgacatcaccatgatagtacattgtttacaaattgaatgacagagagacatacattatgagttagttacgtacgagtaatgattacaatctcgaactgtatatagaaaatagagagctgaacactatgagaagttactacttctgctatcgtcgaggcccctactaatgtaaataaggaggaagacgtgtgacgctactctgtggaggtacggcggtgagtgcgagtncgcagcgangggtagaganatctgcgatacaactagttaggaggagcgcaaccacgctagtctggtgacgcatctgcgcacgatgagctgtgaagagangttgtgagagagcgggtggaagggac

SEQ ID NO: 2285 - DNA, 644 bp, Glycine max
  misc_feature (538)..(538): n is a, c, g, or t
  misc_feature (601)..(644): n is a, c, g, or t
  Peptide Sequence Number=SeqID_9774
  Probeset Number=SeqID_12064
tcatcataacatgatgactgatcccttttgatgaagctcagaaccatgcaagcaactgtaacagctacgtaggccccccccccccaaagtattgtcatataattctggagatagattcagtgcttctttattaagtgtttattgctattagctttttaatttctttaagaatgtcattgccctgtaatatgctgctctcttgcccatgctttttgactaacaatcttcaaatagatatgtaccatactcattttattagacctcactaatgcgatatttggactctttcaattgtggatgcagtggcaaatgagttgaggttagacattctgtcagttggagttaactttttattacgtgtaaggtgaatgatctatctgatgaattctacttttgctcatttatttagtaatgcaatttagtttagttttaaattctatgaaaaataactcttttattattaacagaatttgttaaaagacaattagcattaacatgtattaatgtatatgaaaatatgtagacatggtagatgtcngaggataaaagttttgagtttatgctttctttggacaccaatttggagaaatgtgaagaaacnnnnnnnnnnnnnnnnnnnnnnnnnnnnnnnnnnnnnnnnnnnn

SEQ ID NO: 2286 - DNA, 506 bp, Glycine max
  Probeset Number=SeqID_12065
ggaggctgcagtatgtaccagacattaaatgtgattagtctcactcatcagacaccttggtcattggagtggcacctgttaaggttcaatttagtgtggattaaatgggtgttaccactatgaaccatggctgcaaatgtggaccaaattgctcctgcaacccctgcacttgcaagtgaagtgttgggagagcgaggttcaacagagatagcccctaatttagaattattgtatcccactgatgtgcaggaataaggcaatagaattaatgtcggatggcttttgccgctagggatatttgtgtttaacaaacatccttacaataaaatgcttaatttctaagtatatggtaaaatgattgctttgcagcgttacttcttactgtggcaagtgatgtgcatttgtttgatctatgtaattctttttgtacaaagtagaaacggtacggcgaaatacaatattgcagagtgatacattattgttatgtcattgtggtacctgtaaaa

SEQ ID NO: 2287 - DNA, 2134 bp, Glycine max
  misc_feature (14)..(14): n is a, c, g, or t
  misc_feature (68)..(68): n is a, c, g, or t
  misc_feature (82)..(82): n is a, c, g, or t
  misc_feature (135)..(136): n is a, c, g, or t
  misc_feature (144)..(144): n is a, c, g, or t
  misc_feature (150)..(150): n is a, c, g, or t
  misc_feature (180)..(180): n is a, c, g, or t
  misc_feature (196)..(196): n is a, c, g, or t
  misc_feature (202)..(202): n is a, c, g, or t
  misc_feature (211)..(211): n is a, c, g, or t
  misc_feature (214)..(214): n is a, c, g, or t
  misc_feature (262)..(262): n is a, c, g, or t
  misc_feature (292)..(292): n is a, c, g, or t
  misc_feature (302)..(302): n is a, c, g, or t
  misc_feature (305)..(305): n is a, c, g, or t
  misc_feature (311)..(311): n is a, c, g, or t
  misc_feature (351)..(351): n is a, c, g, or t
  misc_feature (356)..(356): n is a, c, g, or t
  misc_feature (361)..(361): n is a, c, g, or t
  misc_feature (366)..(366): n is a, c, g, or t
  misc_feature (368)..(368): n is a, c, g, or t
  misc_feature (422)..(422): n is a, c, g, or t
  misc_feature (426)..(426): n is a, c, g, or t
  misc_feature (456)..(456): n is a, c, g, or t
  misc_feature (469)..(469): n is a, c, g, or t
  misc_feature (479)..(479): n is a, c, g, or t
  misc_feature (495)..(495): n is a, c, g, or t
  misc_feature (502)..(502): n is a, c, g, or t
  misc_feature (516)..(516): n is a, c, g, or t
  misc_feature (532)..(532): n is a, c, g, or t
  misc_feature (557)..(557): n is a, c, g, or t
  misc_feature (573)..(573): n is a, c, g, or t
  misc_feature (604)..(604): n is a, c, g, or t
  misc_feature (611)..(611): n is a, c, g, or t
  misc_feature (613)..(613): n is a, c, g, or t
  misc_feature (633)..(633): n is a, c, g, or t
  misc_feature (637)..(637): n is a, c, g, or t
  misc_feature (639)..(639): n is a, c, g, or t
  misc_feature (695)..(695): n is a, c, g, or t
  misc_feature (700)..(701): n is a, c, g, or t
  misc_feature (710)..(710): n is a, c, g, or t
  misc_feature (714)..(714): n is a, c, g, or t
  misc_feature (724)..(724): n is a, c, g, or t
  misc_feature (741)..(741): n is a, c, g, or t
  misc_feature (743)..(743): n is a, c, g, or t
  misc_feature (754)..(754): n is a, c, g, or t
  misc_feature (758)..(759): n is a, c, g, or t
  misc_feature (761)..(761): n is a, c, g, or t
  misc_feature (775)..(775): n is a, c, g, or t
  misc_feature (778)..(778): n is a, c, g, or t
  misc_feature (784)..(784): n is a, c, g, or t
  misc_feature (787)..(787): n is a, c, g, or t
  misc_feature (789)..(789): n is a, c, g, or t
  misc_feature (792)..(792): n is a, c, g, or t
  misc_feature (820)..(820): n is a, c, g, or t
  misc_feature (833)..(833): n is a, c, g, or t
  misc_feature (839)..(839): n is a, c, g, or t
  misc_feature (866)..(866): n is a, c, g, or t
  misc_feature (881)..(881): n is a, c, g, or t
  misc_feature (886)..(886): n is a, c, g, or t
  misc_feature (909)..(909): n is a, c, g, or t
  misc_feature (928)..(928): n is a, c, g, or t
  misc_feature (931)..(931): n is a, c, g, or t
  misc_feature (999)..(999): n is a, c, g, or t
  misc_feature (1086)..(1086): n is a, c, g, or t
  misc_feature (1089)..(1089): n is a, c, g, or t
  misc_feature (1121)..(1121): n is a, c, g, or t
  misc_feature (1128)..(1128): n is a, c, g, or t
  misc_feature (1158)..(1158): n is a, c, g, or t
  misc_feature (1359)..(1359): n is a, c, g, or t
  misc_feature (1376)..(1376): n is a, c, g, or t
  misc_feature (1378)..(1379): n is a, c, g, or t
  misc_feature (1384)..(1384): n is a, c, g, or t
  misc_feature (1409)..(1409): n is a, c, g, or t
  misc_feature (1438)..(1438): n is a, c, g, or t
  misc_feature (1455)..(1455): n is a, c, g, or t
  misc_feature (1472)..(1472): n is a, c, g, or t
  misc_feature (1476)..(1476): n is a, c, g, or t
  misc_feature (1485)..(1485): n is a, c, g, or t
  misc_feature (1489)..(1489): n is a, c, g, or t
  misc_feature (1501)..(1501): n is a, c, g, or t
  misc_feature (1516)..(1516): n is a, c, g, or t
  misc_feature (1531)..(1531): n is a, c, g, or t
  misc_feature (1538)..(1538): n is a, c, g, or t
  misc_feature (1550)..(1552): n is a, c, g, or t
  misc_feature (1555)..(1555): n is a, c, g, or t
  misc_feature (1563)..(1563): n is a, c, g, or t
  misc_feature (1574)..(1574): n is a, c, g, or t
  misc_feature (1576)..(1576): n is a, c, g, or t
  misc_feature (1603)..(1604): n is a, c, g, or t
  misc_feature (1607)..(1607): n is a, c, g, or t
  misc_feature (1636)..(1636): n is a, c, g, or t
  misc_feature (1642)..(1642): n is a, c, g, or t
  misc_feature (1646)..(1646): n is a, c, g, or t
  misc_feature (1648)..(1648): n is a, c, g, or t
  misc_feature (1651)..(1651): n is a, c, g, or t
  misc_feature (1657)..(1657): n is a, c, g, or t
  misc_feature (1681)..(1681): n is a, c, g, or t
  misc_feature (1696)..(1696): n is a, c, g, or t
  misc_feature (1707)..(1707): n is a, c, g, or t
  misc_feature (1730)..(1730): n is a, c, g, or t
  misc_feature (1769)..(1769): n is a, c, g, or t
  misc_feature (1771)..(1771): n is a, c, g, or t
  misc_feature (1773)..(1775): n is a, c, g, or t
  misc_feature (1779)..(1783): n is a, c, g, or t
  misc_feature (1788)..(1788): n is a, c, g, or t
  misc_feature (1796)..(1796): n is a, c, g, or t
  misc_feature (1798)..(1798): n is a, c, g, or t
  misc_feature (1802)..(1802): n is a, c, g, or t
  misc_feature (1836)..(1836): n is a, c, g, or t
  misc_feature (1865)..(1865): n is a, c, g, or t
  misc_feature (1872)..(1872): n is a, c, g, or t
  misc_feature (1905)..(1905): n is a, c, g, or t
  misc_feature (1909)..(1909): n is a, c, g, or t
  misc_feature (1911)..(1911): n is a, c, g, or t
  misc_feature (1913)..(1913): n is a, c, g, or t
  misc_feature (1921)..(1921): n is a, c, g, or t
  misc_feature (1930)..(1930): n is a, c, g, or t
  misc_feature (1936)..(1936): n is a, c, g, or t
  misc_feature (1982)..(1982): n is a, c, g, or t
  misc_feature (1985)..(1986): n is a, c, g, or t
  misc_feature (1988)..(1989): n is a, c, g, or t
  misc_feature (1992)..(1993): n is a, c, g, or t
  misc_feature (1995)..(1995): n is a, c, g, or t
  misc_feature (1998)..(2000): n is a, c, g, or t
  misc_feature (2008)..(2008): n is a, c, g, or t
  misc_feature (2010)..(2010): n is a, c, g, or t
  misc_feature (2012)..(2014): n is a, c, g, or t
  misc_feature (2026)..(2026): n is a, c, g, or t
  misc_feature (2028)..(2028): n is a, c, g, or t
  misc_feature (2044)..(2044): n is a, c, g, or t
  misc_feature (2048)..(2048): n is a, c, g, or t
  misc_feature (2059)..(2059): n is a, c, g, or t
  misc_feature (2067)..(2068): n is a, c, g, or t
  misc_feature (2070)..(2070): n is a, c, g, or t
  misc_feature (2072)..(2074): n is a, c, g, or t
  misc_feature (2076)..(2076): n is a, c, g, or t
  misc_feature (2085)..(2085): n is a, c, g, or t
  misc_feature (2087)..(2087): n is a, c, g, or t
  misc_feature (2098)..(2098): n is a, c, g, or t
  misc_feature (2115)..(2115): n is a, c, g, or t
  misc_feature (2122)..(2123): n is a, c, g, or t
  Peptide Sequence Number=SeqID_9775
  Probeset Number=SeqID_12066
catggctgagatantgctatgtgatgatagatgcatgatgggctgcagagcgtatcttagcgcattanttattgtatacttnatcttacgtgtctgtatgtacgtcctagtacgtgctacgaacgtatagtagannatcgcagnatgaanaagatagtagcagaaggaaagatgatacgntgagatagagttgtgntgatgnatatgagangancagcattacgatagtcgtcgcgtatgttgatgagttgtccaggatganttatatctacgcgagtgctgtgtatggttncgtccatatntcnggattntttatagtatcaagaacgttgcgtactgtgtgctgtcaangatanacgtngatantntttatgtgtagtatgcgtcaagccgcttccgcaccatcactcgattcgtagtcnatcnactcgtcggtgagcgcgtcacgccgtaagnacaggtcgtagtngtcatcactnacatatgtcgcatacncgctgtntacttctctaagtnatgcagcgctgtcgtncgacgagtagagtcgtaagtgcgtntgatcatgcgaaactntttacatgacatcagtcacatatcagagtcntatgtanantggtcgcgcatgagtcgtcntcgntntgactgcagtagtcagtgtaggaagtgtgactatatgtgtagtctgtgcggtgtgntgagnngtgacgtcngggncgacgagtangattactcacgctctangntactacatcanttgnntngtgtgtggggttgntgngtgtantgngnctncattcatctacagctatactgcatctgnctgtcgacagctngcgctnagagcagtcgggtcaattgtcgctacngaacagagtgagtangagangatagagtaagctagtgcacatncatcagtagcgtgagcgangancagtgtcgatcgcgcgacgtactatcgacgtgctactcgcagtacgcgtcatgacgcctgcacagtantaaggtagtagctatctcatagtctcttgtgctgtattcttcatcctctcatcgcgatcgagtgcgttcatatatctcttgcgtctntcntttctctccgtcttatgttgcgtatatcagtnattctcntctgttcatctatatctatacgcttccgtngttcgtcgccgtagccgtcgtcgatgcgtgctgctagtcgggctgttgctattccttcgtcacacaccatgcgctccgatagcagcttcagtgcgtgctgcgtacgtgctgtcgcgcctgtgaacgagctagatactgagtagacgagatgtagtcgaagatgtagtgtagagatgatgagggtattgtatgatgaatganagagatgtatgatagtntnntggcntgctgtggctcgctgtgtcgcgtcngctcggcaccagtgctttcagaccgtgtnggggtctatcgttatgntgcgagcagcacagtcntagngagtgacgncgcnctgcgtcgctanaaacgcagctataancaggagacaacagcnaacagangagcgccgcagnnngtnacatcgangaagcgagtcncntcgatacagagagagaaaaagaagagnntgngcctagtacgagacagaagagacacggtnatgagnagcngncgngtgcgncacgcacgagcgcgagcggggcgnagggaacgtcagcanccgcgtagcgntgtcgtgttcttgtgtgtcggtnacgtcgtctcttcgatatcggtatactcatgcgcagttngntnnngtannnnncagcnacatgcancntganacatcaacacagtcgcccctactcactctatcanaaagcgagatgcagagtgacgcacctacnaaccacnaccaaacaaccacacaacaccatcactgaccgngagncncngtctcacnaacccccangagcgncgcgcgatcacagcagcgagtaaaccgttagcgcagcgacgactgnggnngnncgnngngtnnnggtccccncncnnncgcgcccgcgcngngaggaggacgcggagncgcncgacagcgcgngacgaagnngntnnncnagagaagcnangagacggacgngagagacgaagcgcagnggagagnngaagaggaacc

SEQ ID NO: 2288 - DNA, 1593 bp, Glycine max
  misc_feature (23)..(23): n is a, c, g, or t
  misc_feature (30)..(30): n is a, c, g, or t
  misc_feature (38)..(38): n is a, c, g, or t
  misc_feature (46)..(46): n is a, c, g, or t
  misc_feature (102)..(102): n is a, c, g, or t
  misc_feature (123)..(123): n is a, c, g, or t
  misc_feature (276)..(276): n is a, c, g, or t
  misc_feature (342)..(342): n is a, c, g, or t
  misc_feature (359)..(359): n is a, c, g, or t
  misc_feature (425)..(425): n is a, c, g, or t
  misc_feature (838)..(838): n is a, c, g, or t
  misc_feature (942)..(942): n is a, c, g, or t
  misc_feature (1004)..(1004): n is a, c, g, or t
  misc_feature (1033)..(1033): n is a, c, g, or t
  misc_feature (1084)..(1084): n is a, c, g, or t
  misc_feature (1102)..(1102): n is a, c, g, or t
  misc_feature (1106)..(1106): n is a, c, g, or t
  misc_feature (1196)..(1196): n is a, c, g, or t
  misc_feature (1380)..(1380): n is a, c, g, or t
  misc_feature (1399)..(1399): n is a, c, g, or t
  misc_feature (1420)..(1420): n is a, c, g, or t
  misc_feature (1507)..(1507): n is a, c, g, or t
  misc_feature (1546)..(1546): n is a, c, g, or t
  misc_feature (1548)..(1548): n is a, c, g, or t
  misc_feature (1593)..(1593): n is a, c, g, or t
  Probeset Number=SeqID_12067
gcgagagtgagaggcgcgcgagngaagagngatgtcgnagagagancgaatgagacgaagagctactaggctgagcagcgagacgcgaggctgacgctcggngttgcgtcttgctgtgtgctnctacttgctgatgaggtgagtcgtctattattgaggtgttcgaacgtactctctatcctcctcgcctcttgttctgtgcggtgatgctgtcgagtgatattgcgtctcacgttgactgcctgccccggctgctcgtcgagtaatgattctcantcagccctcatagaagaacgtctcgctcgctgtcaaccacctctcggtatgaatcgagagtgtgcngcgggcgagtattgatncaagacgcgactaacgatccgaagcgcgagatatatgaaccaacagtgaggaatatgctatatgancgacgcgctcgtcgtcgtcgaagcacgagtgcgaaggattaacgatactacatccgacgttcacgtacatcggacggaagcaagcaacggttcgatgcgagtgcggctctctcctcactcccgagcgcgccctctcacgtgctatactatcgtctagagctcttgtctcgtatctctcaatctcgcagtgttaccgcggagtgttgatgctctatgtcgtgtcgacagtatctgacaacgaagaaatgcacagctagtcatctagctgcgctaccagcgttgcagcagcaagaacgtcacacatccttgagctcgtcactgactatgtcacgtgcgattagtcgcgtataactcagcgctctacgtgagtcgccatatactactatattgaccgctacttatcagattctacntatgctgtgtgctgtacgcgtctgagcacgacgatcatgatgtgctttgtgtgtcacgatcgcgatacgccatccaacttctgtagacgtcacagtatgtcagnatgatatatagttcgcgcgcgcagttctcgtcagttgtatgtcccatagacagtgtctgcanacttattgatggtatgtatgagatgatgnatgtcagactgtagtactgagtgcacgtcgtcatacgttcgcgcgcactancgagcgtcactgctatantcancacatgagtatccattatttcactcgtatcgagtacgaccggtgatcgtcgactagatgctgtctcatcagctttgcttatcacatatgnactgagttgcgaccctcgatctacgtctatggcgaacgactaatgtgtgttcgtatacttcacactatatcgtcgagacgatagtgtattcatgtcatataagagtcacaccactctcgtaagtcgatacggctacatcgtgcagtgtgcgatattctgcttctgttctagacatcaatatctncgcatcacgtgcgagtatntgtgatcgtttctatacatcnactactcgctatcctgtcatctcgacacacactacagaatacaatcacactacgcagtagataagacagttacgatgcagaggcaantatctatgagatcatcgtactatggagactcgacatagncnatcgcaacgcatacgctaatcgccaccgtaacgacataccatcan

SEQ ID NO: 2289 - DNA, 488 bp, Glycine max
  Peptide Sequence Number=SeqID_9776
  Probeset Number=SeqID_12068
accaaatttccgccgaagcagaaaagcatcgtctctcgtctcgtcgaggaatcaacaaccatgggcggtggcaacgcgcagaagtccaagatggcgagggagaggaacctcgagaagctgaagggcggcaaggggagccagctcgaggccaacaagaaggccatgaacatccagtttgtttgttctatgagcagcgtgcatcttctttgtcctctccaccaagcagtgtcgactgcgccatctccccccaggttgaaaatgttcctgcaagactggttaagacaccttgctgtaaccatatgtcttgagctcacacagaagacctgacaagctttactctttgtgtttgttacattttgtactgctcggatgtctaggaactgcaaatgctcaattatgaggaagtcttcaggtgtactcaattaattgtatacattgtaaaatgtttgatgatgagattttacaatatatatgtgaagtgcatctgc

SEQ ID NO: 2290 - DNA, 998 bp, Glycine max
  misc_feature (4)..(5): n is a, c, g, or t
  Peptide Sequence Number=SeqID_9777
  Probeset Number=SeqID_12069
gcgnnggcctcacttttcaaatacattactaagtgatatagacataaagatgtgttcagccataaggtgatcaaacatctttagtcagaaagtgtcatcacattagtagactatactactaatgctcttctttcatgaggttgctaggctgaggtccgacgcgacccaaatatcattaatccataaaaatcaattttatatgacatttttataaaacatttttacatgggctcaggctcattttgactcacccaaagagatttgtatgggaaagtgcccattttagggacaacttttgtaatgatattttaaaacacttgttatgcactcagcatgtggtacatgttatgaacatgaccaccacacatgtcacactcatggcttgccaggctgcaggggtctatggggaggtaggaacaggggttagagaatctgggagaggggttagaaaatatgagggagggattagaaaagatatgggaggtctgcatgtgtctgtctctctatgatatgaccatctgtgactcagtctggtggtctgagattcatatgtcttgccaatacagcatagggcatctttcatccaagttgttcaaaattcaaatcagtaggctcatgtcatttgggtggcaaattgggtggcaaaatgtatgtgtgattgacactgaatccaaatgagaacacaggaactttgtaaaaggtgtgttgtgatacaagtgatgcttactgcatgttgattgtagggacttcccagtctgacatgacactgtcagactgacaaggtgactctcacaaggtaagtctgtcaagaccagtctgtcaggggcactgtgctacaagacagatgtggtcaaagtacatgtttggcatactagagtattgccatgaacaggatgacaagtgcagcctactaaaagcagcctacctggcagcacacacagtcaagtaccatggtccaacctttgtgagtgatgtaaggtttgttacaatacaagttc

SEQ ID NO: 2291 - DNA, 830 bp, Glycine max
  misc_feature (617)..(617): n is a, c, g, or t
  misc_feature (811)..(812): n is a, c, g, or t
  misc_feature (830)..(830): n is a, c, g, or t
  Probeset Number=SeqID_12070
gcttatgatccagggcaacaggctaagaagacagttaatgaagagaaatataatatgaaaattgatgatccgaatagtgtgttacatatcgcgaactatcatcagaataaagattttgaacaatatgcaaaagttattgttgaagacaataaacagtatttgaagattaatgctcctgatgcctttacgtttttccggttacatcatgaattgcatgagatgaatagaaagaaagctcgctttctggatatgaagagcaagttctttgataataaagatccagaagaggttattcaatatgatgagaacctggataactttgatgcaattaacagtgataaaaactatagctcttctggcaagaagagagaaaccactgataagaaagaacatcaacaggctgagagaattgcgaagaagctgaagggcacaggaaagaagaaggatcccaaaatggtggagaaggatgtcgcttatgatctgattggtagatataaagatgctagtcgaactaagcaaggaggaatataaaagtgggtatattttatactgtaaaactagacaaaagacgcttatgcttggtgttttgcttaagtacgttacgaatttttttatcngcaagaatttttatgttatgcgttgcttattgaactttgctgagtgtattactgtattttactttgatttgcatacctcttgattatcatcatgcctttcagatttgaaaagagaaaaaaacaaaacaaaataaaaaaaaaaaaaaaaaaaaaaaaaaaaaaaaaaaaaaaaaaaaaaaaaaaaaaaaaaaaannaaaaaaaaaaaaaaaaan

SEQ ID NO: 2292 - DNA, 400 bp, Glycine max
  Peptide Sequence Number=SeqID_9778
  Probeset Number=SeqID_12071
cgccatcaacaacaatcaacatggcttctcaaactccatttctctccatctccatctccctcgccctcgccgcctttctcttcttcattacagtctccgcagatcccgacatgctccaagacctctgtgtcgctgatctctcctccggaatcaaagtcaacggcttcccttgcaaagacgcagccaacgtcacatccctcgatttcttctcgcaaggaatagcgaatccaggcctcaccaacaacacgtcaggtgccttggtcacaggcgcgaacgtgatgaccatccctggtctcaacacgctcggcgtctccctcgctcgcatcgactacgctccaggcggcttaaacccgcctcacactcacccgcgcgccaccgaagtcgtctacgtcctcgaagg

SEQ ID NO: 2293 - DNA, 1836 bp, Glycine max
  misc_feature (22)..(22): n is a, c, g, or t
  misc_feature (96)..(96): n is a, c, g, or t
  misc_feature (261)..(261): n is a, c, g, or t
  misc_feature (283)..(283): n is a, c, g, or t
  misc_feature (285)..(285): n is a, c, g, or t
  misc_feature (481)..(481): n is a, c, g, or t
  misc_feature (582)..(582): n is a, c, g, or t
  misc_feature (610)..(610): n is a, c, g, or t
  misc_feature (650)..(650): n is a, c, g, or t
  misc_feature (667)..(667): n is a, c, g, or t
  misc_feature (693)..(693): n is a, c, g, or t
  misc_feature (747)..(747): n is a, c, g, or t
  misc_feature (920)..(920): n is a, c, g, or t
  misc_feature (1023)..(1023): n is a, c, g, or t
  misc_feature (1026)..(1026): n is a, c, g, or t
  misc_feature (1056)..(1056): n is a, c, g, or t
  misc_feature (1121)..(1121): n is a, c, g, or t
  misc_feature (1144)..(1144): n is a, c, g, or t
  misc_feature (1169)..(1169): n is a, c, g, or t
  misc_feature (1272)..(1272): n is a, c, g, or t
  misc_feature (1330)..(1330): n is a, c, g, or t
  misc_feature (1506)..(1506): n is a, c, g, or t
  misc_feature (1532)..(1532): n is a, c, g, or t
  misc_feature (1633)..(1633): n is a, c, g, or t
  misc_feature (1729)..(1729): n is a, c, g, or t
  misc_feature (1788)..(1788): n is a, c, g, or t
  Peptide Sequence Number=SeqID_9779
  Probeset Number=SeqID_12072
gagatcactctcctgctcacanctgtaccagcacagtgacttccacccgacgtctcgacgaccgcatacaactactcctgcagccgccgacgcgtntgcacgtccagattgcgtggcgccgtgtcaggttgtctcacgccctactcgtactgagagtcgcgagtacgcatcgcatgagagtctcacacactctcacacacacacgctctcctgctcgtgcgagtaggccgtgacgtagcgctgcatcggactcgacatgtngtgtcgatgcctctgactagcncnagtaactatagctcagtcatcgtagacgtgcactacgagagcacacatcatcactcctcaccgcaggtcgacgaagaggaacagcacggcaccatcagtcttaggctcataacatcaactgataggagaacatcacgctcagcaccctcacagctcaatctatacatggagacgcgacgcagatagcactcagcantgtgacgacgcatactcctctgcgctcgatcgtgcagagcgtgaacactacgtacttatacgatatacctctagcttctacgcctactagtacactagcangacagtacacactaccgaacagacatangctatgacgatatgcgctcgtatagctcgacgagatcggnacgagcgcaccgtagtntatgaaaatagaggcacgtggatgtncgcatgctgcttaacagtcgatcacttcaacgcgaatctatccctcgtaatccntctagtcatctatagcagcaaacgcgattcggctcctggccatatctacacctcgggactctagtcttctggacagatcctgatcgctcatatctccgcatacgcatcgtatggatgacagaaccgatcgcctctgcctgcgcgccgctctcgcacagcgtatgctgtgcttnatctgtgacgtcatacgacgacagtctcagcctgaacatctctgacctagagcgtagagtcaccatgcaaatcagtctgtaggcgaccgctgcacatatgccnccnacacatgcgtgtctacgctcgcgagctatngatatctatgattactgtcgctctatcgtcgcgccagctatgtcactatacatatatgacactcncaacgcgcaactgtgaatgactngtgcagatactcgcgaatagacacntatcctgattcaattactccacgactatctacttgctacacgcggtctgctgactgatctacatcggcacaactggcggcctgtataacatacgatcgcctcnagcgccacagtctagcaacgctcgcgcatcgtgccgctgtcagcgctacaacacacgnaggccgaacgcacgtgacagacgcgtgtgcagctgagactcagcgtcacacctagcgcgactgtcgctctatagacgacgttactcgactctcggcacacggatattcaccgtccacccgactgctctgtgatcgtctgtatagatgacgtcaagtccgtcgcggagattcctctngagatatatgttagatgcgctatagntgtgtgcgatcgtgcacttcgcgtcacgctgtactgaccacatgctaatctatatcactatctcgcatgctatcgtcgcaggactatatcggactgatatnctgacgatctctctcacgcaaacggtctctagtcgcgtaatgagtcacacgcatcctgccctgtgctgcgctagactctcgtccacctcgccgtgntcgatggtgtagctctcactgctcgcattgtgcccaacatccgcgatacgccagagcgncatcgatatgtacgattcgatgacgcactgcgacagcgcgtcactgcg

SEQ ID NO: 2294 - DNA, 1726 bp, Glycine max
  misc_feature (1)..(1): n is a, c, g, or t
  misc_feature (28)..(28): n is a, c, g, or t
  misc_feature (31)..(31): n is a, c, g, or t
  misc_feature (47)..(47): n is a, c, g, or t
  misc_feature (85)..(85): n is a, c, g, or t
  misc_feature (99)..(99): n is a, c, g, or t
  misc_feature (108)..(108): n is a, c, g, or t
  misc_feature (151)..(151): n is a, c, g, or t
  misc_feature (367)..(367): n is a, c, g, or t
  misc_feature (398)..(398): n is a, c, g, or t
  misc_feature (510)..(510): n is a, c, g, or t
  misc_feature (522)..(522): n is a, c, g, or t
  misc_feature (577)..(577): n is a, c, g, or t
  misc_feature (632)..(632): n is a, c, g, or t
  misc_feature (1139)..(1139): n is a, c, g, or t
  misc_feature (1215)..(1215): n is a, c, g, or t
  misc_feature (1535)..(1535): n is a, c, g, or t
  misc_feature (1552)..(1552): n is a, c, g, or t
  Probeset Number=SeqID_12073
ncgcgtcgcggcgacgatcgcgagatanagnatgtgtgtatataatncgctgcgagcatgcatcgagcgacgaatacactatccnatcaatacgcccgngctgcgcgncgacgcgcgcagtcactgcgctctgtagactcgactctctatntcgcgcgcgcgcgcccgcgccgcgtgtgacgatatagtacgctgacgccgctatcagtcgtcgcgcgcgcacacacgtacaccgacacgccgccgtagccgagtgtgtctcatcatgcgatattctcccgatcgcgcgcgacgcagagcacacagcgacgcgtgcttatatgatatcccagcaactcagcgcaacgactgaccacgaaccgcaccncgtatttcatataatacatatacaatatgtnatacaaaataatcggcgcgcgcgtcgagcgacgatcgcgacgcctaatatatgactcgtcaacgtctccatccgcacaccctcgccgccgctattatatatatacgcacgcnccgcggatatantatatattactcacacatacatcatccagcgcgcgcacacgctgcgtcagcagangttaatataataatcgcggcgaggacgacgcggcgcacacaactcactgcgcgtnccatacattagttacgcggtcatgtatgagacgcgagccgctcctttgctttagccgtctacaccacacacacatatcatacattattgcccacaagcagccgtgtactctgcgatctacacaattgttagtcattaaacccataacaacagtcgacgtataatgtagttagagaaaaccgtgcggggagcgattgacacaccggctctaatattctcaaacatatctcgactcaactcaccgacacccagccgcttccacattttattatatgcgccggcccgcccgttctgcgcgtgcctcccacattcttcatcggcgaatatacccgcccgtattttattataaagcgccgcgccaacgagagagttcttatccaccccgcgcgcgcgcccgttattcgcgaatagcccgccgccaaaaataagcgcccggcgcggaggaacacacggcacaagacaccatcctcgccccgcaactccgcctcactctccaccgcgcagttcnaaatacaataaatctctgcccgcggcgcgcggctattcacaacgtggtaatagatattaaccacgcgcggcgagtngtaatattccggattcgccgcgtttgtcgctcgggggcgcggggccgtccccaccacccgcgcgctattaatattaccgcgcgcgctaaccgccacacaaatatcacacacacgcgtgcgcaatataaaagtaatagaggggagtgagtctcggaacacatcaatatactgaggccgatatacgacgcggagagctccggtagaatacatatataatattaaggtcgacgttaaacagtcttcgcggaagagataatttgttgtataaaagaaggtgcggtgggcaaaggaggataataatgggcgggagcgggcgcaanaccggcacaccaataanatataacatacaaaaggtgcccgcgagaggcgtaactcatataacaactataggaaatacttacccgggtatcgtgcagcaaacacggcccgcacgagagccgcaggggctggataagggcggcaaaatatcgcagggacgctacctcgtagtccgcgaggggcgaccaactac

SEQ ID NO: 2295 - DNA, 1785 bp, Glycine max
  misc_feature (25)..(29): n is a, c, g, or t
  misc_feature (31)..(31): n is a, c, g, or t
  misc_feature (33)..(36): n is a, c, g, or t
  misc_feature (38)..(38): n is a, c, g, or t
  misc_feature (40)..(40): n is a, c, g, or t
  misc_feature (42)..(42): n is a, c, g, or t
  misc_feature (44)..(44): n is a, c, g, or t
  misc_feature (46)..(46): n is a, c, g, or t
  misc_feature (54)..(55): n is a, c, g, or t
  misc_feature (58)..(59): n is a, c, g, or t
  misc_feature (61)..(61): n is a, c, g, or t
  misc_feature (65)..(65): n is a, c, g, or t
  misc_feature (69)..(69): n is a, c, g, or t
  misc_feature (71)..(72): n is a, c, g, or t
  misc_feature (75)..(76): n is a, c, g, or t
  misc_feature (81)..(81): n is a, c, g, or t
  misc_feature (97)..(97): n is a, c, g, or t
  misc_feature (104)..(104): n is a, c, g, or t
  misc_feature (106)..(109): n is a, c, g, or t
  misc_feature (111)..(111): n is a, c, g, or t
  misc_feature (113)..(114): n is a, c, g, or t
  misc_feature (116)..(116): n is a, c, g, or t
  misc_feature (120)..(121): n is a, c, g, or t
  misc_feature (142)..(142): n is a, c, g, or t
  misc_feature (180)..(180): n is a, c, g, or t
  misc_feature (186)..(186): n is a, c, g, or t
  misc_feature (296)..(296): n is a, c, g, or t
  misc_feature (356)..(356): n is a, c, g, or t
  misc_feature (358)..(358): n is a, c, g, or t
  misc_feature (392)..(392): n is a, c, g, or t
  misc_feature (499)..(499): n is a, c, g, or t
  misc_feature (502)..(502): n is a, c, g, or t
  misc_feature (533)..(533): n is a, c, g, or t
  misc_feature (554)..(554): n is a, c, g, or t
  misc_feature (610)..(610): n is a, c, g, or t
  misc_feature (638)..(638): n is a, c, g, or t
  misc_feature (644)..(644): n is a, c, g, or t
  misc_feature (646)..(646): n is a, c, g, or t
  misc_feature (720)..(720): n is a, c, g, or t
  misc_feature (730)..(730): n is a, c, g, or t
  misc_feature (755)..(756): n is a, c, g, or t
  misc_feature (810)..(810): n is a, c, g, or t
  misc_feature (829)..(829): n is a, c, g, or t
  misc_feature (892)..(892): n is a, c, g, or t
  misc_feature (979)..(979): n is a, c, g, or t
  misc_feature (1069)..(1069): n is a, c, g, or t
  misc_feature (1102)..(1102): n is a, c, g, or t
  misc_feature (1171)..(1171): n is a, c, g, or t
  misc_feature (1217)..(1217): n is a, c, g, or t
  misc_feature (1336)..(1336): n is a, c, g, or t
  misc_feature (1353)..(1353): n is a, c, g, or t
  misc_feature (1355)..(1355): n is a, c, g, or t
  misc_feature (1386)..(1386): n is a, c, g, or t
  misc_feature (1411)..(1411): n is a, c, g, or t
  misc_feature (1428)..(1428): n is a, c, g, or t
  misc_feature (1462)..(1462): n is a, c, g, or t
  misc_feature (1472)..(1472): n is a, c, g, or t
  misc_feature (1479)..(1479): n is a, c, g, or t
  misc_feature (1511)..(1511): n is a, c, g, or t
  misc_feature (1629)..(1629): n is a, c, g, or t
  misc_feature (1653)..(1653): n is a, c, g, or t
  misc_feature (1664)..(1664): n is a, c, g, or t
  misc_feature (1670)..(1670): n is a, c, g, or t
  misc_feature (1672)..(1672): n is a, c, g, or t
  misc_feature (1707)..(1707): n is a, c, g, or t
  misc_feature (1733)..(1733): n is a, c, g, or t
  misc_feature (1782)..(1782): n is a, c, g, or t
  Peptide Sequence Number=SeqID_6016
  Probeset Number=SeqID_12074
gtattttttagttatgcgctcctcnnnnntntnnnntntntntntntttatatnnaannangccnctcncnnccnngtctntgttgtgtagtattgntgagtanannnnantnncnaccnncattagtgtggttagagtggnggctgttcactacacgcattgaggaaaaagacagatgngtcacntcgtttatatagtattatatatgtgtagttgatatcgctccccctgcgctggcgtcgctgtggtgcgtgtcgttgtctgggatgaggtaagaggtagcacaagtaactcnctcacgatagtacgctatcacctctgagtcatgctaaagagaaggatgcccgctcgccgncntcgcctcgcacatgcatggcgagtcgagtcattngtgtgctagagttaataagtatcatgtcatacgtagtataaaatgcagcaccagagagacgctcacgcctgctagacgagtgtctgcgtctagcagatgctagctantanttataagcgcaagcgcgagtaggggtagatnaacataagtagaccgtagacnagaggtgcagagagcacagtatgacatacagccaatcgcactctcacgcatcgacnacacaagtagtaaagtcgtgtactgagntgagantntgagcgtagtgtgatatatgtatcacgtaccctctcatcgagtcgtaggcgtagccacgcacctctcgttatantgagtccggngcgtacggtgctatcacgcaccgcnnctgcgtgcacgctctctgcgtggtctgctcacggtatgtgtgatgccgtgatgngctgctcaactcttctgtnacggtccttgctatctccgtctcgcgttactatacgcgtcgacgtacgcagcgtgcgacgcgngtgcagagcaacagtcgaagtggtacttacgacgtcagaagggcgcgctaccgcgacgctaggagcgcggaattcaatcatcgatcngtgaagtagtggagtgcagactactcctctacagctatcggaccacaggtcgctagtgtacgtgcgtaagagtgaggcgacagaatcagncacgcgtctcgatccgagacctcacgacgtgantaatcagtaggtatactcgatgactcagcttctaagatgtgagacaatgtcatagactcatatcacagncgagacgatgagagagacgactcatatggctatctgcgtctaaaancaacacgacattatcacactccctatatgctggtcagaatatgaatgatagctatcacgtgctcagacacgatgtctagatactatataccaccatatatcatctatacacaatctagnctcgatccagtgtgagngntggcgatcgtctcattacgattgtcactcgntcatgacgtaacggtacatgcgctnatatgagatagatatgngaccgtacgcactagttctcacatcagatgatanggatgaccangcacacnacgcgatatgtcacgcaatagcgcatacatcntgcaacagccctagtaggacacgctactctatcacaatagacgtaatttaacgaatccatatctctcaatgtcggtactagtgtgagtatcgtgcacatcgcgtcctgcgcctgtcgncgcctagtgcgtctgcttactctntgtcgcttcantatgangngcgacggctgcacagacagtgcgtcacacgcgcgngtgaagagtcggtgatgcgcttccgnacgatgatcagagctcttcagctatgagcgatactctgctggactatgncag

SEQ ID NO: 2296 - DNA, 457 bp, Glycine max
  misc_feature (93)..(93): n is a, c, g, or t
  Probeset Number=SeqID_12075
aaaatatctaaaataaataaataaaacaatagtcaaataaaatggagttctctctaaaaccttcagctttaaagatgactcgaacaagttttntcatagtagtagttttagcaatatgcagttttcagatgatggaatcatctccagatttagccaacaaggtgaaggcaaataatattcaatatgacgcgattaattgtcgaaaacatagcgcagttataaccgaatttggagctgtgggtgatggaaaaacatcaaacacaaaagcgtttaaggaagccataaccaagcttgctcctaaggcggccgacggtggagtgcagctcattgttccaccaggaaaatggctcaccggaagtttcaaccttaccagccattttactttgttcatccagaaagatgcaaccattcttgcttctcaggatgaatctgaatatccagtggttgcaccattgcc

SEQ ID NO: 2297 - DNA, 479 bp, Glycine max
  misc_feature (24)..(24): n is a, c, g, or t
  Peptide Sequence Number=SeqID_6017
  Probeset Number=SeqID_12076
tggtcgcctgcggtaccggtccgnattcccggtcgaccacgcgtccgcggacgcgtgggttttccttccatgacttggttggagtgtggacaaatgttaaacatttggagagggaactgtttcctctctttgaattaagatattctaaacatggggttggtggatagttcccttgttcccagctctgctctttctctctctcccttcggcacctggtatatatgcattaaaaggatgttttcccactctcaactgcataaggataacacaggtgaacctttgctatgctccttttattttttttcctaatccctatttgctctccttttttctaattttacagtgcttaaagttcctggcgtaaagaaaactttgggtattcctgaaatacctgttgctccacccaccacgaccagtgctactcaatctcccttttctatatttccagctctaaaacaagctacatctgcaacaacaaa

SEQ ID NO: 2298 - DNA, 840 bp, Glycine max
  misc_feature (601)..(840): n is a, c, g, or t
  Probeset Number=SeqID_12077
gataattgcgcaatgaggacccgaaagcgtgaagccagcgaaccagaaagcattggccggaggcagaattcggtggcagtgcaagggaggaagaagaggagaaggaagccaagggtttgcaaaaacacggaagaggctgagacacaaaggatcacacacattacagtggaaagaaaccgccggaagcagatgaatgagcatcttgctgtccttcgttcactcatgccggagtcctacgtccaaagggtttgttttgattctcttgctagtttcttctttttcagtctctactctctttctcacaggctggggttttcacaaaattactactatgttatggtctcaattagtagaaaactagagatgaaaagattagaatacaaatgcgacgtgaaatcttaggataagtaaaaattatctgagccttaagattttagattaaattataatattaagttcacttgtgtaattgtttatgatttatgggtgaaaaatctctcgggtggttactcctagaagaggagattctcttttcttttaatttatttatatatatattttttgcattcctaccttaggaagcccactaggtcgaagggcnnnnnnnnnnnnnnnnnnnnnnnnnnnnnnnnnnnnnnnnnnnnnnnnnnnnnnnnnnnnnnnnnnnnnnnnnnnnnnnnnnnnnnnnnnnnnnnnnnnnnnnnnnnnnnnnnnnnnnnnnnnnnnnnnnnnnnnnnnnnnnnnnnnnnnnnnnnnnnnnnnnnnnnnnnnnnnnnnnnnnnnnnnnnnnnnnnnnnnnnnnnnnnnnnnnnnnnnnnnnnnnnnnnnnnnnnnnnnnnn

SEQ ID NO: 2299 - DNA, 1362 bp, Glycine max
  misc_feature (13)..(13): n is a, c, g, or t
  misc_feature (120)..(120): n is a, c, g, or t
  misc_feature (124)..(124): n is a, c, g, or t
  misc_feature (254)..(254): n is a, c, g, or t
  misc_feature (388)..(388): n is a, c, g, or t
  misc_feature (487)..(487): n is a, c, g, or t
  misc_feature (1043)..(1043): n is a, c, g, or t
  misc_feature (1120)..(1120): n is a, c, g, or t
  misc_feature (1319)..(1320): n is a, c, g, or t
  misc_feature (1324)..(1324): n is a, c, g, or t
  misc_feature (1341)..(1341): n is a, c, g, or t
  Peptide Sequence Number=SeqID_6018
  Probeset Number=SeqID_12078
cgcgagtcgttcnaggcagctgtggacacagtctccacaatacatcacatagagctacgcgcaggtgtccgcggatcagcacaataaatcacatcactcacatatagtatatcgcgttgntacntgcagtggtcgcgcggcttcaatgcgtgtatcgttgaagtgatgtatgagagcgacactagagttagatcatcgcgtactcgacgtgctatacagaacacatcagacatattggtacctgcgcatcgtgntgagtacagaatgatatagtgtggagccgggtcgctggtgtgtgccgcgcagcgtgcgaggagcgcgcgtattcgccgctacttttctctatgttccttctctctctcctctcatcttgtgccctctcacttcncctcaccgcgcgtcggcgtgtgtagatagtcgacgaccgcgccataatattacaatatacaagatcacacactacgagacaatagtgagctcacatcanaattatattgagcccatgtacgctgtatcaggcggtggagggtgtttatataatactagtagatattagaattatgttatatcacgtcagaatggtctctgcgcggcgtgaactgtgacgactttcaaccagcggaaagacacgccgcagacacagacccaacactacgccgatgagtcatcgccatatcgcgcccccctccgccgtccgtccccggccgaccgtacattgtaacgaacgattcatgtggcgtgcactttgtgtgctgttgacctctccactatacaagcactattgacccttccgtaccaataactatatttgccggtccgtctcgtttgaatattagttagtcgcaaagaacggccccgcgcggcggcccgcggcggttacactaacgcaaaacacatataaataataattactgggcatgagtagagttgggtgcctggtgtggttcgtctattcttctctacatctcaccatcctcggctgagccgcgcgcgccgaaaccacacaaaatgagacaacggagtatagctacctcctatacacnatactgtctctatgtgaagtggtatagtagtaaggtcggtgtgggtttggttttgggtcgatgtgtattttctctgnttgtaaataacataatacacccagctcctgccgacattattacaacaagacactaacacaccatcaaatgagtaatacggtgcgccaactcgcttttctcacccatcgcccctccatcgtacccccccctcgctggcgcagcgcatataggcgccgcgcgctccccccgtacgcaagtgagttgcagtttttttttttnntttnttggccgcaaggacganagggcgggcttggtggtgtcc

SEQ ID NO: 2300 - DNA, 1058 bp, Glycine max
  Probeset Number=SeqID_12079
gatccgtagaatggcttcttcgtcttcgtctccgtctcctacggcgatgaaggaaggagactactacccaaactggacggagcttccaccggagctgacgtcatcgattcttcaccgcctcggcgcgatcgagatagtggaaaccgctcggagagtatgcagatcgtggcgtcgcgtctgcaaagacccttcgatgtggcgcaaaatcgacatgcgtaacctcggagaccatggggacatgtactacgaggaattgtgccgtcacgcagttgatcttagccaaggagggttggttgagatcaatctctgccacttcgctactgattctctcctcagctacatcgctgatagttcaagtaacctgagaagccttaaagttgcacaatgctacgaaataacaagcgagggacttatagaagcagctgccaagcttccgttgcttgaagaactcgaggtctcatactgctcattatcagaagagtctctcaaagtcataggcaagtcttgtccaaacctcaagaccttgaagaaaaactgcgtcggttacaggcgtcctcgagacgagtctgatgacgtcgctctagcaatcgccgaaacaatgccaggacttcgccacctccagctcttcggggacaggttaacagacgttggtttaaacgccattctcgacggttgtcctaacctggaacatcttgatctgcgccagtgtttcaacgttgaacttgttgggtatctggagaagcgatgtctcgagagggtcaaagttgtgagacgccctaatgactcggttcatgattacccgttcgatgcaacggttaacgacgtgtcttcatcagacgatggcgacccttatggtttatctgatgttgatataatgtcggaagatgagttttactatgatgacctgtcagaagatgctagtgacaactctgactttgacccgtacgaatattattattaggattggatctgtgtttctaaatgcaatggattcgcatgtaataaaaccttttaaaactccttcacgacctcctctaatcatgcttgtaatttcgttg

SEQ ID NO: 2301 - DNA, 1698 bp, Glycine max
  misc_feature (136)..(136): n is a, c, g, or t
  misc_feature (144)..(144): n is a, c, g, or t
  misc_feature (172)..(172): n is a, c, g, or t
  misc_feature (198)..(198): n is a, c, g, or t
  misc_feature (267)..(267): n is a, c, g, or t
  misc_feature (303)..(303): n is a, c, g, or t
  misc_feature (325)..(325): n is a, c, g, or t
  misc_feature (362)..(362): n is a, c, g, or t
  misc_feature (431)..(431): n is a, c, g, or t
  misc_feature (448)..(448): n is a, c, g, or t
  misc_feature (459)..(459): n is a, c, g, or t
  misc_feature (469)..(469): n is a, c, g, or t
  misc_feature (542)..(542): n is a, c, g, or t
  misc_feature (593)..(593): n is a, c, g, or t
  misc_feature (770)..(770): n is a, c, g, or t
  misc_feature (778)..(778): n is a, c, g, or t
  misc_feature (965)..(965): n is a, c, g, or t
  misc_feature (981)..(981): n is a, c, g, or t
  misc_feature (1009)..(1009): n is a, c, g, or t
  misc_feature (1012)..(1012): n is a, c, g, or t
  misc_feature (1028)..(1028): n is a, c, g, or t
  misc_feature (1030)..(1030): n is a, c, g, or t
  misc_feature (1077)..(1077): n is a, c, g, or t
  misc_feature (1096)..(1096): n is a, c, g, or t
  misc_feature (1117)..(1117): n is a, c, g, or t
  misc_feature (1438)..(1439): n is a, c, g, or t
  misc_feature (1441)..(1441): n is a, c, g, or t
  misc_feature (1444)..(1445): n is a, c, g, or t
  misc_feature (1488)..(1488): n is a, c, g, or t
  misc_feature (1490)..(1490): n is a, c, g, or t
  misc_feature (1492)..(1492): n is a, c, g, or t
  misc_feature (1495)..(1495): n is a, c, g, or t
  misc_feature (1499)..(1499): n is a, c, g, or t
  misc_feature (1508)..(1508): n is a, c, g, or t
  misc_feature (1522)..(1522): n is a, c, g, or t
  misc_feature (1525)..(1525): n is a, c, g, or t
  misc_feature (1583)..(1586): n is a, c, g, or t
  misc_feature (1588)..(1588): n is a, c, g, or t
  misc_feature (1621)..(1622): n is a, c, g, or t
  misc_feature (1626)..(1627): n is a, c, g, or t
  misc_feature (1639)..(1639): n is a, c, g, or t
  misc_feature (1658)..(1662): n is a, c, g, or t
  misc_feature (1664)..(1664): n is a, c, g, or t
  misc_feature (1666)..(1666): n is a, c, g, or t
  misc_feature (1668)..(1678): n is a, c, g, or t
  Peptide Sequence Number=SeqID_6019
  Probeset Number=SeqID_12080
tgtattgagtggtatttatctgttagtatatgtagtgatgttatatcatacttataacatcttttagtgttgtatctacacatttctggattgatgttggattgcgcatatgttagtatatggtcattattagtgnttagtagnatacgtcatcgtgatcgcgtaaatgganacgagcatatatatatcatgtgtgtntgttagtataatactagtgcgtgtgtgtgttcgtatatagtgagtagatgtatgatacgatgtgagatngagttgtgtgaatagtgtattgaagagatgatgagntctctctcgttgtgagtggagnccgcgtgtgatgtgctgagagttcgtgacgatatacnagtagagttagcacatctgtgtcatgacgcgtgctcggtgcctgcatgcgagtcgagtagtgagagtgntgtactcctcctacatncatatcttccnttagtatctncacacatatcagtgcatacagtgacgtcgtactagtcacagaggtcggttatagagagaatgcagtgtatgcncagtatttacctcagacacatcacaacagagctcggatcatcatcagtcanttgatacatcgtgtggatagtaagatcatgaggcagagactcaccatagcatcagttatgctgatgtttgggcataattccaggattgtatgagacgaacatgtgtactcgtaactgtgatagtgagtctgacgtgcacacatatcttcagtctgcatcgtgtctctacttgtacancgtatctncgattggtcgatatatacaccatacactcttacctgctacagtcgacgtcaactctctataactctgcattgtcggtgctcatatatagagtataaatacactccacacacacatctcattctgtgtacataacatcaacatagaagatcaatatggtatggtaagaggtgtgcccacacataacgngtgtcttacactcatnaggtagcagctgccggtgcttagtgacnccntttgcgtgcgtgtggngntagctttctccgagtccgtgttaggttacttagtgcgcgttggcgcnttcgcgtcgctctctctcngccttgttgtctatggtattnttaatttcatatatcatataatatttattattatagttattttagtatatatatatattatttgtgatatatttattaagataagtgttgatgtacatccgacgccgacacactacacttaacataatatattatatataaatcatagtatctatatgttattattgttatattgttagtcgcggcttcttgtgtctctcctattctctcgaggacagtgatagttatataccgctatgtgtacagttacgtcatctattcctgccttgtctgttgtttggtttgattgatgtattataatgttaggtatatatttagtanntnttnngggcggttcccactgcgatgctagtcgtaattatctagattgntnancanctancatcagatnatgacagagatgcnctncgatctatacgattgatgtaatagtatgtttagatttatagtatagatatgtacgttnnnngngtgtgatgagtatagtagggtgccgtcattgtnntggnntggttttggttntgtgacgacaacgagggannnnngngnannnnnnnnnnnggggagcacacaacccataa

SEQ ID NO: 2302 - DNA, 618 bp, Glycine max
  misc_feature (68)..(68): n is a, c, g, or t
  misc_feature (618)..(618): n is a, c, g, or t
  Probeset Number=SeqID_12081
tcgagccgctacgtaggccccacccccctggacttgaacgcccctacaatggaacctccgtcgactcncaacaggaagcgacgccttgcccatctctctatggaggagaagatgtacagaaagaagttaaaaaacagagttgcagctcaaacttcaagagatcggaaaaaagcacgtatggatgaactggagtcctcagtttcttctatggctgaagagcttgaagcaatgaaaagacttaatgaaagaatggaggctgaaaatgtgttactgaagcaacagttacaagacgcccaagctaccaatgctgcgcttttggagacattactggaaaaagaaaaatgtgcctgcggcaagaatcagaagagcaataatcagattgttcctgttagtttcccatccaccttgtcacgacctgctgagtcgatgagacaccctctgctgaagggaccggaagggaaacgagcagacaacctgaaaagcctgacgatcttgttgatggcataccttctctccccgaactcctcgccgatctcggatctgacgaagatctgccagaccttggagacttggagcgattcgctgaaagcctcttgcaagaggcctttgcccatgagn

SEQ ID NO: 2303 - DNA, 1712 bp, Glycine max
  misc_feature (55)..(55): n is a, c, g, or t
  misc_feature (81)..(81): n is a, c, g, or t
  misc_feature (101)..(101): n is a, c, g, or t
  misc_feature (120)..(120): n is a, c, g, or t
  misc_feature (149)..(149): n is a, c, g, or t
  misc_feature (242)..(242): n is a, c, g, or t
  misc_feature (255)..(255): n is a, c, g, or t
  misc_feature (265)..(265): n is a, c, g, or t
  misc_feature (272)..(272): n is a, c, g, or t
  misc_feature (274)..(274): n is a, c, g, or t
  misc_feature (401)..(401): n is a, c, g, or t
  misc_feature (408)..(408): n is a, c, g, or t
  misc_feature (414)..(414): n is a, c, g, or t
  misc_feature (425)..(425): n is a, c, g, or t
  misc_feature (429)..(429): n is a, c, g, or t
  misc_feature (437)..(437): n is a, c, g, or t
  misc_feature (481)..(481): n is a, c, g, or t
  misc_feature (575)..(575): n is a, c, g, or t
  misc_feature (612)..(612): n is a, c, g, or t
  misc_feature (679)..(679): n is a, c, g, or t
  misc_feature (683)..(683): n is a, c, g, or t
  misc_feature (685)..(685): n is a, c, g, or t
  misc_feature (713)..(713): n is a, c, g, or t
  misc_feature (751)..(751): n is a, c, g, or t
  misc_feature (812)..(812): n is a, c, g, or t
  misc_feature (859)..(859): n is a, c, g, or t
  misc_feature (875)..(875): n is a, c, g, or t
  misc_feature (894)..(894): n is a, c, g, or t
  misc_feature (897)..(897): n is a, c, g, or t
  misc_feature (905)..(905): n is a, c, g, or t
  misc_feature (912)..(912): n is a, c, g, or t
  misc_feature (972)..(972): n is a, c, g, or t
  misc_feature (1226)..(1226): n is a, c, g, or t
  misc_feature (1234)..(1234): n is a, c, g, or t
  misc_feature (1301)..(1301): n is a, c, g, or t
  misc_feature (1326)..(1326): n is a, c, g, or t
  misc_feature (1337)..(1337): n is a, c, g, or t
  misc_feature (1348)..(1348): n is a, c, g, or t
  misc_feature (1357)..(1357): n is a, c, g, or t
  misc_feature (1394)..(1394): n is a, c, g, or t
  misc_feature (1424)..(1424): n is a, c, g, or t
  misc_feature (1440)..(1440): n is a, c, g, or t
  misc_feature (1442)..(1442): n is a, c, g, or t
  misc_feature (1465)..(1465): n is a, c, g, or t
  misc_feature (1469)..(1469): n is a, c, g, or t
  misc_feature (1498)..(1498): n is a, c, g, or t
  misc_feature (1501)..(1501): n is a, c, g, or t
  misc_feature (1512)..(1512): n is a, c, g, or t
  misc_feature (1515)..(1515): n is a, c, g, or t
  misc_feature (1518)..(1518): n is a, c, g, or t
  misc_feature (1520)..(1520): n is a, c, g, or t
  misc_feature (1524)..(1524): n is a, c, g, or t
  misc_feature (1533)..(1533): n is a, c, g, or t
  misc_feature (1550)..(1550): n is a, c, g, or t
  misc_feature (1558)..(1559): n is a, c, g, or t
  misc_feature (1574)..(1574): n is a, c, g, or t
  misc_feature (1603)..(1606): n is a, c, g, or t
  misc_feature (1623)..(1623): n is a, c, g, or t
  misc_feature (1625)..(1625): n is a, c, g, or t
  misc_feature (1640)..(1640): n is a, c, g, or t
  misc_feature (1649)..(1649): n is a, c, g, or t
  misc_feature (1658)..(1658): n is a, c, g, or t
  misc_feature (1673)..(1676): n is a, c, g, or t
  misc_feature (1678)..(1678): n is a, c, g, or t
  misc_feature (1680)..(1681): n is a, c, g, or t
  misc_feature (1684)..(1694): n is a, c, g, or t
  misc_feature (1696)..(1702): n is a, c, g, or t
  Peptide Sequence Number=SeqID_6020
  Probeset Number=SeqID_12082
tagtgcgaagatatgacagcacgctgatgaagtaacgagtgagatgacaaatcanaacgatgatagtacagtacagagacncgcacactgcacgtgcactnctactacacataagatcantgagcagagcgctacctgagtcatagcgncatgtctctgtcatatatatggtgtagtctaattgatatatcttcgtctcatcactcatcattgtgtacgtattatcatgacgtgagtcggtntgtctgtgatctntagttgcgtntgttcgntntggagattagatgggagagtagtacagagtagagaggagagagacgcgagcgagtagagaagtgagagagtgagagtgaggcagcagcggatgacatgcgcgagcagccagacgcgcgcagatgcgncgcgcanctgagnagcgacgtcgngcangcgcgcgnacgaccgaatcaaatccgatctagagagtgtcattgctacaagnctagaactacatcgtcgatatgcgctctcagtcgcagtgcggcagtctcatttagatatcgatgaagtcatcacagttatagtcgtgagtagtnatgtagtcgcatgctgtcggatcacctcttcatatgnggagagtagagatatagtcaacatcaacggtacctgagagtgatcctccgtgcgctagtagtgctcntcanangtctacgtgtgacttttgctactttgtngtgatctcgtctatgcgactgtgctcggtatagtctgncatcggtatgtatttgatcgcgtcatgctctcgtgtgcgatcgcggtcgcagtgatagcgngatttactagtagtgtagtgagacgacattctcaagacgatcgacgncacgataacacacacntagagtaacgtcacacatnatntcactacnactctanactacacagtatgcaatactgatgagatgtcagtatagctgatcgtgcgacgacacgacnactctgtgctgctgtcgatacctcaatacgagaggcacagtcgtacaagagacatacagagatagaagcagcactatagcagacaaacctatatatacatactattatcattatactactcatcgtagtaatagagtgtaataatatgagatataataaagagatgatatagtgatgagtgacagatttaagtagtatatgagatattaaatagaattcagacatatgtatacaagagaagagagtgtggagangtagagancactccagacacgcactctcacgacaaaaacactacttcacactcacacacccatcaaccacactcnacacatctcaccaaacacacgcgangagacacacanatgagagtgtnatgtgatanctataaacatataaattaattttgtagtataaacaanaatctcacacacactaacacacacattacntatactcatgactatncntgcgacgtacgactgcgcgacgncggntcaagtgcgactacaagatcctgccaganacncgagagagagnggnagngngagngcacgaganaagagagggagggtgangatgtgtnngagggggtggggtanggcggccgtcggtcgtgccgaatatattnnnngggcgacgccgggcgcncncgcgccggcggcggngcccgcgcncgcgtgagncgcggcgccgtgcgnnnngngnnggnnnnnnnnnnngnnnnnnncccccccccc

SEQ ID NO: 2304 - DNA, 489 bp, Glycine max
  Probeset Number=SeqID_12083
ttttttgcgtctcaagacttcgaactcgacaaatccctaattcccaaaactcccctctctctcggatctataaccaagagtgtgatacgaaacgatgtcgtctcctcgtgaagagaatgtgtacttggccaagttagccgagcaagccgagcgttacgaggagatggtcgagttcatggagaaagtcgccaagaccgttgactccgaggagctcaccgtggaagagaggaacctcttgtccgttgcttacaagaacgtgattggtgctaggagagcttcctggaggatcatctcttcgattgagcagaaggaagagagcagagggaacgaggatcacgttgctattatcaaggactacagaggaaagatcgagacagagctaagcaagatctgcgatgggattttgaatcttttggattctcatcttgttcccgctgcgtctttggctgagtctaaggtgttttatctgaagatgaagggggattacca

SEQ ID NO: 2305 - DNA, 1496 bp, Glycine max
  misc_feature (14)..(15): n is a, c, g, or t
  misc_feature (40)..(40): n is a, c, g, or t
  misc_feature (55)..(55): n is a, c, g, or t
  misc_feature (59)..(59): n is a, c, g, or t
  misc_feature (80)..(80): n is a, c, g, or t
  misc_feature (92)..(92): n is a, c, g, or t
  misc_feature (97)..(98): n is a, c, g, or t
  misc_feature (117)..(117): n is a, c, g, or t
  misc_feature (161)..(161): n is a, c, g, or t
  misc_feature (227)..(227): n is a, c, g, or t
  misc_feature (303)..(303): n is a, c, g, or t
  misc_feature (381)..(381): n is a, c, g, or t
  misc_feature (386)..(386): n is a, c, g, or t
  misc_feature (456)..(456): n is a, c, g, or t
  misc_feature (503)..(503): n is a, c, g, or t
  misc_feature (508)..(508): n is a, c, g, or t
  misc_feature (716)..(716): n is a, c, g, or t
  misc_feature (930)..(930): n is a, c, g, or t
  misc_feature (1147)..(1147): n is a, c, g, or t
  misc_feature (1250)..(1250): n is a, c, g, or t
  misc_feature (1253)..(1253): n is a, c, g, or t
  misc_feature (1328)..(1328): n is a, c, g, or t
  misc_feature (1372)..(1372): n is a, c, g, or t
  misc_feature (1379)..(1379): n is a, c, g, or t
  misc_feature (1449)..(1449): n is a, c, g, or t
  misc_feature (1487)..(1487): n is a, c, g, or t
  Peptide Sequence Number=SeqID_6021
  Probeset Number=SeqID_12084
ttggtttttgtatnngtgttgtgttgtttgtgggagacgngcggaagcgcgagangcancgcggaggagtcggcaagggngaagcatgcgancgccnnccaccagatcgtgtaaagncgaacaatacgacggactaacaaacatgacatacttagaagggntgtgtattatataagaggaggggaaaccaagaggaggacagtgggttagaatgttgtgccgtgttnctccagtgcctcggcactgatctcatctgtagtcttctcttgtcacacaccgtcccctccacggccgcgcgacacnccgcggccctctagcgtcagacgctcggcgcgacagccgccgcggctggtcttatcggttcgttttctgtgatgtcgngatgngctggcgtcggactgagcatgcgttgcggggggtgtgatcttgatacacgcgcgtcttctcttctgtatnccgctccggcgcgcggcttccccctcctgcccttacttcgcgcgccncgccncgcgtccacagccggctgagcttggtggtatctatctcttcctatggtgtatacacacccagcacacaccaagggggcgcgggtacaacacacactagcggcagcaaagaccacctacacgctagcgaccagggagaggtacatcacacaactacgggagtatgtgatgagacatatagcgtctgaacgtcacacgactgtgtgagancgccatgtctagcgtggcagctgtggtgggtctgtattcctctacatactgctccactcactactcctcaaccagtggggtatctgatcccacctgctgtgttgctggcccatcttatgtctctcctctgcgtggtcgtgctgataaaatggctggggtctatataatgaacacattgcgacaactctcgagctcagtgtgcgtggtagtacgngtgctatcgattcacgcaccggcgcctggcggggtgtagatatatatcgattcagcgcgatacgtgtgtaggccacgcgtgactcctcgatgcattgtcattgtgtggacttgcgcagctgactgtcgcttctgcctcgttgctcatgctcgtgtcatctctgtgtgggtcgtggtctgtggtctcccctcgtcgcgctcggctgctcgctcgctcnctgctccacctcacgcgcgctctgacatgatctttcgctacctctcactaacccgctcgctgctcgtactcggatatgctctgcgagatgtggtagctgtgangtnattcacatgctgtctcatctctctcactcgctcctcccctatcctcacgctctgtcgcacctctactctcccacnctgtcgatgtgatgtcgcactcttcacgacgacacgatggcgcntgacctnatcggtctgcggactactacccagataagatagagggagcaatacagctagttcatggatctgtaagagnctgggtcgctcagtgtagaacagagcagacacagctgnggcgtgtgg

SEQ ID NO: 2306 - DNA, 1271 bp, Glycine max
  misc_feature (1)..(1): n is a, c, g, or t
  misc_feature (8)..(8): n is a, c, g, or t
  misc_feature (10)..(10): n is a, c, g, or t
  misc_feature (19)..(19): n is a, c, g, or t
  misc_feature (22)..(23): n is a, c, g, or t
  misc_feature (27)..(27): n is a, c, g, or t
  misc_feature (30)..(33): n is a, c, g, or t
  misc_feature (39)..(39): n is a, c, g, or t
  misc_feature (44)..(45): n is a, c, g, or t
  misc_feature (51)..(51): n is a, c, g, or t
  misc_feature (60)..(60): n is a, c, g, or t
  misc_feature (69)..(69): n is a, c, g, or t
  misc_feature (76)..(76): n is a, c, g, or t
  misc_feature (87)..(87): n is a, c, g, or t
  misc_feature (91)..(91): n is a, c, g, or t
  misc_feature (96)..(96): n is a, c, g, or t
  misc_feature (99)..(99): n is a, c, g, or t
  misc_feature (105)..(105): n is a, c, g, or t
  misc_feature (107)..(107): n is a, c, g, or t
  misc_feature (109)..(109): n is a, c, g, or t
  misc_feature (111)..(111): n is a, c, g, or t
  misc_feature (114)..(114): n is a, c, g, or t
  misc_feature (124)..(124): n is a, c, g, or t
  misc_feature (126)..(126): n is a, c, g, or t
  misc_feature (128)..(128): n is a, c, g, or t
  misc_feature (133)..(133): n is a, c, g, or t
  misc_feature (142)..(142): n is a, c, g, or t
  misc_feature (151)..(151): n is a, c, g, or t
  misc_feature (154)..(154): n is a, c, g, or t
  misc_feature (157)..(157): n is a, c, g, or t
  misc_feature (159)..(159): n is a, c, g, or t
  misc_feature (162)..(162): n is a, c, g, or t
  misc_feature (165)..(165): n is a, c, g, or t
  misc_feature (167)..(167): n is a, c, g, or t
  misc_feature (174)..(174): n is a, c, g, or t
  misc_feature (178)..(178): n is a, c, g, or t
  misc_feature (185)..(185): n is a, c, g, or t
  misc_feature (188)..(188): n is a, c, g, or t
  misc_feature (191)..(191): n is a, c, g, or t
  misc_feature (195)..(195): n is a, c, g, or t
  misc_feature (201)..(201): n is a, c, g, or t
  misc_feature (203)..(203): n is a, c, g, or t
  misc_feature (206)..(208): n is a, c, g, or t
  misc_feature (210)..(210): n is a, c, g, or t
  misc_feature (218)..(218): n is a, c, g, or t
  misc_feature (220)..(220): n is a, c, g, or t
  misc_feature (240)..(241): n is a, c, g, or t
  misc_feature (247)..(247): n is a, c, g, or t
  misc_feature (250)..(251): n is a, c, g, or t
  misc_feature (253)..(253): n is a, c, g, or t
  misc_feature (256)..(258): n is a, c, g, or t
  misc_feature (263)..(264): n is a, c, g, or t
  misc_feature (267)..(268): n is a, c, g, or t
  misc_feature (275)..(275): n is a, c, g, or t
  misc_feature (277)..(277): n is a, c, g, or t
  misc_feature (282)..(283): n is a, c, g, or t
  misc_feature (285)..(285): n is a, c, g, or t
  misc_feature (290)..(290): n is a, c, g, or t
  misc_feature (292)..(292): n is a, c, g, or t
  misc_feature (297)..(297): n is a, c, g, or t
  misc_feature (299)..(299): n is a, c, g, or t
  misc_feature (304)..(304): n is a, c, g, or t
  misc_feature (307)..(307): n is a, c, g, or t
  misc_feature (309)..(309): n is a, c, g, or t
  misc_feature (317)..(317): n is a, c, g, or t
  misc_feature (320)..(321): n is a, c, g, or t
  misc_feature (329)..(329): n is a, c, g, or t
  misc_feature (339)..(339): n is a, c, g, or t
  misc_feature (346)..(346): n is a, c, g, or t
  misc_feature (353)..(353): n is a, c, g, or t
  misc_feature (355)..(355): n is a, c, g, or t
  misc_feature (363)..(363): n is a, c, g, or t
  misc_feature (368)..(368): n is a, c, g, or t
  misc_feature (374)..(374): n is a, c, g, or t
  misc_feature (380)..(380): n is a, c, g, or t
  misc_feature (384)..(384): n is a, c, g, or t
  misc_feature (387)..(387): n is a, c, g, or t
  misc_feature (390)..(390): n is a, c, g, or t
  misc_feature (395)..(395): n is a, c, g, or t
  misc_feature (399)..(399): n is a, c, g, or t
  misc_feature (401)..(402): n is a, c, g, or t
  misc_feature (407)..(407): n is a, c, g, or t
  misc_feature (409)..(409): n is a, c, g, or t
  misc_feature (417)..(417): n is a, c, g, or t
  misc_feature (421)..(421): n is a, c, g, or t
  misc_feature (423)..(423): n is a, c, g, or t
  misc_feature (427)..(427): n is a, c, g, or t
  misc_feature (431)..(431): n is a, c, g, or t
  misc_feature (433)..(433): n is a, c, g, or t
  misc_feature (435)..(435): n is a, c, g, or t
  misc_feature (441)..(441): n is a, c, g, or t
  misc_feature (443)..(443): n is a, c, g, or t
  misc_feature (447)..(447): n is a, c, g, or t
  misc_feature (449)..(451): n is a, c, g, or t
  misc_feature (456)..(457): n is a, c, g, or t
  misc_feature (460)..(461): n is a, c, g, or t
  misc_feature (463)..(463): n is a, c, g, or t
  misc_feature (466)..(466): n is a, c, g, or t
  misc_feature (470)..(471): n is a, c, g, or t
  misc_feature (473)..(474): n is a, c, g, or t
  misc_feature (480)..(480): n is a, c, g, or t
  misc_feature (488)..(488): n is a, c, g, or t
  misc_feature (490)..(491): n is a, c, g, or t
  misc_feature (494)..(494): n is a, c, g, or t
  misc_feature (496)..(496): n is a, c, g, or t
  misc_feature (498)..(500): n is a, c, g, or t
  misc_feature (503)..(504): n is a, c, g, or t
  misc_feature (508)..(508): n is a, c, g, or t
  misc_feature (511)..(511): n is a, c, g, or t
  misc_feature (514)..(514): n is a, c, g, or t
  misc_feature (527)..(527): n is a, c, g, or t
  misc_feature (543)..(544): n is a, c, g, or t
  misc_feature (549)..(549): n is a, c, g, or t
  misc_feature (551)..(551): n is a, c, g, or t
  misc_feature (553)..(554): n is a, c, g, or t
  misc_feature (556)..(556): n is a, c, g, or t
  misc_feature (561)..(561): n is a, c, g, or t
  misc_feature (563)..(563): n is a, c, g, or t
  misc_feature (572)..(573): n is a, c, g, or t
  misc_feature (576)..(576): n is a, c, g, or t
  misc_feature (579)..(580): n is a, c, g, or t
  misc_feature (582)..(582): n is a, c, g, or t
  misc_feature (586)..(586): n is a, c, g, or t
  misc_feature (592)..(592): n is a, c, g, or t
  misc_feature (596)..(596): n is a, c, g, or t
  misc_feature (600)..(600): n is a, c, g, or t
  misc_feature (607)..(608): n is a, c, g, or t
  misc_feature (614)..(614): n is a, c, g, or t
  misc_feature (616)..(616): n is a, c, g, or t
  misc_feature (621)..(621): n is a, c, g, or t
  misc_feature (628)..(628): n is a, c, g, or t
  misc_feature (635)..(635): n is a, c, g, or t
  misc_feature (637)..(637): n is a, c, g, or t
  misc_feature (650)..(650): n is a, c, g, or t
  misc_feature (652)..(653): n is a, c, g, or t
  misc_feature (656)..(656): n is a, c, g, or t
  misc_feature (659)..(659): n is a, c, g, or t
  misc_feature (663)..(663): n is a, c, g, or t
  misc_feature (666)..(667): n is a, c, g, or t
  misc_feature (674)..(675): n is a, c, g, or t
  misc_feature (678)..(678): n is a, c, g, or t
  misc_feature (680)..(680): n is a, c, g, or t
  misc_feature (685)..(685): n is a, c, g, or t
  misc_feature (693)..(694): n is a, c, g, or t
  misc_feature (700)..(700): n is a, c, g, or t
  misc_feature (703)..(704): n is a, c, g, or t
  misc_feature (706)..(706): n is a, c, g, or t
  misc_feature (713)..(714): n is a, c, g, or t
  misc_feature (726)..(727): n is a, c, g, or t
  misc_feature (731)..(734): n is a, c, g, or t
  misc_feature (742)..(742): n is a, c, g, or t
  misc_feature (745)..(745): n is a, c, g, or t
  misc_feature (748)..(748): n is a, c, g, or t
  misc_feature (755)..(755): n is a, c, g, or t
  misc_feature (763)..(763): n is a, c, g, or t
  misc_feature (767)..(767): n is a, c, g, or t
  misc_feature (769)..(770): n is a, c, g, or t
  misc_feature (772)..(773): n is a, c, g, or t
  misc_feature (778)..(778): n is a, c, g, or t
  misc_feature (783)..(784): n is a, c, g, or t
  misc_feature (787)..(787): n is a, c, g, or t
  misc_feature (796)..(796): n is a, c, g, or t
  misc_feature (799)..(799): n is a, c, g, or t
  misc_feature (804)..(808): n is a, c, g, or t
  misc_feature (814)..(814): n is a, c, g, or t
  misc_feature (817)..(817): n is a, c, g, or t
  misc_feature (819)..(820): n is a, c, g, or t
  misc_feature (822)..(822): n is a, c, g, or t
  misc_feature (826)..(826): n is a, c, g, or t
  misc_feature (832)..(834): n is a, c, g, or t
  misc_feature (837)..(837): n is a, c, g, or t
  misc_feature (839)..(839): n is a, c, g, or t
  misc_feature (842)..(843): n is a, c, g, or t
  misc_feature (846)..(846): n is a, c, g, or t
  misc_feature (848)..(848): n is a, c, g, or t
  misc_feature (851)..(852): n is a, c, g, or t
  misc_feature (854)..(854): n is a, c, g, or t
  misc_feature (859)..(859): n is a, c, g, or t
  misc_feature (864)..(865): n is a, c, g, or t
  misc_feature (872)..(872): n is a, c, g, or t
  misc_feature (874)..(874): n is a, c, g, or t
  misc_feature (877)..(877): n is a, c, g, or t
  misc_feature (881)..(882): n is a, c, g, or t
  misc_feature (891)..(892): n is a, c, g, or t
  misc_feature (898)..(898): n is a, c, g, or t
  misc_feature (901)..(902): n is a, c, g, or t
  misc_feature (907)..(909): n is a, c, g, or t
  misc_feature (918)..(919): n is a, c, g, or t
  misc_feature (933)..(933): n is a, c, g, or t
  misc_feature (936)..(937): n is a, c, g, or t
  misc_feature (939)..(940): n is a, c, g, or t
  misc_feature (951)..(953): n is a, c, g, or t
  misc_feature (955)..(955): n is a, c, g, or t
  misc_feature (959)..(959): n is a, c, g, or t
  misc_feature (982)..(982): n is a, c, g, or t
  misc_feature (984)..(984): n is a, c, g, or t
  misc_feature (990)..(990): n is a, c, g, or t
  misc_feature (993)..(994): n is a, c, g, or t
  misc_feature (996)..(997): n is a, c, g, or t
  misc_feature (1000)..(1000): n is a, c, g, or t
  misc_feature (1005)..(1005): n is a, c, g, or t
  misc_feature (1009)..(1009): n is a, c, g, or t
  misc_feature (1011)..(1012): n is a, c, g, or t
  misc_feature (1014)..(1014): n is a, c, g, or t
  misc_feature (1016)..(1016): n is a, c, g, or t
  misc_feature (1019)..(1019): n is a, c, g, or t
  misc_feature (1021)..(1022): n is a, c, g, or t
  misc_feature (1027)..(1028): n is a, c, g, or t
  misc_feature (1047)..(1047): n is a, c, g, or t
  misc_feature (1051)..(1051): n is a, c, g, or t
  misc_feature (1062)..(1063): n is a, c, g, or t
  misc_feature (1066)..(1066): n is a, c, g, or t
  misc_feature (1068)..(1068): n is a, c, g, or t
  misc_feature (1070)..(1071): n is a, c, g, or t
  misc_feature (1080)..(1080): n is a, c, g, or t
  misc_feature (1082)..(1082): n is a, c, g, or t
  misc_feature (1086)..(1086): n is a, c, g, or t
  misc_feature (1088)..(1089): n is a, c, g, or t
  misc_feature (1092)..(1092): n is a, c, g, or t
  misc_feature (1097)..(1097): n is a, c, g, or t
  misc_feature (1130)..(1130): n is a, c, g, or t
  misc_feature (1134)..(1134): n is a, c, g, or t
  misc_feature (1138)..(1138): n is a, c, g, or t
  misc_feature (1152)..(1152): n is a, c, g, or t
  misc_feature (1154)..(1154): n is a, c, g, or t
  misc_feature (1159)..(1159): n is a, c, g, or t
  misc_feature (1163)..(1163): n is a, c, g, or t
  misc_feature (1190)..(1190): n is a, c, g, or t
  misc_feature (1226)..(1226): n is a, c, g, or t
  misc_feature (1238)..(1238): n is a, c, g, or t
  Probeset Number=SeqID_12085
nagaaaancngcacgcganggnnatantgnnnnaggacngctgnnccaatnacgggatgnggagcgggngcgtgcngtataaaaganggtntgagntancgtggnananancgnctcggacgangngnagagngaggaaaangtgagaggnagncgngngangananggggaanaaanagagcangtnagngggnacatgntngtnnnangctcacananaaacggatcggtggagaatnngtgagngtnntngtnnnagttnncgnnagaaaancncacannancaacntnagccncncggtnaanangggcgagntgnnatagaaangagcggacgncgagagngatatangnacacaccngtggnaaagantacagngganacnagngacgncgtngnnacgcngnagaggatnacanantcanaaangngnagcatnantganannntgagnngtnngntgnatgnnanngagacnatatgaanannggngntnnnagnnggcngangcnacgagagaattgncgaggagagaacatannggcgngntnngngcggnanttgagaggnntanatnngncggngacatngagntagnagtgagnngaagcngngacanagaagangggaaangngagaccgggcggngnnacnaangaanggnngaggtanncangnagggngacaagannaatagnttnnancacttcnnatcgaggtcggnnaagnnnngagaaggnagnagngaggggnagggaaantgancnnannaccanggacnnaantatgacgcnggncatgnnnnnggacgngangnnanggcnagtaannnggntncannggngnggnngnctgcnttggnnatataantnagncgtnngggggggannccgggnagnncaagnnnataggacgnntaaaggggaggggnaanngnnccccccacccnnntnaatnaagagccggcaaaaggagccganancggggnggnngnnccngaaanccancnntncnatngnnagagnncaaaaaaggggactagccngggnccaagattaanntancnanntgcgccaangntccntnnaantgagnttactatgagcacaccgcagctacactaccaanactntagnggtgtaggcccttncntgaanggangggaggcaaggaagccaggtttagtcnctgaagggttcatgagacgcaaagtctacgcctcanaacgcggaaagnatggtaataagtttgaaggggtgggaaaaagat

SEQ ID NO: 2307 - DNA, 1564 bp, Glycine max
  Peptide Sequence Number=SeqID_6022
  Probeset Number=SeqID_12086
atattttctttttgccacaaaatccacaatttaaacattgactctgttcaaagttttaaaaagtataattttttgcacataacattaacattatccctcgactaactgtccttgaaatatgattcaccaaactaaacgaacaataaataaatcttcagttgaaagttcagaaccaaatatgttcctagaaaaacaatcatacaaacatcagcttcatgactctgaccttaagccagtcacaaaaaccataaaaaaaaccagcagcaataagagaaggtatgtcaatacccccaacgacgtgcgtcttgaccttatagatgctgtccatacctatggcgaaaaaatcaagcatgctgctaaaagattaggaattaactattcctcggcaaaggccatatgccagatttacaaaagagaaggcagaagtgacaagatcattgcaaagcgaaaggatgctaaggggccatataaggtttctaaacagaacaattcgatattccaaactgatgcgccagaagaatttgatataaaatgctcaaaagaggacaattataacgacgagaaatctgacacatcacaagatgatagccattcagagcctgaagactcaacattagaacctcaaacagcatggaaagaggaaggttatacccatgacattgagaaaagagtgcaagagatggaagatttacccgctcagacttcttatcaaacactggcacaaataagtcagccccagcagcaaatcaaccaaacaattactcaaaataactttttcctctcagtgcagccaagctaccttccacagacacagcaagcgagcagattttcaatggatgaagcaacaaatgctaaaacccaatctggctgtaattacattaacattgccaatataatgaaccctgctgctctgtcaaatttacaagctcaacaaaatttgctctgtcaagctatgaatccactcatttcacaatcgaacctcaatttatttcctgctaacaactacaataattaccctatattgaaagatctagacaaacaatatcaagcgaattgcaatcctaacaaggcctcttgttcctatccaaacccacatcaacccttaaacccatatactagtatgcctttatcgcatcagtttcaattttattcgggacatcaaatgctaaatccaagtatgtacatgaatgcgaatccatctaacttaaatcttccatttatgtcactcccccaaatgatgcctaacaggcaaatttacgggactggatatgacccaagaatttctcatgctttatctaagtttcatgagaatcttacccaaaacattccaaatattaaaataaataaagtttccaaacctcaagagcagtaaattcggcaggacaaagcattcgaaaaaagactagagcacaagcagcaactcatatactattaagaaaagtactcctatacgccctgtttacttattctctgaaaattctattatttgtaattttatggatcggaaaatttccttttatcaatgtatggatgagtcttttccataacatgaatccttcttgtt

SEQ ID NO: 2308 - DNA, 193 bp, Glycine max
  Peptide Sequence Number=SeqID_6023
  Probeset Number=SeqID_12087
tgtcattgccctttctgctgaagcatgtgtcaaaagtgtgttaatacagcgcgcagggcggttctcttatggagtgatggctacctctgttgccccattctcattttggagttcgtgcggcgcactcaatcttccccttgctttaaaccagggaggagcattttccactgcaatgcgtctctgctgccaggtc

SEQ ID NO: 2309 - DNA, 219 bp, Glycine max
  misc_feature (208)..(208): n is a, c, g, or t
  Peptide Sequence Number=SeqID_6024
  Probeset Number=SeqID_12088
gtcgcccggctacaacgccaaaaccaaagaacagccgcccgcttgcagcctgaggcgggcgctagagctggcgattccgatccggtgcgcctcccgcgcttcttcctctccctgcgcgccaattcttcccatgcctagccccaaatcgcttcctgcacgccacaaatcgaagcctcaaagcctccaaatcacccataaatcagtccanccccaacccta

SEQ ID NO: 2310 - DNA, 555 bp, Glycine max
  Probeset Number=SeqID_12089
ctccgctcttcttcctcctctccttcatcatcaaacctttctctttctttctctcttgtttctctctcctcctgcggcaatggaggacctgtggaagcgcgcgaagaaatcccaatccctgaccccttcctcctcccggatcgccgatctcgtctccgaaaccgccaagaaatcgaaggagctcgccgccgaagcctccaagaaggccgacatcctcaaatccgccgcgcttcgccaggcagaccagaccaagtccttctccgacacaaatcgcattccctccccaattcgacgccatatgccaccgccagacacttcccgcgccacctcccagccctccgccaccccgcaggagaccccagaaagtaggcgccccgcatgacctcccaacccctcacaagagcctgaacgcaacaaagtgtccgaacacttcccctaacctcgaacaaacagaggtgtctcgcgggccctccccccgcatcccacgttctgcaccgaccgcccgacaacaccgccaaagcccagaacgcaagaaataaaaaatcaaaaatgaaa

SEQ ID NO: 2311 - DNA, 942 bp, Glycine max
  misc_feature (51)..(51): n is a, c, g, or t
  misc_feature (941)..(942): n is a, c, g, or t
  Peptide Sequence Number=SeqID_6025
  Probeset Number=SeqID_12090
ccccgaccgcacgaaccccacaccccccacgccgcgacacgttggccccanacacaaagggacaccccgcggcggcggacgctctacaaaagaggaccccccgggcagcaggtgccgcaaaagagtggcagagcagagcatgcgagaagcaataggccgaagagggcgaaagccccggatagatccacagaacacaccgagataaggaaggagagggtgcgcaggaggagcaagagcccaccatgaaagaaagcgagcccccacgccaaagggcgaacaaacggagagcagggcgacggaccacaacgagagacgccggcaaaagaacgggatcaggcggagaggagacgcagggaaatgaacgggagccccaaagggaggccgcgaaaaagagcgagaagaaaaaagacggcccacgagaggcgaaaagcaggcaaaaataggaaagggccgaacggaaagacgcgggaaggagcacagggcaagcagtgcggaaaaacaaggaccaccacgggaaacgcccgaatcgacggcacataaaccagaacttatcgaatccgagagggagcaaaccaaaatgggtgaagtcaagaaaccaatggcaacatgctaagagggcgcgacgaagacacccacggagagagaaagcctggtacaaggaccaagaggcatccgccgaccgaagaagaaggttggtggaaggagaggccgaaatgacggcatacgggagcaaaaacgggttgaggacaagaacaagaacacgggggaaaaggggaccgaaagcgcgccaacaaccaagggccgcaccgaggggaaagaacaggggacgccagtgggcctatggacggaggggaccaacggggggaaacctcccgcgcccggcacccgaccggagaacaacaaccgcggttgccacatttcccaagggagaccaggtagann

SEQ ID NO: 2312 - DNA, 454 bp, Glycine max
  Probeset Number=SeqID_12091
tcggtgcaatcgatacacccttgatcaatacccgataaaccaccgaccacctttgactctctcacgctgcaacggcgcgcacgttctggaattcctccgctacctcgaccaggacggaaaaaccaaggttcacgccgaaacctgcggatactatggaaactcccaccctccgggaccctgcacgtgtcccctgaggcaagcgtggggcagcaccaacacactcaatggccggctacacagcccctacgaggagaacggcggcacgccggacacgaacaccgacgggacacgcgcagagaagtggaacaccacggaagcaacggacacgcatcgacagagcacaggcaaagcgaggagcaaaaaaacgagcaagaacgaaccaggagcacacgacaagagacgaagcgaagcagaggcgaggcacagaacaccaagcaacgcaagcaccacccga

SEQ ID NO: 2313 - DNA, 1556 bp, Glycine max
  misc_feature (22)..(22): n is a, c, g, or t
  misc_feature (24)..(24): n is a, c, g, or t
  misc_feature (27)..(28): n is a, c, g, or t
  misc_feature (30)..(31): n is a, c, g, or t
  misc_feature (40)..(40): n is a, c, g, or t
  misc_feature (53)..(54): n is a, c, g, or t
  misc_feature (99)..(99): n is a, c, g, or t
  misc_feature (101)..(101): n is a, c, g, or t
  misc_feature (146)..(147): n is a, c, g, or t
  misc_feature (212)..(212): n is a, c, g, or t
  misc_feature (218)..(218): n is a, c, g, or t
  misc_feature (264)..(264): n is a, c, g, or t
  misc_feature (309)..(309): n is a, c, g, or t
  misc_feature (347)..(347): n is a, c, g, or t
  misc_feature (391)..(391): n is a, c, g, or t
  misc_feature (556)..(556): n is a, c, g, or t
  misc_feature (695)..(695): n is a, c, g, or t
  misc_feature (762)..(762): n is a, c, g, or t
  misc_feature (833)..(833): n is a, c, g, or t
  misc_feature (1011)..(1011): n is a, c, g, or t
  misc_feature (1047)..(1047): n is a, c, g, or t
  misc_feature (1094)..(1095): n is a, c, g, or t
  misc_feature (1120)..(1120): n is a, c, g, or t
  misc_feature (1256)..(1256): n is a, c, g, or t
  misc_feature (1282)..(1282): n is a, c, g, or t
  misc_feature (1381)..(1381): n is a, c, g, or t
  misc_feature (1401)..(1401): n is a, c, g, or t
  misc_feature (1427)..(1427): n is a, c, g, or t
  misc_feature (1434)..(1434): n is a, c, g, or t
  misc_feature (1447)..(1447): n is a, c, g, or t
  misc_feature (1491)..(1491): n is a, c, g, or t
  misc_feature (1527)..(1527): n is a, c, g, or t
  Peptide Sequence Number=SeqID_6026
  Probeset Number=SeqID_12092
ggagggtgagttgggggcggtntngtnntnntgcgccttntctcccttctccnncccccacgtctctcctactcgcgcgccgtccccctcggtgtgcananattattatatcgcgctatgtagcagtggttatgagtaggatgcgnncttcactatgatgaaggatcgctgactacgataattacgacaaatagaggaaatatgtatgtatntatggntgtattagttgcgtgtgagacggtagtgtaggtcgccacaaccaancatgcctacctgcatacgcattatgagcgccgactcgtagcgggnaattggagtgacgagctagtaatcactgtgtgatgttnggataggtatagggcagccgctagtgcgcgatggtgtagcgatnagtaatcatcgccctatgtgtgatctccagtagagatcgtgtctatcacgtcgcacgccactgtgcagatgacactcgtcatactcactgtgactagctcagtagaagatgtctcattattagttgatatgtgatgcaattaattatatactcgatagtgatatnaagacgcactgatagcagctgtattgtatgaatagtcactccacacactactcgcatgaccgtacttgcagcgccgtgcggcggcgctcgccggcatgtgcatgagaataaacgagagctccacatggatgttctgtgntgtctgttgagatcgtgcctagatccttaaggcacgaccgagattattagcgtgcaatgacgaaatnttatatgtgtataactagctaggcaagaatagttgatatagatgcagtgatagtataatgaagagatagtnaatacttttatatatactatcatgtaggaataagatacactcacaatatatcacgcgcagaaagaggactactcctataccttctgtagctgaatgcctgtcccactctcatctgcgacgcacggctgtctgacgggccggcgcatgaaaatatagatataaaaatgcactggtgccnaccgtatcacgtgtcagtactatacatcactacttntgatgttagcaagtgcactcacactatacaagtacatgcgtgaactnntacacgtttatctcctgtcgagcgnactgtatcacgtcgctacgcgtagctactacgacgtgtggagtgcctacgtggcgcggtcaggtgtcgtgtgatggcgcgcgctgacctcgcacgttgcatgaggaagtggatagagcacctcaccccttcgccgngcacggcgaagaatctcgcgcgtatnttcctgttgttatggcatctctcacaagtcgagcgtgacgccatcagcgtgatctgcacctgtagctatggtctgttaatgttcgatactcggcgcatntctatgatgtacacacacanagatgtgacacatcggaagtatcacnagcgatngatactacatgcntgcagatatatcacagtacacacgaagagctatacgactcctcngtctctgcagacgtgcgtcgtgtacctctgacgacntgctcctccccctctcccgctgcgcttcg

SEQ ID NO: 2314 - DNA, 461 bp, Glycine max
  misc_feature (68)..(68): n is a, c, g, or t
  misc_feature (171)..(171): n is a, c, g, or t
  misc_feature (230)..(230): n is a, c, g, or t
  misc_feature (252)..(252): n is a, c, g, or t
  misc_feature (267)..(267): n is a, c, g, or t
  misc_feature (275)..(275): n is a, c, g, or t
  misc_feature (287)..(287): n is a, c, g, or t
  misc_feature (328)..(328): n is a, c, g, or t
  misc_feature (335)..(335): n is a, c, g, or t
  misc_feature (407)..(407): n is a, c, g, or t
  misc_feature (452)..(452): n is a, c, g, or t
  Probeset Number=SeqID_12093
ttttttttttttttttttgatccaaaacattttgaaccccaaacggtatataactcaaacccattaanaccagtaacaactgcccttgtatactagtaacaccgacgacgcactttaatgtgacacacagtaacgaccactgttgaggccccttgtccgctaaaaccctanactggagccactacttttcttttcttctccttctctacactatttcttctatatgtttnaataactcctatcgacaacgcncaaatggagtatcanaatttcanatgctaggctgngatttgtccttcagctcggcagtcggcacgaaaaccactanttggttntgcaagtcacgctccgcggttccagcgccgcctggtgctgctgctgatgatagcatgtcccccttgagtctntgcagcctatgctcgagcccgcacacgttctggatcacatccaanaaaggctgg

SEQ ID NO: 2315 - DNA, 565 bp, Glycine max
  misc_feature (424)..(424): n is a, c, g, or t
  misc_feature (476)..(476): n is a, c, g, or t
  misc_feature (499)..(499): n is a, c, g, or t
  misc_feature (522)..(522): n is a, c, g, or t
  misc_feature (551)..(552): n is a, c, g, or t
  Peptide Sequence Number=SeqID_6027
  Probeset Number=SeqID_12094
ttttttttttttttttttaacaaatcatcaaacttcttgaaactctgatcttctttttctttaatcttggcagacttggactcttccgaagttccaaatccaaacaatccagtaatcttctcctttacttcctttactgctgtaatctccttcttctctcctgccttttcttccttttgttctactgaaggagccttactttcaaagactaatgcattatttcttgcgaaattattcacatctccaccacctcctctaattggcttgacgacatgcttatcaaacaaggtaaatccacccttgtttctattatttccactggcttttcctcctcttatagatttattatcattgttattgccatccaagatatttccttcagcatgagctggcttcaattgcttcaacatcttcaattccttanctgccaaacccaagttgttttgtaaaagttcgatttgagcagtcttggtggngatttgatcatccttttcatcangcttcttttctcagtttcatganatcttgagccaacttctttctttctttannaacctctcttact

SEQ ID NO: 2316 - DNA, 757 bp, Glycine max
  misc_feature (21)..(21): n is a, c, g, or t
  misc_feature (554)..(554): n is a, c, g, or t
  misc_feature (564)..(564): n is a, c, g, or t
  misc_feature (597)..(597): n is a, c, g, or t
  misc_feature (601)..(757): n is a, c, g, or t
  Probeset Number=SeqID_12095
aagaatgaatcattgcggtcnactctttgatgagcttaacaagaagcggacgagataaagtaacagaagcaacaggctcccctgcgctgaatagaatatttttgaagctttgtttctgccttccctatatctacaggtatctgaaattgggaaaatgtttatcaaatatctgagcttctgctgttcgaagcatacaagttcatctcagcgacagtatccaactgtgatagaagagctatgtcatcaatttctgttggctgatcttaggaaatcaaccaacaacttcgatgaaaaccaaatagttggaagtggagtccttagtattgtgtataaaggttctctccaactcaatggtgttactgagtgtacagttgcaatgaagcgaatatgtgggaacaccgaggaaacacttaagcatttcaagaacgaaattgagttgctctgccagcttcgtcatccaaacttgatgactctattaggattttgtgaccacaaagacgagaagatgtggatatgagtcatgcccatggactctcctgatcgcctatctgatngatgtgaaangaccactacatggagcatagctaagatttcatnggannnnnnnnnnnnnnnnnnnnnnnnnnnnnnnnnnnnnnnnnnnnnnnnnnnnnnnnnnnnnnnnnnnnnnnnnnnnnnnnnnnnnnnnnnnnnnnnnnnnnnnnnnnnnnnnnnnnnnnnnnnnnnnnnnnnnnnnnnnnnnnnnnnnnnnnnnnnn

SEQ ID NO: 2317 - DNA, 199 bp, Glycine max
  misc_feature (94)..(98): n is a, c, g, or t
  Peptide Sequence Number=SeqID_6028
  Probeset Number=SeqID_12096
tccatttacatgatttattgttagctattatcaacaagctcagttgatgaatgctttctatctaggtgcgatatcgtttgtatggtgaatgggnnnnngatgatgagcgcattcctatgctcttatctgcaagacaaactgccaagttggacactagacgtattttgaaacggctggcaaaggaaaattgaagcagggg

SEQ ID NO: 2318 - DNA, 1502 bp, Glycine max
  misc_feature (52)..(52): n is a, c, g, or t
  misc_feature (59)..(59): n is a, c, g, or t
  misc_feature (72)..(72): n is a, c, g, or t
  misc_feature (79)..(79): n is a, c, g, or t
  misc_feature (82)..(82): n is a, c, g, or t
  misc_feature (98)..(98): n is a, c, g, or t
  misc_feature (108)..(109): n is a, c, g, or t
  misc_feature (217)..(217): n is a, c, g, or t
  misc_feature (309)..(309): n is a, c, g, or t
  misc_feature (384)..(384): n is a, c, g, or t
  misc_feature (870)..(870): n is a, c, g, or t
  misc_feature (959)..(959): n is a, c, g, or t
  misc_feature (1018)..(1018): n is a, c, g, or t
  misc_feature (1029)..(1029): n is a, c, g, or t
  misc_feature (1033)..(1033): n is a, c, g, or t
  misc_feature (1152)..(1152): n is a, c, g, or t
  misc_feature (1194)..(1194): n is a, c, g, or t
  misc_feature (1198)..(1198): n is a, c, g, or t
  misc_feature (1202)..(1202): n is a, c, g, or t
  misc_feature (1229)..(1229): n is a, c, g, or t
  misc_feature (1244)..(1244): n is a, c, g, or t
  misc_feature (1275)..(1275): n is a, c, g, or t
  misc_feature (1291)..(1291): n is a, c, g, or t
  misc_feature (1296)..(1296): n is a, c, g, or t
  misc_feature (1316)..(1316): n is a, c, g, or t
  misc_feature (1340)..(1340): n is a, c, g, or t
  misc_feature (1383)..(1383): n is a, c, g, or t
  misc_feature (1415)..(1415): n is a, c, g, or t
  misc_feature (1428)..(1428): n is a, c, g, or t
  misc_feature (1438)..(1438): n is a, c, g, or t
  misc_feature (1477)..(1477): n is a, c, g, or t
  Peptide Sequence Number=SeqID_6029
  Probeset Number=SeqID_12097
ggggtgtggtttgtttttttttttttttttttatatgcagcgagccgcgcancggttcncgagtgtgagacngcaaatntantactcccccactgaanaaatgggccnnatataataccattaatcaattctgagttggagtggagggtggggcgccaccccttacggaagagtagcaagaggttaatgggcctctcctctcccgagagttgtagantatagacatataaggtaggagtagaaaattattttgttatatgatgagcctcagaacttctagaataataaaattaataaaagaaagaatanagtccgccaaccttacgagtttattgtttcattgctcttattcgcacagaaagaaatagataaggatagaaactngaatatatgagtattattagttacggtgtgaggtgagcatatatatcatggaggccactatgacagaagaatatatcttagacacaccctactaagtcttctcgacacgatctaatgatcaccttccatgtaacatgatcgttcccatctgacgattctacttgtatctctagccctccttgtccagttgtggtggcgtgctcgccagcgactgctgccacatacgtggtagaggaaggaagataagatcttggatgatttatccctctggtatctcacttggagagtggcgcggttctgctttgtccacctaggtaattgattcataatccatgtatatatctataaacacgctatcggaacttgatatcctagacgcctccatgcagcagggcgcgcggtctcgccgagactggcggatggttatgtgatggattcttaatccccgctatgagccgaaccagagtcgtgacctgctctcgcctntatcgaactggaagaatactgtctgggtgtggagtatggtgatagttatctccgacaggaggtgagtctagttacagagtaagcacatntcctcacatgtgtgtggacaactgtccggcagacactgataattcgcgtgctagcaatnttatatcaatntggnggtgaatgtgagggcgcatctgactattggatgtgtggtggtgcgttacagttcacgtcacctctatcggcgcatgcctgtccaatcgcgagtgtgtcgacttagtatacagagtgttnacgctactatgatatgtgttgagaacgacggcgtgagcgtcnattngagnctaatcttactcgtatcttgaatgtanatactactctcattnatatgaacatgcgatctcgtatctcgcttgntgtgacatagttgtantattnatgttatgtctaatggcctncgtcgtttgtgagctccgctcggngtcagatagtctacgatcgacgagtcatctaaagcttatatantaccgctcatccaagatatttatatttctgtngtaattgtgaganacgcgtgctntactatcttaatgtgtgtgtcggcagtgagagcactgtnatatatgtcatgtaagatcacgaga

SEQ ID NO: 2319 - DNA, 1600 bp, Glycine max
  misc_feature (21)..(21): n is a, c, g, or t
  misc_feature (23)..(25): n is a, c, g, or t
  misc_feature (30)..(31): n is a, c, g, or t
  misc_feature (33)..(33): n is a, c, g, or t
  misc_feature (36)..(46): n is a, c, g, or t
  misc_feature (48)..(48): n is a, c, g, or t
  misc_feature (50)..(52): n is a, c, g, or t
  misc_feature (54)..(74): n is a, c, g, or t
  misc_feature (76)..(77): n is a, c, g, or t
  misc_feature (79)..(79): n is a, c, g, or t
  misc_feature (95)..(95): n is a, c, g, or t
  misc_feature (120)..(120): n is a, c, g, or t
  misc_feature (139)..(139): n is a, c, g, or t
  misc_feature (152)..(152): n is a, c, g, or t
  misc_feature (179)..(179): n is a, c, g, or t
  misc_feature (185)..(185): n is a, c, g, or t
  misc_feature (204)..(204): n is a, c, g, or t
  misc_feature (218)..(218): n is a, c, g, or t
  misc_feature (227)..(227): n is a, c, g, or t
  misc_feature (360)..(360): n is a, c, g, or t
  misc_feature (366)..(366): n is a, c, g, or t
  misc_feature (384)..(384): n is a, c, g, or t
  misc_feature (390)..(390): n is a, c, g, or t
  misc_feature (408)..(408): n is a, c, g, or t
  misc_feature (412)..(412): n is a, c, g, or t
  misc_feature (438)..(438): n is a, c, g, or t
  misc_feature (450)..(450): n is a, c, g, or t
  misc_feature (469)..(469): n is a, c, g, or t
  misc_feature (484)..(484): n is a, c, g, or t
  misc_feature (488)..(488): n is a, c, g, or t
  misc_feature (490)..(490): n is a, c, g, or t
  misc_feature (492)..(492): n is a, c, g, or t
  misc_feature (515)..(515): n is a, c, g, or t
  misc_feature (545)..(545): n is a, c, g, or t
  misc_feature (556)..(556): n is a, c, g, or t
  misc_feature (560)..(560): n is a, c, g, or t
  misc_feature (571)..(571): n is a, c, g, or t
  misc_feature (573)..(573): n is a, c, g, or t
  misc_feature (575)..(575): n is a, c, g, or t
  misc_feature (577)..(577): n is a, c, g, or t
  misc_feature (579)..(579): n is a, c, g, or t
  misc_feature (601)..(601): n is a, c, g, or t
  misc_feature (610)..(610): n is a, c, g, or t
  misc_feature (624)..(624): n is a, c, g, or t
  misc_feature (635)..(635): n is a, c, g, or t
  misc_feature (664)..(664): n is a, c, g, or t
  misc_feature (675)..(675): n is a, c, g, or t
  misc_feature (689)..(689): n is a, c, g, or t
  misc_feature (717)..(717): n is a, c, g, or t
  misc_feature (738)..(738): n is a, c, g, or t
  misc_feature (742)..(742): n is a, c, g, or t
  misc_feature (744)..(744): n is a, c, g, or t
  misc_feature (749)..(749): n is a, c, g, or t
  misc_feature (781)..(781): n is a, c, g, or t
  misc_feature (887)..(887): n is a, c, g, or t
  misc_feature (950)..(950): n is a, c, g, or t
  misc_feature (1003)..(1003): n is a, c, g, or t
  misc_feature (1075)..(1075): n is a, c, g, or t
  misc_feature (1132)..(1132): n is a, c, g, or t
  misc_feature (1195)..(1195): n is a, c, g, or t
  misc_feature (1217)..(1217): n is a, c, g, or t
  misc_feature (1255)..(1255): n is a, c, g, or t
  misc_feature (1265)..(1265): n is a, c, g, or t
  misc_feature (1281)..(1281): n is a, c, g, or t
  misc_feature (1283)..(1283): n is a, c, g, or t
  misc_feature (1305)..(1305): n is a, c, g, or t
  misc_feature (1320)..(1320): n is a, c, g, or t
  misc_feature (1438)..(1438): n is a, c, g, or t
  misc_feature (1466)..(1466): n is a, c, g, or t
  misc_feature (1482)..(1482): n is a, c, g, or t
  misc_feature (1511)..(1511): n is a, c, g, or t
  misc_feature (1520)..(1520): n is a, c, g, or t
  misc_feature (1524)..(1524): n is a, c, g, or t
  misc_feature (1591)..(1591): n is a, c, g, or t
  misc_feature (1600)..(1600): n is a, c, g, or t
  Probeset Number=SeqID_12098
gtatgggggggggcccccccncnnnccccnncnccnnnnnnnnnnnangnnnannnnnnnnnnnnnnnnnnnnncnnanagccgacacgggagancccttcacaaagagatcgggtaggnactgctcatcggtacgcgnacgtgtaggcggnacagacgtgcctcagcagacgtgtagntacggncatgcacgcgcgcgagagnagctggacaggagnagatgtgcncgtcagcgcgtcggcgcgcatctctgagcgcgtcacgcagagcgatgcgcgtaatattctagtagcgagcgagcgctagagcctgcgagcgcgcgagtgcgctgttgcacgccagctgtgtatgtctgatatncaggtntggtttatgatatcttgntcggcnccgtctctcgagccacgnttgngatagttgagagagtgcgaaggacanagaagagatcgntgctgcttcgtagcaatcntgtcattcccgattncacntncnattcagatagatatatgtctgantggtagctacacgactctcccgctcgcganctctgcattcncatnctatttgtatnangnangnacagacagagagtgtgtatgcnattggtacncatgcctgtgagcngagcacctgcnaggaatgagagaattacatgctgtgtaangttctcgtctnccgggcaggaggcnccaccaaccacgcccgcgttaggtcaancgcaacaccgaggacatgcanactnanctgtnctagcttggtacgtatacggaagacatcgccnctctatacctcgcatctctctgatatggaagtgagcgtaagaggcagcccagaccgcacacgcccgtgccttcgagttcagataggtgtagaaagacaatgaatgngtcgcgatgctgtccgctcctcacaccatctttatttaagtgtagagagagcctctctgcctngacgaacgcacgtctgccaagatgttcgtcattctagctacttcaggtcgtcntatgtactgagtggcacgagctcgcatggtatgccccaccccacaaggtatatgtaggctcgaactccactnctcacttcctgctaggaagagagataagtataacataatatcaacaccccctacgcnatgacgaggtgtcattcgcctctcgtcatatctcttctgaagagagattatcttaatatgtantattgttggcagttagttaagnagtacatctcgtgagaagacatagagtctctatgcgtncaatagcacnctctctctacgtggtntntgttatttgtggaagataatanatactagttgcgatncctcccccgacgccgccgccccgcgcaaccacaacataaatatatgagcgacttcgacgccccccacaacggagtcgtgcgaggatgtaagatatatagtatatattatagagagaantgcgctccgccacgcgcgcgcgctgctnatatgaacatatatantagtagtagtggcccacctaggacaatgnatctgctcnctcngatgagatgtatatatattatgacacaactacatcctctctttgtacgcaatgagagacagtacttncgctccctn

SEQ ID NO: 2320 - DNA, 1387 bp, Glycine max
  misc_feature (12)..(13): n is a, c, g, or t
  misc_feature (18)..(22): n is a, c, g, or t
  misc_feature (24)..(27): n is a, c, g, or t
  misc_feature (29)..(30): n is a, c, g, or t
  misc_feature (34)..(36): n is a, c, g, or t
  misc_feature (41)..(41): n is a, c, g, or t
  misc_feature (43)..(43): n is a, c, g, or t
  misc_feature (48)..(49): n is a, c, g, or t
  misc_feature (59)..(59): n is a, c, g, or t
  misc_feature (64)..(64): n is a, c, g, or t
  misc_feature (77)..(77): n is a, c, g, or t
  misc_feature (82)..(82): n is a, c, g, or t
  misc_feature (85)..(85): n is a, c, g, or t
  misc_feature (95)..(95): n is a, c, g, or t
  misc_feature (98)..(98): n is a, c, g, or t
  misc_feature (122)..(122): n is a, c, g, or t
  misc_feature (124)..(124): n is a, c, g, or t
  misc_feature (153)..(153): n is a, c, g, or t
  misc_feature (174)..(174): n is a, c, g, or t
  misc_feature (180)..(180): n is a, c, g, or t
  misc_feature (183)..(183): n is a, c, g, or t
  misc_feature (1380)..(1380): n is a, c, g, or t
  misc_feature (1387)..(1387): n is a, c, g, or t
  Peptide Sequence Number=SeqID_6030
  Probeset Number=SeqID_12099
aaaaaaaaaaannatagnnnnnannnnannatannnaattngnactanncgtacaccantacangacggaattatanggcanacntgatcccacnaancatagtacccaaagcgtctttatnantgtacgggacatcctcccaaccattctcngacgcgtgccttatcgggacncgcgcnccnccccggacctactgcaggcgcacacgtcgcgagttagtgccgcgccgggcagagtcatggctactccacgtcgagtgtcgctggtgacagcggcttagtgtgctgaggcacacacgtcttctctagtaataccgcgtgcactctctccgacttcctctccttctactttgtcactcatatcacgtatgtaagctagtatgttgtgacgaggtaggtgtaagtgtttattctgatagggaggcgggattttgtagatattaaatttaaatatattgaaatattaaaaattgaagttgtgcttgtctttaatggttagcgctgtactagatctcggtacaatatacttgtgatcatttgggtgcttattactcttatgcttagtgctgttaatatagggaagcttacctccgtgtcttctcttactactctgcattcttcgtgcgcacgtagacggagtccggcggtaccggcgtgacgcgttgccggcgttcattattttatcattctattacaaatatagcacagtcaaccccctcaccgtctggtggctcgtccgtcctcgcgtgtcaccgacgattctatcataccaattatgacacaaccgcatgactcgacgtactcttactcacatgcactagccacgactcactctctctttaccagatagttggcggggcgcaatgcgcttacgtccttcatcccacctcatctcttcatgggtctactgctgctcccgtcaagtcctctgcgatggatgctgtattaatataagtgatgtgcgaagatggacactccttcacgcttactccctgcgtggctgtatctgttcgtgtagacctacgtcacgtttgagacaccaccaccccccatctcagcacatcacctgcacccgtatttgttatatctgattgtagaagcatgtatatgcgagagtgtatgtgctatgtgcactgttatgactccacccgagcattgatgtaatatggctgactgtctaggatgctgtggtgtcgtgatgtgtcgtcccgcgcggcacctcgcagcgacatgcacattcatcgtctaaattatcaagctataacgataatgcgtaacattcgtatattatacggtatatgcattcatcatttcgtcactgtcatatgtatttactcttcctacatcactactaagacgtggtgcaccgcgagcataagnttgtgtn

SEQ ID NO: 2321 - DNA, 1729 bp, Glycine max
  misc_feature (53)..(53): n is a, c, g, or t
  misc_feature (104)..(105): n is a, c, g, or t
  misc_feature (112)..(112): n is a, c, g, or t
  misc_feature (125)..(125): n is a, c, g, or t
  misc_feature (127)..(127): n is a, c, g, or t
  misc_feature (153)..(153): n is a, c, g, or t
  misc_feature (254)..(254): n is a, c, g, or t
  misc_feature (271)..(271): n is a, c, g, or t
  misc_feature (279)..(279): n is a, c, g, or t
  misc_feature (363)..(363): n is a, c, g, or t
  misc_feature (366)..(366): n is a, c, g, or t
  misc_feature (408)..(409): n is a, c, g, or t
  misc_feature (414)..(414): n is a, c, g, or t
  misc_feature (417)..(417): n is a, c, g, or t
  misc_feature (419)..(422): n is a, c, g, or t
  misc_feature (491)..(491): n is a, c, g, or t
  misc_feature (542)..(542): n is a, c, g, or t
  misc_feature (550)..(550): n is a, c, g, or t
  misc_feature (580)..(580): n is a, c, g, or t
  misc_feature (629)..(629): n is a, c, g, or t
  misc_feature (631)..(631): n is a, c, g, or t
  misc_feature (637)..(637): n is a, c, g, or t
  misc_feature (723)..(723): n is a, c, g, or t
  misc_feature (725)..(725): n is a, c, g, or t
  misc_feature (770)..(770): n is a, c, g, or t
  misc_feature (796)..(796): n is a, c, g, or t
  misc_feature (872)..(874): n is a, c, g, or t
  misc_feature (876)..(878): n is a, c, g, or t
  misc_feature (881)..(882): n is a, c, g, or t
  misc_feature (884)..(884): n is a, c, g, or t
  misc_feature (906)..(906): n is a, c, g, or t
  misc_feature (941)..(941): n is a, c, g, or t
  misc_feature (964)..(964): n is a, c, g, or t
  misc_feature (1026)..(1026): n is a, c, g, or t
  misc_feature (1060)..(1060): n is a, c, g, or t
  misc_feature (1116)..(1116): n is a, c, g, or t
  misc_feature (1127)..(1127): n is a, c, g, or t
  misc_feature (1198)..(1198): n is a, c, g, or t
  misc_feature (1247)..(1247): n is a, c, g, or t
  misc_feature (1249)..(1250): n is a, c, g, or t
  misc_feature (1321)..(1321): n is a, c, g, or t
  misc_feature (1351)..(1351): n is a, c, g, or t
  misc_feature (1409)..(1409): n is a, c, g, or t
  misc_feature (1568)..(1569): n is a, c, g, or t
  misc_feature (1614)..(1614): n is a, c, g, or t
  misc_feature (1654)..(1654): n is a, c, g, or t
  misc_feature (1657)..(1659): n is a, c, g, or t
  misc_feature (1679)..(1679): n is a, c, g, or t
  misc_feature (1686)..(1686): n is a, c, g, or t
  misc_feature (1688)..(1688): n is a, c, g, or t
  misc_feature (1699)..(1699): n is a, c, g, or t
  misc_feature (1702)..(1702): n is a, c, g, or t
  misc_feature (1704)..(1704): n is a, c, g, or t
  misc_feature (1709)..(1709): n is a, c, g, or t
  Probeset Number=SeqID_12100
ctcgactacgtctcgatcgacacgtagcgagtgcaaatgcgcgacgtgagcancatgatacgtcggatcaggactactacgaatcagcacgaatcgcgagagannatgacanaatcacactgtcngngcgacgacgcgtcgcgacagacggcnacgacactgttaaggtacgtaacactagcatgcgaatgtcgcgacacgtacgctacgtgaagaacgtcgacgcactgtgacgacaggacaatagataggangacatatacgtcgtagntgcggctntgcacgtcatcgtgtctgcgcgcacctgcgcatatacgcgtagaccgtgggcagagacacacgctatgccggcgtcgcaacgantancgtatagtactacatcacgtacgcacatagcggcacgagagnngaggntangnnnnctcgtagcgtgcatcagccgcgggcggcgcggatgctgagagcagtacgatacagacgtgtctcgacgngtcaagctcgcacacagtgcgcgcgtgcatgtcagttagatagtattgtgnacgacagngactaactgagagattgatgacgagtgcgnacgtatctatttcgcgacgacgagatgatctgctcactacaacagcatnancgtatncaatacaccaatggatcgctcgatgcgagtacaacgcggatcaaccacatgagtagtcacgtagtataccgcataacgaacggtanantataagtgagcgttacgtctgtcgacgcgtactgtcgaacgtagncgatcgcagggcgcatggacatcgtncgtcgccgtcgtgcgcatgctgatgtacgcgtattatagcgagataacgtacgtatatattagcatcgtcatatcnnnannnctnngnccatcatcagacatacatacancgattacagccacgtgactatgagcatttgctcgncacatgacactacggatgaaatntagagatagagagatgatgacgcgacttgtcacgtgcagcccgcactcgccgagtcagtatntgctgactccagtcgtttatgcattgcacatggngattgcgacagaggaagcacagtacgccgttcgaggcgctcatgccgccaaggcangcacaggcggncgcgcctcgtactatacacctctacatatttgtcctcacattatctcttgcgacccgattcgcggagtcgntgacagctcaccacacagcagagacgcactcagcgtacacacagcgtancnncgggcgggtacgtcgagaattgttacttgttagtatctagtcgcgacagatacgcgaggatgtagcagaangtagatagatgccgacatatgcatgagagntgcagatgtgacagacgaatgagacgagtagcctgactgtagacgctgactacgacgncccagtatactcgtcgaaagtgccaatacacgtatatgatgtcagtaggtgcagtgtgctatgtttgatggagtgctgatgtgtgatggtagtgattgaagttgacggcatcctgcggcgtgtatacatagactcagatataagagagtagacacacgnncactgactcctctctgacacctcgacacacagcacagcacgcganccagaccgccatcctgctactagtgtgttctcacttctcnctnnntctgtctatctactcgatcntgagagngngcgcgtgtgtnggngngagtnagagtcagagagaatgactg

SEQ ID NO: 2322 - DNA, 452 bp, Glycine max
  Peptide Sequence Number=SeqID_6031
  Probeset Number=SeqID_12101
gaaaaagttctggcatatggtttcttcaacatcgactggccggctttttggctctgacggtggtcgttcttctctggctccggtgactcgaccttccttcggtactgtcactggctctgactatggcgaaccatcttcttctttgttggtgtcgtcgggatcttctccgggtcttccccagatcttgcttgctcttcgtttccacacttctctttgttacaatcattccagatctcttaattgattgcttcttcattccctctgtttaggtagctttttcaaatcgatctttttcaaatcgttaaaagcctctggtgatttttcaggaaaatcaattgaatcgagatcggttgaaggtgattggaacctccacctgtagctaagaccgtcttcgtgtctacttttactcctactgagtcgttggcgattccgttgttcgggtttttgctccg

SEQ ID NO: 2323 - DNA, 674 bp, Glycine max
  misc_feature (609)..(609): n is a, c, g, or t
  misc_feature (674)..(674): n is a, c, g, or t
  Probeset Number=SeqID_12102
tcgagtcagctacgtaggccccccccccaagggtatcacaggaggcggcagtggcagaaccgtaactcccactaccactgccgagctcgtcagctaccttggcagctcggagagtctcaacatcgttctgaccaagacctttgacttcactggctccgagggctcagcaaccgaagctggctgtgcgccatggggtaccggctcaacttgccagaaggcgatcaacaaggacaactggtgcaacaactatcagcctagcgcccccaaggtcaccatcacttatgacaaggcgggcatggccggcattacggtcaagtccaacaagtctattgttgggcaaggaaacaagggcacgatcaagggcaagggcttgcgtctctcgaacggtgtgagcaacatcatcatccagaacattcagatcacggaactcagtacgtcaatcacccctgaaagtcccatgttcaaagactgacaagagcagaccctgcctatgtttggggtggcgatgctatcaccctcgacggggccgatctcgtctggattgaccacgtctccatctcccgtattggtcgccaacacatcgtccttggtaacaacgcctccggccgngtcaccatctccaactgcgacatcgacggacgaagcagctggtccgccgacactggatgcacggn

SEQ ID NO: 2324 - DNA, 464 bp, Glycine max
  misc_feature (405)..(405): n is a, c, g, or t
  misc_feature (428)..(428): n is a, c, g, or t
  misc_feature (450)..(450): n is a, c, g, or t
  Peptide Sequence Number=SeqID_6032
  Probeset Number=SeqID_12103
cacgagaccattattataaatgcactgtctgtatactatttggtgccttttcgatcgtactcatgtgtctattcccttcacagcaagataaacatggcctatttaccacatttttcatcggtcatggatttctgaaaaattatgtcttgtgactaaatttctggttaggttgactgggttcatctggatttgagagggtggtactaattatcttagtgaagttattagaaaaggagttggtagacctatcatgtttgtcctggtggcacttctgcttgttttctgatcagcatcctaagctgctaaaggataaaagattcctaaatgtgaattgcattcctcattgtacactgcacatcagttgtgtggtccatttggtaagattgatgaatggctgtgaggtcnatagtccatgcatgtaatgtggncaactggccgtgtcttgaaagntgaaactttgaact

SEQ ID NO: 2325 - DNA, 459 bp, Glycine max
  Probeset Number=SeqID_12104
tcgagtcagctacgtaggcccccccccctaacattccatactcccaaacgtgcaagagtaatatttatttaaataaaccaaaaaaatgcctagatcagcagttttcgccagatccaaatcatttgcttcagcagctccctctcctctctctccctcttctccctcttcttcttcttctgctcccaaatcccccagctctgatgcattctctcccagatccaacagagcaaaggtctctttctaatttatatttaaaaaattaatatgattccctctctcttcactatctacattctctctcctctttatctcccttttgcaactttcttttgatattggagttgtgaatttattttggaggaaagaagaatcgtgtatgagtgagatgattttcccacgttgttgtatgattagttataaagtataaaaaaaaaaaacaacaaaaaaaaaaaaaaaaaa

SEQ ID NO: 2326 - DNA, 1817 bp, Glycine max
  misc_feature (28)..(28): n is a, c, g, or t
  misc_feature (89)..(89): n is a, c, g, or t
  misc_feature (209)..(209): n is a, c, g, or t
  misc_feature (216)..(216): n is a, c, g, or t
  misc_feature (232)..(232): n is a, c, g, or t
  misc_feature (248)..(248): n is a, c, g, or t
  misc_feature (550)..(550): n is a, c, g, or t
  misc_feature (600)..(600): n is a, c, g, or t
  misc_feature (973)..(973): n is a, c, g, or t
  misc_feature (1028)..(1028): n is a, c, g, or t
  misc_feature (1178)..(1178): n is a, c, g, or t
  misc_feature (1296)..(1296): n is a, c, g, or t
  misc_feature (1324)..(1324): n is a, c, g, or t
  misc_feature (1329)..(1329): n is a, c, g, or t
  misc_feature (1354)..(1354): n is a, c, g, or t
  misc_feature (1384)..(1384): n is a, c, g, or t
  misc_feature (1390)..(1390): n is a, c, g, or t
  misc_feature (1417)..(1417): n is a, c, g, or t
  misc_feature (1637)..(1637): n is a, c, g, or t
  misc_feature (1670)..(1670): n is a, c, g, or t
  misc_feature (1690)..(1690): n is a, c, g, or t
  misc_feature (1696)..(1696): n is a, c, g, or t
  misc_feature (1707)..(1707): n is a, c, g, or t
  misc_feature (1710)..(1710): n is a, c, g, or t
  misc_feature (1714)..(1715): n is a, c, g, or t
  misc_feature (1717)..(1717): n is a, c, g, or t
  misc_feature (1721)..(1721): n is a, c, g, or t
  misc_feature (1723)..(1726): n is a, c, g, or t
  misc_feature (1729)..(1729): n is a, c, g, or t
  misc_feature (1745)..(1745): n is a, c, g, or t
  misc_feature (1808)..(1808): n is a, c, g, or t
  Peptide Sequence Number=SeqID_6033
  Probeset Number=SeqID_12105
ctctttgctgacgagtgacatcagtaanataatctatgtcgatcgtgacagtacgagatgcgagacatgcttaggtcaacacataaacnttatgactatcagacgaagagggagcactcgcgagctgctttgtatatctccatgggtgtcgtgtggtgaagaacgtatcgcttcgcgctatgcgcaaggttcacactccatatgtaagntcatctnctgctcatctgatgcnagcttgctacgcgatngtcagtcgtcaagatgatacgcagaacagatacgtgcgagagtgtcaagagtacacacgctaggtctgattgcacgttattccgatctcatatacgcagtctccacacgagccgagcgcacctcacgcacgtccactgagttcggcatatagcagtgaatcgcgcatcgtgatactagtcgctgagcggtttgatcttccatgctcgcggtctactcgtcgctccgcgcgcgttcattggtcatcgctctagtagatatcgtatgcgcgactctcagctctcatcgagcagtcaagtaactncattacagtaggatctacagtcataagtcagtattacacccacatcgtanctgtcacataatacgtcgtggatcatgagctctactacacagaacgcataagtagaatcgactaatatcgcaaagtcatgatcgtcaggacgtattaagcactctgcagtcgtgtggtgggtcgtctacacatatttctaacgtattgcgagtcgctacataataatattatatacctgtcctaaatgagagcacagtcgtccgtacatacgattacaacgccactctgtgtgcgttatcacctcactctgtcgcactcaatgtatagaatgagatcacagtagtcggagagtgagtgtgtttcctcgagtgacttctcctgatgacgtagtcgtgatagcgctcgtatagtcgcgaacgttgagtgatgaancatacgcatactgcgacgagacgtggagtcagcgcaagtacactccacacctggnatactgaactcagtcacccgtgctgctccgttccataccactacacccatgtgcgacgcgacacgaccaccgcacggcggtcgagtgtatatatatataaaatatggacgcgaccgatcatacgtatacttgtaactgacactcgaattntattctagtatactcgtataccgctgattctcacacatataatataccttctagtgtacaagttcggcatactagctcacataatcatcatcactacacatctagcattggtgtcctnacacacatcgatgtgatgtcacgtagtnctatncagtctacatgacttgccgtctggnttcgtctgtctctctcgcacgatcgacagncgaagngagcaacgaacagtcactgacactacntagctcgcaacacacagcatagcatcacgagcaatcagctagtcgcgtaccgcatctgtcgacgcgtggagtgacactgctcgtcgacgagtatattcatatactgccatcggccagtctcgagtgatactgagagttgtggtggctcattagtgtcatctactcatatatatatatgctctattcactctagagtgtgtcatacatcacgctagtcaancaacatcacgcaacaaacgacagctaccgatangcgcacgcgcgcggcgaggnacaccngtggttcactntanaatnntnatcngnnnnacntacactacacagaganaagcacgagagagaagaagatagttattatagtatctcactgtatatatctatatacatcagntatacgttt

SEQ ID NO: 2327 - DNA, 437 bp, Glycine max
  Probeset Number=SeqID_12106
tttttttttttttttttgtactttccttaagtagagatgataagggggctcattcaggtatcttgggagcgtgtggcaattggtattttttttattgtttgcaccattgcccaaaacttgaagctacactggctaggcagatacaggcacaatttcaaaccttctggcaagcaagctcttcaggttagcagcttattatgaactaatattgtgctcatttttatcttatagtgtgacaaccatgtatgtgagcctgtgagttagttactactttggtattggtctatcgattttgctttttttattaaattttttttatcaatgttagatgaaccaactaatagtgaagagactaaataattatttggtgatttataattttgggaatcattttttttaattctagcaaccaactaatacctctttctttgatctgt

SEQ ID NO: 2328 - DNA, 1526 bp, Glycine max
  misc_feature (1474)..(1476): n is a, c, g, or t
  misc_feature (1490)..(1493): n is a, c, g, or t
  misc_feature (1507)..(1507): n is a, c, g, or t
  misc_feature (1511)..(1512): n is a, c, g, or t
  misc_feature (1514)..(1514): n is a, c, g, or t
  misc_feature (1526)..(1526): n is a, c, g, or t
  Peptide Sequence Number=SeqID_6034
  Probeset Number=SeqID_12107
cgccgattgggtaccgggccccccctcgatcagctacgtagaaacggcccccatgttgaaatatgatggtgtttcacaaatagcctatttgtagtttctttattaaagctacgcaaagggatattctgtaagagtttttacaaaagacagcatatttgttttagcccttatttctccataaagcagtcaactaggaaatatattcaagcttcattatgttttatttcccttacgcagtaaaattgaaataattaaagcataacctttgcgtagcattatcagacaaaaagaaggtgtgactagaaatgaactagaccaggattcgtagggacaaatcagtcttttagactgaattaatcccaaaaaaaatcttttagtgtgacttcagtcaccaaataaaatcggttaaaaaatgacaaaaccctaaaattgtttgttgataacatttaactatattagcaccagtctgcttcatttctagccaaccttcataaatttgctcgtatttttgcacaaagtacatgtttgtcttcctcgaagtggtgctttgcgtccgtgtcgattaatcgttgactgtgatttgtatcatgttctaagcaataatcggatcataagtgtttataaatgttttctgttcaagttttcctagttgttttgtgtaaaatggttcaaaaccctttcttttatctgctagggtgttttgaggcttgatgcccactaattttgcattgggtctggacagaaactaaactttggaatgtcttgtaaatgactggccggaaaattgtgcacaccttcggcctctcataataacttttagtccattaaatgaccagttttaatgtcggcatgatatatttattccttgttttattgtaagtatgatacaattgcaaatattttagaagtcattaatattcaaatgctgtagggttttatatttaaagttgtctatgagatactgtttagattagaaggtcactcttgataagacttattgcatgaaacatcattttagctgtgttgtttttttataaactgttgattgtttaatcaagttgtagtcttataatttttttatcattgttaacttctataaattaaattaaaatagttctctttgcctatttattatggttagtcaaatcaatcgcccattattatatttcattattcgatacctttaatgaatgctaacttgaattttcccacttgccgctgatttcagatcgagtaactgttatctgtgcacaagtgattatagaactttattctttcttgccatttaaaagaatgtattttacatatttattcataacttctttagaactagtttatttctgtgtaataatacagttgtttattatgtaaattaaatagaactattcattgaaaaaaaaaaaaaaaaaaaaaaaaacaatgaaaaaaaaaaaaaaaaaactttttgggttggggtgttgatagagagaatttnnnggggggttttttgnnnntttttttgtggggngttnntnttgtgggggtgn

SEQ ID NO: 2329 - DNA, 594 bp, Glycine max
  misc_feature (1)..(1): n is a, c, g, or t
  misc_feature (38)..(38): n is a, c, g, or t
  misc_feature (70)..(70): n is a, c, g, or t
  misc_feature (524)..(524): n is a, c, g, or t
  misc_feature (573)..(573): n is a, c, g, or t
  Peptide Sequence Number=SeqID_6035
  Probeset Number=SeqID_12108
nacagtttgtacaaaaaagcagctggtaccggtccggnattcccgggatatcgtcgacccagcgtccggnaagatatggtggtcccggccgctaaggacttcatagatctgactttgtccaaaacccaaagaaagacgccgactgtagttcacaaacattatcagatcaaccgaattcggcacttttatatgaggaaagtgaagtacactcagcagaattaccatgaccgcttgtcccagatactcacggatttccctaaactggacgacgtgcatccgttttatgccgatttaatgaacgtcctgtatgacaaagatcattacaaactggcactgggacagctcaacatagccaagaatctcattgacaatgtgtctaaggattatgtgagactgatgaaatacggcgactcactgtatcgctgcaagcagttaaagcgagcggctctggggcgcatgtgcacaattatcaaaaggcagaagcagagcctggagtacctggaacaagtgcggcaacatctttnccgtctgccaaccattgatcccaacaccagaaccctcctgttgtgcggntatccaaacgtgggcaaatcc

SEQ ID NO: 2330 - DNA, 559 bp, Glycine max
  misc_feature (335)..(335): n is a, c, g, or t
  misc_feature (501)..(501): n is a, c, g, or t
  Peptide Sequence Number=SeqID_6036
  Probeset Number=SeqID_12109
tcgagtcagctacgtagtgccccccccccccgaatgaacactttactcatcgctttgtcagttatagggcaagcagctgccgaccggctgctggtggcttcatacggaaatgaaactcatgctggcgccatccagacgctcgaagtactgcctagcacaagcgcaaattctagccatgcgatgaaagttacccaagagaaccacgagtgtggaactttgcctacatggttggatgcgtcccttggcctggataggatagtctgtctagacgaatcagctgccaatgctagtctcacaatgttgagccttggtgatgacggcagcctccaaaaggngtccaataccagtgtgctgggaggagcagtatcctcggcgtcctacaataacaaatccgcattagcccttgctcactacggacccgagccagccatatcactgtttactatcgatggggaaaacaaattttcgtctttgcaaaacatcaccttccaggcgcctgancaaatccatcaagcggtcgtcgatcctacggggcaatacatgatattccccagtctcg

SEQ ID NO: 2331 - DNA, 1401 bp, Glycine max
  misc_feature (22)..(22): n is a, c, g, or t
  misc_feature (113)..(113): n is a, c, g, or t
  misc_feature (348)..(348): n is a, c, g, or t
  misc_feature (428)..(428): n is a, c, g, or t
  misc_feature (687)..(687): n is a, c, g, or t
  misc_feature (742)..(742): n is a, c, g, or t
  misc_feature (783)..(783): n is a, c, g, or t
  misc_feature (888)..(888): n is a, c, g, or t
  misc_feature (1004)..(1004): n is a, c, g, or t
  misc_feature (1006)..(1006): n is a, c, g, or t
  misc_feature (1019)..(1019): n is a, c, g, or t
  misc_feature (1021)..(1021): n is a, c, g, or t
  misc_feature (1035)..(1035): n is a, c, g, or t
  misc_feature (1058)..(1058): n is a, c, g, or t
  misc_feature (1065)..(1065): n is a, c, g, or t
  misc_feature (1091)..(1091): n is a, c, g, or t
  misc_feature (1118)..(1118): n is a, c, g, or t
  misc_feature (1240)..(1240): n is a, c, g, or t
  misc_feature (1294)..(1294): n is a, c, g, or t
  misc_feature (1301)..(1301): n is a, c, g, or t
  misc_feature (1309)..(1309): n is a, c, g, or t
  misc_feature (1328)..(1328): n is a, c, g, or t
  misc_feature (1398)..(1398): n is a, c, g, or t
  misc_feature (1401)..(1401): n is a, c, g, or t
  Peptide Sequence Number=SeqID_6037
  Probeset Number=SeqID_12110
aagatgatatatataagaatanacacgatagatatgtagtagatgaaaagaaagagataaagaataatagggaaatgagaggagaaaccaccccaccccattagtatataaantaagataaaataaaatataaaaaataaagaagtataaggaattgagtagttattgtgatatgataaagaggatgtatgagaagatgaagaggaaagaagagagaagagatggaaaagaagtatttatttattgtatagtataatatatatgaaaattaatgatagctggtgtggagggtggtgtggatgtatgatgtagaggaggttggtggttgtggtgttgggttgtagccancaatattcttataaagagttaagtagaatagaagagtgttcatgtaattaatatttctctctaagatgtatcttcttttntagattatgtttagtgtgggaacatatgaagatgagtagagatagggagtgtgattatttatttgattaaatatagtatagataatgtaactgataagaaatatgagagggagatggaatatatgagacagatgaggtaagacacatatgtaacattatagaataatatatgtattatatcttatagttatattagataaatatcatgatggtaatataaatgttatataatggagagaggaggagctagaaatgaggngaatatgagtgaggtatatactaccaaacaaatagatatagtgtcgagacagagnatggagaaggatatgatgggacattgaagagcggatgttanagtctgtaatggaggaatgtagacgttgtaatgtggatagataggaaagagagagagagaatagtgagtaaaactaacaatcgacatatttagtgtatgagcgtngaatactgagagctggtttatgattgtgagcatatatgaacggcgtatgtaagagtagagtcgggtcatatgaagatgattgtggacagtagtagttacatagatgtttgtcgtcntntcgatgagctgcntnagagtagttatgcngactaaaaggagtagatgcgtantgagtancgtgtgattgtgtgtgtacacttaanacgtagcggatgatgtagtgagatctntgtagacgctcgagaaatatatatagaagagaaagacgactcatgatcgcgtgacagtattggtgcatgtggataatagatcgacgcctatagtatttatacatgcttgcatcgatatatgntcgtccatatatattatactgacatgtgcaattgtcgtcgagagtaggatatgnattttancgatcaanatatgactagatgtagcgncgcgtaatgtgagtggtgtatgaaggtatggagtgtgcagtgtgtactgtctgacacgcgctctcacgcncgn

SEQ ID NO: 2332 - DNA, 408 bp, Glycine max
  misc_feature (96)..(98): n is a, c, g, or t
  Probeset Number=SeqID_12111
tcgttgtacagtgtacttagctgccatggctgccttccacctcctcttcgtcctcgtgcttgcgctcgccgccagcaacagtgccagcacagtggnnnctgcggacgacgatgatgtgcggctgcggcaggaggccatggtgcaggccctcggggtagtcacccgcttcgacctggccaacaccgaccccgaagcagtgaggcaggtgaagcgggcgctcgcggtgctggactgtgaggtccaggcccacccccagcggtggaagaccatcttcaacgccgttgacaaggccatggatagcggcgccgacgaccgtagcagtgaggaggcgtcctcatcggccaaggagctgctggagcaggagttcggcccgtgtccgagatgcctcaaaagggacctcggagtcga

SEQ ID NO: 2333 - DNA, 1612 bp, Glycine max
  misc_feature (15)..(15): n is a, c, g, or t
  misc_feature (22)..(23): n is a, c, g, or t
  misc_feature (32)..(33): n is a, c, g, or t
  misc_feature (280)..(280): n is a, c, g, or t
  misc_feature (791)..(791): n is a, c, g, or t
  misc_feature (988)..(988): n is a, c, g, or t
  misc_feature (1506)..(1506): n is a, c, g, or t
  misc_feature (1598)..(1598): n is a, c, g, or t
  Peptide Sequence Number=SeqID_6038
  Probeset Number=SeqID_12112
tgttggtgtgtttgngtttgtnntgtggtggnngtgggggtttagcaggttgggtctgtcgtgtgtgtgttacttcagatgataaccttccaccgcacgctctcctgactttcgctctctactactctctcacgcatctcgtctctgctgtttggttggtattattactttattgtatgtatcctattacctattgcgagatacacacatacttgcaaaacgaactaccctcctcctcactccttatactccccccaattattctttctctgctatgctntctactccaggatatacattacctaacgatgagactactcggcgaattctctattcttcgccatagatatcactgatacatatgtatatcacatggaaccagggagagagctgatggattatgaagatgaatgagaagagataaaacttcacgaatcactgaactctacccgtcccacataccacgcgagaccaacgcactgtctctgccgctactctactattttaactgttactctctcagatctacctatacaaggttgtcacacttagtatatagagacaccgccattgacgttatcatctcgcgccatcccaccgccgcagcgtggtgctggtcacaggcgatcccctccatcctacgctcgccactctccgcgcaactgatcgcgctcttgcgagcggtacgctcgtgaatctgctctccttcccgctcgtttctgtgtgtctcctctgtctcgtgaccgcgcggtctgtgtggcctagtatcgcgtgagtgaagccgaggtcgnatatcctaccacagcaagccgatatcacggaatgaggtgctcttgggatgcgtacttcatactctcggaatgttagtatctagtttaccatacttaaatcatatctatgatacccaatataacaccttaaacacatagatgataacgacacaacacaacatcacctgcagacctgcgcatatacggaatacttatanagtacacgaatcagtctcctacggctagacccggatcggcacatgatcctcgctgccaacagctgcatgtcgcgacttgtagataatcaatatagtcacctgtcttcagatatcgcacacgaagagcatacgagtgcgctacctatacatagatagacatatagatataaagactaagactcaagatacgtgatagagatcgactcaagccacatacaacatgtcgactactatatctctctgtctatgcactgtacgcatctcgtctatgtgccattcctctccctgacgcgccacgtcgctctacagcatccgcacgtccagcgcagaccctcatcgacccgccgcactcatactctacctcctcttctacacatacgtctcacacgccgactactactctcaatgcggactgtgtcacgtcgctgtcacaccacacatccgcaccctacctcatgctcggcgtactcactatagatatttagtatgactcactgtgttatcgtgattactcgtanctcgcggaattttctctgtacacgatagattaaccgactagcatatgatcatcctctatactagcagaactgttcgtctgtagtctcgcctnatgaaaaactaatt

SEQ ID NO: 2334 - DNA, 796 bp, Glycine max
  misc_feature (1)..(18): n is a, c, g, or t
  misc_feature (689)..(796): n is a, c, g, or t
  Probeset Number=SeqID_12113
nnnnnnnnnnnnnnnnnnccgggccccccctcgagtcagctcgtaggcccccccccccccagtctcctcataaacgacgccgcgagtgaatggtgttgatctttctttcccattgtcgtcgtcgtatataaaaaacgccgccgctaccgcagctgcaaccgccaccacgaccgcaaatagtgtgtgcccttgtggctctgtgcccagaaaaaaagtatttgtgcaaaaatcctaatctaattaattacatttgtacaatctcaagcggattaaattgttaaattcatagaaaagaaaatcaacaggatttgtctcagaaattaggagacgataaatcattgtctgaacatttacaacttccgattcaacgcgtcaacgactaccaattgctcctgaaggaattggtccgatacagtgcatgtcttaatgaagactgtacaaatctcgaaaaagcacttgatttgatgctaagtgttcctagtcgagcacaagacgataaatttacgaatagtattgaaggatatcgtggaagtatacataaactcggtcgactattacacacgattggtttcaattaatattggaacagtacaaaagaacgatattattttattcaaaggacaatatgattgtaagtcgcgaatttccaaatcgagtgattcactaaagattattaatagccagtgagnnnnnnnnnnnnnnnnnnnnnnnnnnnnnnnnnnnnnnnnnnnnnnnnnnnnnnnnnnnnnnnnnnnnnnnnnnnnnnnnnnnnnnnnnnnnnnnnnnnnnnnnnnnn

SEQ ID NO: 2335 - DNA, 1511 bp, Glycine max
  misc_feature (501)..(501): n is a, c, g, or t
  misc_feature (508)..(508): n is a, c, g, or t
  misc_feature (604)..(604): n is a, c, g, or t
  misc_feature (845)..(845): n is a, c, g, or t
  misc_feature (960)..(960): n is a, c, g, or t
  misc_feature (975)..(975): n is a, c, g, or t
  misc_feature (1017)..(1017): n is a, c, g, or t
  misc_feature (1021)..(1021): n is a, c, g, or t
  misc_feature (1046)..(1046): n is a, c, g, or t
  misc_feature (1069)..(1069): n is a, c, g, or t
  misc_feature (1071)..(1071): n is a, c, g, or t
  misc_feature (1145)..(1145): n is a, c, g, or t
  misc_feature (1185)..(1185): n is a, c, g, or t
  misc_feature (1218)..(1218): n is a, c, g, or t
  Peptide Sequence Number=SeqID_6039
  Probeset Number=SeqID_12114
ctacgcgcgctccgtcgattcatgagagtgggaaaatagaatgaaacaaacactcactatctccttatagtcgtcttgcttactgcggtgcgtatgcggactacgtataggacctccgtctcctcactcataaattaacgtgtctgtacttgtttattatctactacctacatcactctagctgtgccgaatgacacaatactcgtatcgaaaaagacatatatatgtgatcgaatagactcgcgtcgcgcggtcgcctccacttcactactgagcgcatactgtcataacatctagtctcaacatgatcgtatcgcgataggcgcgcaggggaagtcgcgagtggagtagagctaattatgactacgctctgtcaattcatagatcagatctgtcatcgcatcagtagagtgtgaatatgtagtcgatgcaacgatgcgtgcgtgcgcgtgcatggcacgctgtgctgatcgatagagaggacgaacgatgcgagagagnacagcgnagttatagaatcataagtgccatcataatacactagcgcgcgccgtctcatgatacgcgctcatctcacagactataccccgctgatacgatgcanctcacacacatacgcacgaacgcactacacatattatagtgtgattccatcatactacaactggagtcttgagcgaatatatttggacgatacatgatgatatgattgatgatgcgagcacagtcacaccagtctcgttgctgcgagcgagcgtgtatattatcttatcgtacctcactactcgtacgtctttgatgagcagcgtgctctagacaagagactaagacagacgatcgaactncatcgcgcgtcgtgtatctgtgtatctatacacacgactaacgcatcacgtcacatcagacatgactgagtactcagatgaccaacttatattctattctagagacagcgcgacnctgaaggaattcaantactagacacacgagtgatagatgcagtagcgacagatgcanaggncgatcgagtacagtctatcacatcnatgtatgaagtgacgcacactcncnactcacgcatatagtctatattgatatgtactgacaagcgtagcatagaccgatctagatatcgactcctctcnagcctctgtccgcagagaatcacgcgcacgcacgaagcgngtacgtatatgtgcacatagacatcgagactcntacatctcgctgagactcgaacggacttaatacgtactatcacatcagccatcgcctctagctatgagcacgtatgacgatcacgtatgcacacactgttctatatctctaagtccgttcatctacgcgcgcgcgtaccgctggtaatattcagcacatacaatcgagacacgatgatctgagtacgtccagataactccttgtcgctgtagcaactgtatacaacactacactactaacgctctcctcctcgtgtgtctcttctctatcgtatcgccactcgtctctcttag

SEQ ID NO: 2336 - DNA, 661 bp, Glycine max
  misc_feature (661)..(661): n is a, c, g, or t
  Probeset Number=SeqID_12115
ggtgcggtgtcctggggggcccacggtgcgggagccgcgtgggggggtactcgacgattgcggtacgggccccccctcgagtcagctacgtaggccccccccccctttttttttaagttacttataggaacagtttaaggcccaaaccatttaactcatccacgtcccaatccgataaaccaccatttaaaatcatactttgtttactaaataatcacttctctctgataaattaactaaggtttcttatagacgcatttaaagtttcctttatccaatgatatttcttttcttttttcttctatccaacgatttttcattcttccgaaatactttgatgcatctggactcttttgtccaaatacatttcactctttgactttgtaccttgcggatatccactacatagtttggttggatcactaactacctattgcctaagagtctaaaactacttctagtcattgatttatttatataataattgaatgtagatatgatgtatgtactggggatagacaatggattaatgctacagcaaaaaaaaaagataatggattaatgaatccaaaatactcttttaacgtattcttttgtgtattcactcttcattatagctataatttattgaaaatcctaaagttctatgaataaatttatn

SEQ ID NO: 2337 - DNA, 246 bp, Glycine max
  misc_feature (205)..(205): n is a, c, g, or t
  Peptide Sequence Number=SeqID_6040
  Probeset Number=SeqID_12116
atcgcagcagcacagaagcaacatcttgcagtcacctgctacacacgagatagaaaaaccatttctcaacagtaccttctctagttctagctacatggcttccaacgcgagcatgttggccgtgttcatggcttgcgcgctcctcctcgccggcagcacgtgccacgcctcccgcaacctggccgacactacgccggcggctgcngctccggctgctagcgccctccctggcctgccggccgtgcc

SEQ ID NO: 2338 - DNA, 327 bp, Glycine max
  misc_feature (243)..(243): n is a, c, g, or t
  misc_feature (282)..(282): n is a, c, g, or t
  misc_feature (316)..(316): n is a, c, g, or t
  misc_feature (319)..(319): n is a, c, g, or t
  Probeset Number=SeqID_12117
ttttttttttttttttttgcggttcttcttgattaaattcttttttggtaaggattcccctcaatttttcactgtgggctctttttttcctctcagtcttttcgggttggttttaaaagaatagatggcaacacacggtattaaaaaaatattaataataaaaagcggaagatagacacaaaataggactgaataataaaacataatctggactcttcaagttgctgtttgatttttcccaantaatttgcttcactcttctgtacaatttttttcacccanaaaaaacaaaacatctcctttatgaagtccaacnatnaaagataa

SEQ ID NO: 2339 - DNA, 1751 bp, Glycine max
  misc_feature (17)..(17): n is a, c, g, or t
  misc_feature (23)..(25): n is a, c, g, or t
  misc_feature (73)..(73): n is a, c, g, or t
  misc_feature (111)..(111): n is a, c, g, or t
  misc_feature (204)..(204): n is a, c, g, or t
  misc_feature (995)..(995): n is a, c, g, or t
  misc_feature (997)..(997): n is a, c, g, or t
  misc_feature (1200)..(1200): n is a, c, g, or t
  misc_feature (1246)..(1246): n is a, c, g, or t
  misc_feature (1470)..(1470): n is a, c, g, or t
  misc_feature (1546)..(1546): n is a, c, g, or t
  misc_feature (1654)..(1654): n is a, c, g, or t
  misc_feature (1751)..(1751): n is a, c, g, or t
  Peptide Sequence Number=SeqID_6041
  Probeset Number=SeqID_12118
gtggcggttgggtgtgngggggnnntgggtggtgatgcgacgggaacatattaactacaaaccacacgcatanccaacgaataaggatggagagaatcacacactacgggntggagaggagccagagatcctgaatgcactaaagtagggagacccccccgaagggggtgtaagcgaagaattcgggcacacgagcaacacttntcaccgcgtatgaaactatactcttactctccacagaaactacgacttacacagtatgatactgtacgatactcattagtgacgaacgtttgtgttcttagtcatatagttattatcatccaatatacttcactcccaccctctgtgagggcctgcactgccgatgttacccccaacgccacgcacctacgagcggcgggcggtcaacatgcgcacgggtacagacgacgccgagcgcccatgtaataagtagtcacgacacgcatgtacagccgtaacggacgcggcgcgtcctcccacaacagtgcacccgcagctcgatgtgtaatatagagcgatctacaacatcagaacatgtagaatttggatgcaggatgagaataactatgagctcaaatagaagactgtagaagacgaataggggccgagcagatggtcgacatatgacacatccctgcccctgtatcgcgtaaataatatcaaagacgacgggaaacgcagaggccgagcgctcaatccacacgtgttgtgatgttgtggcctgctcacctccctgctgcaccgcttattatgatgcaacgattacatcagctatggacgacactatgctaatgatctaactatccgccgctcgcccgctatattacacctctctcgtatcactatatttcgttcgtaccgacataggcgcaccctaccacctcctctccctccgctccccttttctctgccggcatgccgcgctcactgtcctccgctgctgtctcctatgtcctatattcatatgtatntnataatatgatgctaataataataaacacgctataacccaccatctactaatatactcacgtcctctccaattcctgcatcgtaatcacgtgtgaaataatcgattgtgcacgaggcacgtcacccacaccgccgcgacgcgcatatatccgctctatgtctgcctatcccatacacacatcatatgtactcaccacacacccncgctctcctcgctcttgtcgcactcgcatccaccgcacgcatgtcntatgtaaatattgatgttactcaatagatccactatgtacaacctcgcgcatgacacactacatctcaatactctaacacacccgaaatactatgagtacacaacgactcacacatatatgcgtctgtgccgctaatatctactgcgtcatcgggctctcgtacatttatctctcgcctccgcgcgcgccgactgtgctgcgactcgtctctctgtgcgcacgntcgtcttgcgccgaccgtgctgctcgtcctctattgaccgcacggcggtgcagtatgtatatcgtgtggatggcgnttctctccgtagtccagctccccctcattcctcaacagctacgccctcacacgactcattatctctcatctctctaccatatatatatataataaatgtgcgatgagncctgacgacacatcttattttctgtacacactctccactacacatcacgtaatccactcgcgcacctactacaacccagacgcactacgcaccacan

SEQ ID NO: 2340 - DNA, 1688 bp, Glycine max
  misc_feature (1)..(1): n is a, c, g, or t
  misc_feature (52)..(52): n is a, c, g, or t
  misc_feature (196)..(196): n is a, c, g, or t
  misc_feature (347)..(347): n is a, c, g, or t
  misc_feature (469)..(469): n is a, c, g, or t
  misc_feature (483)..(483): n is a, c, g, or t
  misc_feature (579)..(579): n is a, c, g, or t
  misc_feature (814)..(814): n is a, c, g, or t
  misc_feature (924)..(924): n is a, c, g, or t
  misc_feature (943)..(943): n is a, c, g, or t
  misc_feature (1477)..(1477): n is a, c, g, or t
  misc_feature (1624)..(1624): n is a, c, g, or t
  Probeset Number=SeqID_12119
ngctcgccgtctccgtctgtcactctatcgcgtctcttatatatcataatcnacgccgttcgtcactctcatgttatctcttctatgttcggagatacgacacgctgtagcgtatataatattatcgctgcgattgccgccgtcctcacgcagtatatgctacttataagatacatattgcgtgcgtcgtgcgtcntattcactcgcggtcatatcaagcatacgtgctcgctaattatatctctgtccactctccatcgcgtcgtcttgagctctttcttctcagttgttagctctagatattgatcgttcggcgcgtcggtgtgtgcctgttagttatgtatgtntctttatatccttctccgcacgttcttctacttcgcacagatgtctcgccagcagagacgcctactgactctcgacacacggcgcggcgacggcactagcagtatctatactatatatagcncggaggcgcggcanatattaactgagagcgcgtgcgggcgatcagatgtcttattattatacataatttccgctcagcaatgacgccgcgctgcgtggcgccagacgcangccgcagaatatataccatccattctatgaacaatccacatatcgcgtgcgtcgaggcgcgcttactatatttacgccgtgttccatgagcacgtcagcgggcgctatcctgataaataaatgtgcctgcgtacgtgccgtcactacactcgcacgtatcgcgctctctgcataccgtgtcgtccactgtctcccttcgaatatatccgagctttattatacgtcgcgacacatnataaaacaccacgccaataactacgcgctcgttgcgggcgtactgctacgtcctttactcgctcgggtctataaactacgcgccgggcaatgtatgtcgcatcacggctnactccaccttcttattatntattaatatatatacatatatcctgcggggcggctgtatatatggagacaaattccacacacgcatatatatatagtcgataataatgagaccaattgttaggcgcgcgatatacatctattgcgtcagtttcacacgcttgcgtaccacaactctctcacattgttcggtataccataatcatataatgaatcactcgcgctcgcatactatctcaggctattcttcgtcgtacatgatcgcagtgagggtattattcagagttgtacatgtagccatatcatagtccacgcctctctcctccttaataaaaaacaaatcatataaacagaggcggggcgtaacaatgtgggacggcacgtcataataatataacatctggcgtgcacactcgtgcgcgggccagctacgacgtaatattaatattcaagtataggggatattccatgctacgctcgcgcgccgcacgactattgcgcttatcttatcgtatatgggaaaggttatgcgtggtagtcatatattataataatnactgtgtgtcttacttagagaatatatatatgtgttgtgtgggcggtctttctctttatttttgagaaaaacacccactcgtatttgagttgtcacttcctatccgttgtctgtctttattaatatctgttgttcttcgagtggtanctcttacacccctctgtcctctttgagagatacatagaatacactgcagcgactcatagactac

SEQ ID NO: 2341 - DNA, 649 bp, Glycine max
  Peptide Sequence Number=SeqID_6042
  Probeset Number=SeqID_12120
gtaaacatatcatagataaatggaagcgagctaagcatggcggtggttggtggtggtgcctgcccggattgaattggaacagtgaagaaagagagatgttgtttcaggtgggcgggcagggagtcgcccccaccttcttcgagatgggcggcggctcaacaacttccggcgagcctccgcgccgctctgacatactccatcgggcgtctttggcttacggagacccttccttcacaagctcctcgacttcgaagacgaatccttccccttactcacgctcggccgcgaatcccacaccttacgaaccacagatgcccccttttccgaatctctctacggccctccgaggaaaaccagccaatatcgccctcaagaatggcaacgccactaccagcaaccccggcttacggaggcgccagaaaggtcttttccggttctttttttggttggggttgccggatttggaaacccaagctgctttcaatcctccaccagaaaaaggggaaacccgggcttccagcccccctctatggggagatgaaaccccaaccacctttttttcccccggtggtcaagggccaacctccctggatgccggggcgccccccgttaacaccgcgtggggcccgaaatgaaaattcccaaagaa

SEQ ID NO: 2342 - DNA, 1790 bp, Glycine max
  misc_feature (16)..(16): n is a, c, g, or t
  misc_feature (23)..(23): n is a, c, g, or t
  misc_feature (25)..(25): n is a, c, g, or t
  misc_feature (28)..(29): n is a, c, g, or t
  misc_feature (31)..(32): n is a, c, g, or t
  misc_feature (35)..(37): n is a, c, g, or t
  misc_feature (39)..(39): n is a, c, g, or t
  misc_feature (41)..(41): n is a, c, g, or t
  misc_feature (55)..(55): n is a, c, g, or t
  misc_feature (73)..(73): n is a, c, g, or t
  misc_feature (82)..(82): n is a, c, g, or t
  misc_feature (89)..(89): n is a, c, g, or t
  misc_feature (91)..(91): n is a, c, g, or t
  misc_feature (107)..(107): n is a, c, g, or t
  misc_feature (115)..(115): n is a, c, g, or t
  misc_feature (120)..(120): n is a, c, g, or t
  misc_feature (150)..(150): n is a, c, g, or t
  misc_feature (185)..(185): n is a, c, g, or t
  misc_feature (235)..(235): n is a, c, g, or t
  misc_feature (241)..(241): n is a, c, g, or t
  misc_feature (246)..(246): n is a, c, g, or t
  misc_feature (267)..(269): n is a, c, g, or t
  misc_feature (306)..(306): n is a, c, g, or t
  misc_feature (348)..(348): n is a, c, g, or t
  misc_feature (357)..(357): n is a, c, g, or t
  misc_feature (479)..(479): n is a, c, g, or t
  misc_feature (493)..(493): n is a, c, g, or t
  misc_feature (510)..(510): n is a, c, g, or t
  misc_feature (539)..(539): n is a, c, g, or t
  misc_feature (544)..(544): n is a, c, g, or t
  misc_feature (551)..(551): n is a, c, g, or t
  misc_feature (691)..(691): n is a, c, g, or t
  misc_feature (737)..(737): n is a, c, g, or t
  misc_feature (781)..(781): n is a, c, g, or t
  misc_feature (873)..(873): n is a, c, g, or t
  misc_feature (948)..(948): n is a, c, g, or t
  misc_feature (954)..(954): n is a, c, g, or t
  misc_feature (989)..(989): n is a, c, g, or t
  misc_feature (1002)..(1002): n is a, c, g, or t
  misc_feature (1069)..(1069): n is a, c, g, or t
  misc_feature (1113)..(1113): n is a, c, g, or t
  misc_feature (1125)..(1125): n is a, c, g, or t
  misc_feature (1140)..(1140): n is a, c, g, or t
  misc_feature (1261)..(1261): n is a, c, g, or t
  misc_feature (1265)..(1265): n is a, c, g, or t
  misc_feature (1304)..(1304): n is a, c, g, or t
  misc_feature (1343)..(1343): n is a, c, g, or t
  misc_feature (1356)..(1356): n is a, c, g, or t
  misc_feature (1377)..(1377): n is a, c, g, or t
  misc_feature (1430)..(1430): n is a, c, g, or t
  misc_feature (1432)..(1432): n is a, c, g, or t
  misc_feature (1477)..(1477): n is a, c, g, or t
  misc_feature (1503)..(1503): n is a, c, g, or t
  misc_feature (1641)..(1642): n is a, c, g, or t
  misc_feature (1644)..(1644): n is a, c, g, or t
  misc_feature (1662)..(1662): n is a, c, g, or t
  misc_feature (1678)..(1678): n is a, c, g, or t
  misc_feature (1752)..(1752): n is a, c, g, or t
  misc_feature (1761)..(1762): n is a, c, g, or t
  Peptide Sequence Number=SeqID_6043
  Probeset Number=SeqID_12121
tgatgtttgtatcccntctgtcngncgnnanngannntngnggagtgcagagtgnggagcgagcgcagcgaangcagagggnacgcacnancaatacaccgacaaanacgaacgnaacantacgaatactagattactactgtgagcagnagatgaagataagatgaatatatactactagacantataaaacgagacgtgcccagagagaacacagtagagtaagagagggganagaaanataangaagagaaagaataatacctnnnctgctgcgctcaccaacgtctccctcgtagataatangtacgaatactacatagactcatctcgacattcatcactatntgttaacanatagcaacgctgtgtacgagagcggaggtggaggtatgcgtggctgcggcatgatatactgactactatcaactaatattaccataatatacatacaatcagatagaatatatatacatcanatatatattacttnattatatatattacatntctcgcctcgcagagcgcacctccaaccnacccntaccccnattcgatatattacgaacgacatgtatcacatctataatatctactacatcaacgcctacagagacgacgaccgaccgtgtagacgcggtctgcgacactatatgacggtgctgtatgtaccgacgagtattgactatantatatatcagtcacgatctcgccatcgactctcctctcgcctctcnctctgcgatctacgtgtgattccttctcgtcgtatatacataantgaataaagtgagtatagtatgcacatgactaggagcgtagacgatatactgccagcacatacgcatctcgctgagatctactgcctacatntcacatgcacatgagacaggcatattactgtcatcacagatgtatgaatcaaccgacagctgacgccgtcgattntctcanctcgaatgtatcctcttctgtaattgtgataatantactatattgcanagcgtgcgacgtacataagatgatagagtagagatgatgttatactgaatataatgatagatatctnatcaacttatcactaactacaagcagacgcaccacaccaacccncaccggcgatangttcacgcgatcgcntgctttacataacaaagatcatacgacactgagagcatatgatcaggagagatcagctatacgaatagtatacatgagaccgctacacacactatatacacatacatacactcatacttcnactnacatcacgcctgtctgcgactctactcaccatcacgtantacctcgccgtactgtagtcgcgcactctacagcgcgtngtatagatgacgngagtatatatacactgcgcgntcagtcactgagtccacacacgatcgatcgtctcaatcgagcatcacaactantngctcacatgactacgttatataacgtactatcgtcgatgttacangctgacacgaccgactcattacagtncatattatatcttacacacgagaagcatgcacgacaactgaatatatacagctcgtccactcgtgcgcagacatatgcatcgagtgctggtggctgcctgtctctgcgtcgtgctgcgattctgccgcctcatctctnntnatcgttctcatatcatanattatctatacatgcncactactgtctatcgtcttcactatctcactcttgataatctatagcgcttcaccagagctgtgtcttatcggnattaacgtnnatctggtgatgatactgcacatgactcg

SEQ ID NO: 2343 - DNA, 639 bp, Glycine max
  misc_feature (639)..(639): n is a, c, g, or t
  Probeset Number=SeqID_12122
tcagctacgtaggccccccccccatcttatttcaaaaaaaagtttttctttttcgaaattacttccttcactacttaatgaattccaatctttttcaacaacaaaatactatgaaaagatcacaaaaatctcaaaactattacatcccaaaacttaccaaaacctccaatatgccaaaacttgaaattatcagcaactccttcgacccaaaccacaaaaaacaagcacatgatgaaaacaatgataaagaaaataaaaacactgccaatcttcctacccgcaaagcgaataatattaaaaaactcaactatatcaactcaatcttcaaaggtatcgatgtcccaaacaccacaaaaaacaaatattctacaaagactcccaccaatcttcgtggttcacaaatcacagaaaaacctagcttcaaaagccccacaaatatgcaaacaatcaatttcaaacaacgaaaagcctctcatggaggagaaccaatgacatttgaggccaggttcagtccaataatcagagaagttaatttgaaaatccagaataatgtgaatcgttatgaaaattatgagaatatgaatagtatgaatactacaccaaaagagttaagacaaaaaatcgaagaaaacgcacaan

SEQ ID NO: 2344 - DNA, 682 bp, Glycine max
  misc_feature (604)..(682): n is a, c, g, or t
  Peptide Sequence Number=SeqID_6044
  Probeset Number=SeqID_12123
tcgagcagctacgtaggccccccccctcaatgcaaaacaattttatcaaaatcaagaaatgtgttggtttcccgaaatgcgactcaaatacccaatatcatgttagactcaccggatttaacgccggccgccaaggattcgatcaatcattttcataattttaaatatgattatccacaagaagtgcttaatacacatccatccataatggtatgctccgtattaaaagaacaatgcaatgctgactcatctctgccaaagcgcttggtcactgttctattggctgctctacgctcaaatggatcgtttggtgtgcatgtgtgcatcaatacaaccgatcgttttatgcatcaattctattcgaagctcggattcaccgaaattttcgaagacaccacaaaagtgtatttaggtcgaaatttctgaaacacaaatttacgttaaacacttttgatttcatcgaattttcatacgtgacaaccgatcgattagcgaaacaaatttcttttttgtttcacggaaatgggaaaaaaagtggtttgaagttagatatttgttacttactttgaatccaaacataaaaatattaagagatgattattannnnnnnnnnnnnnnnnnnnnnnnnnnnnnnnnnnnnnnnnnnnnnnnnnnnnnnnnnnnnnnnnnnnnnnnnnnnnnn

SEQ ID NO: 2345 - DNA, 722 bp, Glycine max
  Peptide Sequence Number=SeqID_6045
  Probeset Number=SeqID_12124
cgttcaatccctcttctgactcctcctccggtgcccgccgactgcgaacccgatctcgattcgaccccccaagccgatcatggcggtcgccttcgcctcctcgcggcgcgccctgcacaccctccaccgccgcctcctcctccacccctcccccacacacgccgccgcgcgccgcgagctacccacttctgctcgtactcccatccccgcccactcccccaccttcatctcctcctcctcctccccgcttcttcaacacccgcgagaaccgaaggccaagaaggctggcgccacggggttgccaaaccgcagccgccccgttggaacgggtattcagggcccactggccgacgccaccccactcaccacatttgtgcttccccctttgtcccccccccgctcctcccatgtacccactctcacattccgctcactgcgccgcctgttcgttccaatcccccctctcccctcactaaacccacgtgcacaccaaactaaaccgacaccaccaccccgaataccacccctacgcacaacatacttatttctccacctcctagatcgtaacctctcccatcttgctctctccttctttctgccgtatcgccctctaccctttctccctgctaaccctactcatacccatgcaacaccaaccaactcaaataaaacagccaaacacactatcatcccaattacaaactcataatgatcccatacag

SEQ ID NO: 2346 - DNA, 541 bp, Glycine max
  Probeset Number=SeqID_12125
gcaggaattctttttttttttttttttctttttttttttttttttttttttttttttttttttttttaaataaaaaaaaacctaatttttccttggccccaatttttaacccctaaaacaaacatccccttaaaaaaaatttttgggaaggagagaaaaaaattcaccccccccccccacttttttgggaaaaaggggaatatgccccctttgaacaaaaaaaaagatggggaactaaatagcaggccctcttataaaaaaaaatggcatctttgccccttggacgggacttttttttttttgtttatgaaaaccccgggttttgaggcccaaaaatctggggggacttgcccaaccgacaaaaacaggtagtataaagggagggttccactttattaaacaacttttggcaattttcaaaaaacccaagggagaaaaatttctctgtcttgaagagttaaagttgggaaaacaactttgggaaactccacccgcccccaggaaattagggccaggttaatcaaaccttcactcttatcca

SEQ ID NO: 2347 - DNA, 1779 bp, Glycine max
  misc_feature (72)..(72): n is a, c, g, or t
  misc_feature (145)..(145): n is a, c, g, or t
  misc_feature (244)..(244): n is a, c, g, or t
  misc_feature (247)..(247): n is a, c, g, or t
  misc_feature (292)..(292): n is a, c, g, or t
  misc_feature (330)..(330): n is a, c, g, or t
  misc_feature (528)..(528): n is a, c, g, or t
  misc_feature (956)..(956): n is a, c, g, or t
  misc_feature (1088)..(1088): n is a, c, g, or t
  misc_feature (1138)..(1138): n is a, c, g, or t
  misc_feature (1699)..(1699): n is a, c, g, or t
  misc_feature (1712)..(1712): n is a, c, g, or t
  Peptide Sequence Number=SeqID_6046
  Probeset Number=SeqID_12126
ctcgatcgcgtctagtcgggtagttgagctgtatgtgacgactctggtatacctacaatacacgagcgcagntagaggacaacgactctatattcgtttatctatcgtgtcagaggagatgcacatatgatgttgtgtagttctntatatatcacgcacgatcctcctccagctgtgtggtgtcatgttccatatgtctctatagtctgataagtgacgactaccacatctatagtagtccacntcnttatacattagcgccacgttatctcatcttgcgtgcgagaagtcntttgtgtagttattcagtatattgcccatatgtatatnattccctatctctttgagtatgctctacgaagcactgtttagctgcgcatactcactatatagcgtacaagattcgcggaagatcgcatctgtagctatacgatatgtgccctctaggtagcgatcttggtcatgcttacattgttcatcgcagctattagtatgagacgcatgatcgatcatatatatgacgccgtncgtgtgcagtccaactttctcctattatgtaacagggtttcgtggttgttcactatatagtcagacgtttaatgtctagtgtgtatgtagaggctgcgacatcgctctagccacggagctatgttacttaggttgactcttcgtacgcctcgaaacgcttttgttgcgtggtagagggtatgtagacagtagactgtagcgatttgacatacacctgcttactgccgcctccggcaagcaccatatgataagcatccgcagagctctatacatcgcgagtgatcacgctctcgaactcacaggtgctcatccgtggaatctgcctctatgtttatcatatatctagatagtagtgagcgtgatcagctctcgagcaggatcatttcatagcttcatagcgtacgtctactattgtaatttacgtatangccggagcaatacgaagatacattatatcctctactacgatcgagatgcagcggcagatactagcactataaacaaacatcagtatcgcttcaaaatcacttgacgtctatgttccgggccgatgacttgtnctgatggtgtctgctatttccaactctatacatgcgatatatggctatgnctgcgacgcgtattactagattatatctggttttgcgtctgctatatctgtgtcgatgagaatagtgtgcgtatacagtttgtgctgcgatttactctagtgtagtcagttgtataagttggcggctgcgtctccgtatctcttatattcactatcttggttacattagcgtccttgtcggagatgactctaccgtattcagataggatatcgcagttcttcggttacttatagttatcctatgtcatacttacacctctttgtcgcgatatacacgaggcatagagctcataatctctcatatcacgcggacctagaggagcagtgcgatagtgtctgcggctcagaaagcacttcactgcgttcggcacatgctttgatatctagcacgatagcacatatcagaactatataaggaggcgattctgcgaagcgaggggaacatacactacttttcggcagatgtgtgtcgcctctttattagcgacgatatattgttatcttatatgtgacctggtggcgagttagagtcacagagcgcgctccattaacagaagaggngggtgagtgttantggatgagggtgtgagagagaagaggataagtgagagtgagagaggtggagtaggagataaaagagg

SEQ ID NO: 2348 - DNA, 450 bp, Glycine max
  Probeset Number=SeqID_12127
caagctcacagtgtggaatgtgccactactcacggtggtgtttgcatgttcactgcttggtcaagcttcagcttctgcgtcctatgaccataaggctaggatcatcaatggacaaagaatgatacttctttctggctccattcactaccccagaagcacccctgagatgtggccagatcttattcagaaggcaaaggaaggaggtctggatgtcatccaaacttatgttttctggaatggacatcaaccttcacctggcaaatattattatcgaggaatctatgatctcgagaggggcatattgctagttcagcaagcacgcctttctcttaacctcagaattggcacttatgtttgtgctgaatgcaacttcggaggattccctgtttgactcaagtacatcccaggtattttcttcagaacagacttatgaccatttaagtttcaaat

SEQ ID NO: 2349 - DNA, 497 bp, Glycine max
  Peptide Sequence Number=SeqID_6047
  Probeset Number=SeqID_12128
ccattcccctcccttcctcgcaccgccatcgacctccccgcccccgctaggcagaaccagcaccgccatggccttcgccgttctcgcgctcaccgagctcctgggcaccagagaatttgtccccgcgattcatcatcgtccactacttcgactacgtccaaggatcgagctggaacgcgccaagtgaagcggatcgaggccttcttccacctccagcaccctctactgctcccgtccctcgccgagcctttcttgtgctccccgatgctggagcccaggagccagatgatcccgaggatgattctacatggagttcggcttcgaggagtagttaggaggtcccaggcaggaggcctgaccttttcgatcgttgctacttttatgctagccttcttaaggcaaacttgtttaaacttatgattgttctcagatattgttgcttccgctgactcgtctatgatcgagcacttgtattcgagccctcgaggcccctggcg

SEQ ID NO: 2350 - DNA, 1632 bp, Glycine max
  misc_feature (1)..(20): n is a, c, g, or t
  misc_feature (25)..(25): n is a, c, g, or t
  misc_feature (31)..(37): n is a, c, g, or t
  misc_feature (39)..(39): n is a, c, g, or t
  misc_feature (49)..(50): n is a, c, g, or t
  misc_feature (62)..(64): n is a, c, g, or t
  misc_feature (68)..(68): n is a, c, g, or t
  misc_feature (74)..(74): n is a, c, g, or t
  misc_feature (87)..(88): n is a, c, g, or t
  misc_feature (332)..(332): n is a, c, g, or t
  misc_feature (342)..(342): n is a, c, g, or t
  misc_feature (1431)..(1431): n is a, c, g, or t
  misc_feature (1469)..(1469): n is a, c, g, or t
  Probeset Number=SeqID_12129
nnnnnnnnnnnnnnnnnnnnaaaanccgggnnnnnnngngccccgaagnnggacgaccgcgnnngcgntacccnccaccacatggannatagatatactgcctctccatccctcctataaatgaaccatgaagtctctcctacatcacactgtcgctccgatcgatcctctctcatacaaatctcctcccgctcgtctctcccaagtagatcgcatagcgccggagtaactcagaatacgctcactcatcgctcgtctcactacctatactcgtaccatcattctcatatgccgcagtgtttacctttactcatatcgcctctccacgcgtnactcctcgcnactcagtctcgccctaacacatactctgcgcacacatgaagctgtcttctactcgctttagtcacacacgtccatggtgcacacccagcacgctctctcttcttacatctgtatatcgcttgctccgcccctcctacgccacctcgtcccccctcgccgccatacatatcgcgcactcgtgtattttaccaccaatcaacatacaaaattaacgcgcactcctatccataccatagtaaacatcggcccgcccccataccttcttccttcgtccatactcattcaccgaggagtcgcctcgcaactcatcccacactctatcctcagcattctcacttcgcatggcctcccactcgccacaaccacaccaccctctgcacacacagtactcctctcggcctacctacccccatcaagtggtcgataccttcgcatcgtctctcaccaactcctcctcaccccgccttcttcccttccgacctaccctcaaaacatcagcctctcctattaccacacccatcctacgaatcgacaaatattcattaaacggcaccaggtcaattcacctactccgcatcctcgctacccaccctactctgccacaccacaccatacttacgtcggtactcaccctatggctactctccacacagaatacaagagacagatcgactctcaccatctcccttctatttcctccgctacaacacgcgtcgtactcattcttctggacctatatctatctcatcctcacccctcctctccgctcttctacaaacaaccttggcttagtctactaggctcctctccaaacataattcatctcctccactcatccctcccgtacatcatctgtactcactcaacacacacacactccctcgaactaacaacaccggcccctcatcacaccacacctctattgccaacacgactctatatcaacaggctactcctgtaaagagaacacacacacacacatcacatccgatgagctacatataacatcgaacagactaaacacttaatatacttcccccacaaccacagagatctcacctcgcacacaactaaacgaacgcactcctnacaataggataatccaaggtcaataatcggaagagagnatacatgagatagacacacccctcgccctcactcattctctcggtctgtgctctctatcacgcacacacgcacacacacaagtttacacccacactattctatcatcttctactactaccacattctccacatcacgaccagccattcgccaatataccacct

SEQ ID NO: 2351 - DNA, 1565 bp, Glycine max
  misc_feature (103)..(103): n is a, c, g, or t
  misc_feature (114)..(114): n is a, c, g, or t
  misc_feature (135)..(135): n is a, c, g, or t
  misc_feature (231)..(231): n is a, c, g, or t
  misc_feature (253)..(253): n is a, c, g, or t
  misc_feature (255)..(255): n is a, c, g, or t
  misc_feature (276)..(276): n is a, c, g, or t
  misc_feature (317)..(317): n is a, c, g, or t
  misc_feature (336)..(336): n is a, c, g, or t
  misc_feature (354)..(354): n is a, c, g, or t
  misc_feature (409)..(409): n is a, c, g, or t
  misc_feature (423)..(423): n is a, c, g, or t
  misc_feature (484)..(484): n is a, c, g, or t
  misc_feature (515)..(515): n is a, c, g, or t
  misc_feature (728)..(728): n is a, c, g, or t
  misc_feature (737)..(737): n is a, c, g, or t
  misc_feature (918)..(918): n is a, c, g, or t
  misc_feature (1312)..(1312): n is a, c, g, or t
  misc_feature (1452)..(1452): n is a, c, g, or t
  misc_feature (1543)..(1544): n is a, c, g, or t
  Peptide Sequence Number=SeqID_6048
  Probeset Number=SeqID_12130
cgcggcgcggacgatgtgtggatagcgagctgagtgatatagccgactacgcgtgtcagtcagccttagtacgaagagtcggacactgctagtttcgtgctcnggtcgcgcagnttcgttcagagagtgttctancatatatcgtcttttagtctatgtgtgctatgtcagtgtcgtcacttatccacatacagtatcagctgatgtaataggatctagcgcgcatcgcgnatattatatatattactatctntntgtagtagtgtatgtactagntctctatcgtctatatatctcatcattgatgttacgtatgnttgtgcatcaagttgtcantattatgaggtcatgcgncactggagtagtgtgctccgctagtgtctagctgctcattatacagatgagagantcgatgtgtgatantagattagatctcattcagcgagatatatatagtagtggagttggctatgtgagtgcactncccgtagtcctgctggtagatgatatcgcgnctatgtgtcgtggtggtggagagagcgcgagcactagcatcatcacatcatctatacactcgtcgcgaacgttcattctgatagagtggggtgcgttggtatggataggaggagtgaagtggtcgtatctatacaacataatactcaacacaacaatacggggcgtgatgtagtacagtgcatctggtgtactcttcagtgctccgatctctnctttcttcntcacagatctcggcagtcgacgatcgtgctgtgtgatttgagtgttacgggcgtcgatagatcgcacatcctgcaacacactccgccggtatcgtccctcgctactctccgatcgtcatgcgtctgtgtatccattacgtgtgtaagataatggcgtttattattatatagaactcccatnaatatatatataggatatacatgcgggatggtcataactaactacagctaacgctgtactcctctctcccatccataataggaagaggaaaaagcgaaggtgaataaggaggattttgcgggagaagtaaatctcttatctcacgtctatatctccagtgctagcgcggtctcctctctctcgattaggccatccgtcgtccatgcgagcacgccatctatacgtcgtagtattttagctatacctcctcatccacatccctcgtgccttcgcttcagttatccatgacctgcggaaagcggcgagcggcccgctgcgggagaagaaaacagaatatatatgtgagattacaaaattttagagtgagtgtacaacagcgaaagaaaaggagagncgcgtactcccccccctgcagaacaacacagacaagaaggagagaaacacatttatacgtatcacacgctctgactctttcgtggggagaggtacgtacggttttatctcattttgtcacaaaagtatacataaatgggngtcccccccatccttaattgtcttattcaacgtacacccttggtgtcgtcttcctgggcgcggttcgtcacagtgtagtatgtaagtgttnnttatacatttactctctccct

SEQ ID NO: 2352 - DNA, 1204 bp, Glycine max
  misc_feature (1204)..(1204): n is a, c, g, or t
  Probeset Number=SeqID_12131
ttatttttttagtacagaaataatgctaagctaagctctatcaagaagcaattcataaattgaaatgatctccaacaaattgtgaattgtttatgcttgataagagggaggaataagagatttaaaagttcctctaggtgttgtgtagcaaaagaagcaattagagaagtgaatggaacatgaaattagattagggtaaaagatcgagaattgaacaaaaaatatttcatttaaggtattattgtctgttacatgtaattaaatggactttctctctaaataaactttatattagttcttctcaataatttatgtcttttgttaaaattaaaatgcctcttctcacttctcagtgatctttattattaattttccctatgctataatgagatttctgttcataaaattttatttgttacaatgattgatatatgtcagtgcattagttctcataatctcatcaattgcatgacaaggaaagcattgataaatatatggctaactgccgtgaaggataacacaaaggaatagtaatacactcacaagtgcatgcagctaaaagatacgcaagcttttactcttgagtaaagagctagatatccaagtttataatctgattgattgatctgtttattttattcttgctaacatgtatagactttttctccatcctttcattctctaataatattatctgatatgtggttcagactcagtttttgactcactaagtaagtagccaaacaatttctcgggttcctgttcaagttgattcctttgataaggtgactttttctagttctttttgtcaattgaactttcagcttggtaaattaggtgattgctatctggttaaaacattattttatttcacaatttttctttcttttctctttgcaatttagttaccaacttcactcgataaaaacccattaacaaaccaaacagagtgacaaagtttgcaattacaaaaggttcaattatcaaatctggtcagtggtgatacggaacaccaggaagagtctgccatggctgacgccagtcctagaactgatatttctacagatgttgacacggatgataagaatccacggtttgatagaagtcagtcccttgttgctgtggcttctgactccagtgacagatcaaaggataaatcagatcagaagagtctccggaggcttgctcagaatcgcgaggctgn

SEQ ID NO: 2353 - DNA, 1369 bp, Glycine max
  misc_feature (1172)..(1172): n is a, c, g, or t
  misc_feature (1344)..(1344): n is a, c, g, or t
  Peptide Sequence Number=SeqID_6049
  Probeset Number=SeqID_12132
caaatgtgtttatattgtagatatgagtgtagataagaatatcagagacacattatcatgtcatatgatcagtacggcgtcagattagctatggaagagcctggtagagaacaagattactatacgccgctgagagcgcgcgtatgaggatgacctcttatccgaacgcagagagcgttccctctatattatagtaatgagcgaaatattctctatataaggagtgtgtgctctctcttatcacgtgagtgtgtgatgggtgtcctaagtgaggagaaagtggtgcaaggacgtggggtggataactcgttgtgagctccccgcagttgtatgagagaacgcagtaaatcgcctctgagtagagaagtaagagagaatagtcttagtatttgcgagttagttcattgatattgatactcacccgtgaagtggacagtgagaaaagaggcgtatgccgtatttctgcgggcggagatatatataccgataaatgtcttatagcgcagtaatgttgtgctgctatcctgtgtgtggatgcggaccaatgcccagtgcgtaagtcgtgtgtgtggtattcgttacaaagccatagtattaatatacggatgttaagaggttatcgattgcaggcgcatggattgaactggacgaggaaaaagttgcgcaccgtttccattacgagagaggtaaggaggcgctgtattgccgtggattcattcgaaccgtagccatttggatgagtacaggaagatcttgtttctataagtagtggatttgggtcattataaagaataaatattatgtaatcagcccgagcggaggaagaacagaaagggtgtgcgctgacacaatactgttagataatgcgtgctctatcatgtttggtagcagggtgcctgtgacgtaggaaatatccgagcatctagaactcttgcagctggttgcgagttgccagtccaaggtacaagaagaaggttgctaaagtgtatgtatgttgtagagcctaacgtccaatatgctgtgactgcggatacagatatgtgtgtgcctctaggtccgatacgatgaggtataaatcgccagcataactttgcatagcgggtcaaggcgtgtcgagcttgtatttctcgaaccgatgttggctcgatgaaggcgaaggcgtatgtaagatntatatagtaataaaacacagaaagagaagaagaagaaggagtctgtgattcggatcgtcgcgtggcgagcactgcgaggggggggggggcggcgcggtcacccaccacgtctgagtggtgggtgtcgaggaggtgtggagggtgtatgagtagcggtgggcgtgagtagggnaggtggaggggggtgagctgggcga

SEQ ID NO: 2354 - DNA, 1418 bp, Glycine max
  misc_feature (1)..(1): n is a, c, g, or t
  misc_feature (97)..(97): n is a, c, g, or t
  misc_feature (188)..(188): n is a, c, g, or t
  misc_feature (435)..(435): n is a, c, g, or t
  misc_feature (550)..(550): n is a, c, g, or t
  misc_feature (867)..(867): n is a, c, g, or t
  misc_feature (1119)..(1119): n is a, c, g, or t
  misc_feature (1125)..(1125): n is a, c, g, or t
  misc_feature (1128)..(1128): n is a, c, g, or t
  misc_feature (1131)..(1131): n is a, c, g, or t
  misc_feature (1217)..(1217): n is a, c, g, or t
  misc_feature (1360)..(1360): n is a, c, g, or t
  misc_feature (1388)..(1394): n is a, c, g, or t
  misc_feature (1397)..(1399): n is a, c, g, or t
  misc_feature (1405)..(1405): n is a, c, g, or t
  Probeset Number=SeqID_12133
ntgtgagagggtgaggcgatgatgtatggcagatgtgggaatgatcgacgtggagagagctgagtgtaggtgacagtattgtacagagatatatagngataaattacagaggatgtgaacgactagagatatggtacagagttaggtaaagagacttgtttatgatgtgtattcatcgcgcgtcttcntgagcgagattgtatcgcgagactcgagacatatacaggtggatggtggagagctgagtaagacatccacaacagttgtttattctgattcagagtcgagtcgcgcgcgcgggtgcttgagggtcgagcagtgcggagtgataactcggagctcaggactgcggatgattgtatagcatatcagaagcaagcaagtagatgcacataagcgacgcacgcacgtcggcggtcgtgataagagataagnaagtaataccgactcttaatatccgagggcgcagatagagatggtttctgtctatgtatatatgttagagaacccgactaccacgcgagtagggagacggagagtacgacacatnaagcgtggctatcacgttcgagatcaggagcatggcagattagtagtgagttgtgtgcgtggacatcgccgagccccctctactcacacactccatacgtaatacatggcagaagcacaccacgcgtctatcaagatgagtggatggccacgagcgtggtggcggcaagtagtgtagcacgagacagagcggtgatgttgtgttcgggcagctcgcagaacgtgatgtggatcgtcatactattctagtcgcaatcaagaaaacgcaaccgtcattgtgcatatgacgccccagcagcactgtcgtcccccaccaantacatctacacctatatggcagacattctaaaactcttaatctcaatattcctatgcattacgcgtgatgaagatgcaggcgtgggcgggtgttgggagacgtggatcgcggcgtgggggaggtaaggaggggggcggacaagcgagtcgctgggtttgatgggttgatgagcgggtggggtcgtgggtgaatattaggggcgtgttagcggagttgtgttgggtgggtgggtgctggggtggttgtctgtngccttnttntcntcttgattttttttttctatctttgttttattaatatgtatcttattgcaccaccgactcaacactcttatatattttttagttanttgggtcggcgggcccgcgcggcgcgaggagcggaaggagggaggcgcaggacctgaacgaggaagaggagcaacaggcgcgcgcaagagggaagagacaaacggagcaaccgaggaggcaccagcagcaagaaaacgacacnaaaacagaaaaagagagcaaggcagagnnnnnnnagnnnggaacncccccaaccccaa

SEQ ID NO: 2355 - DNA, 507 bp, Glycine max
  misc_feature (8)..(8): n is a, c, g, or t
  Peptide Sequence Number=SeqID_6050
  Probeset Number=SeqID_12134
cgtcgcangcacgcgtacgtaagctcggaattcggctcgaggctgcaacaaaggatgagctgcaagccagggttgctcagttaaagaaggagctgtcacagacagactcagtatatgatactgagaaactggctgagaggatagctaaactgtctggtggagttgcagtcatcaaggttggtgctgccacagagaccgagcttgaggatcgtaagctccgaattgaggatgccaacaatgcaacttttgctgccattgaggaaggttattgtacctggtggcggtactgctctggttcatctctccactcatattccagcactcaataacaaccttaataatgcagataacatactataatcctacattatacaaaatacactaatagcttctacagcattgattactcagaatgcttaaatataaagtgaactgtttatatataaagtaaatagtattgaatggaatttcatttgcaatgctatagtgtgacgatataacaatgta

SEQ ID NO: 2356 - DNA, 1408 bp, Glycine max
  misc_feature (39)..(39): n is a, c, g, or t
  misc_feature (61)..(61): n is a, c, g, or t
  misc_feature (654)..(654): n is a, c, g, or t
  misc_feature (706)..(706): n is a, c, g, or t
  misc_feature (805)..(805): n is a, c, g, or t
  misc_feature (865)..(865): n is a, c, g, or t
  misc_feature (912)..(912): n is a, c, g, or t
  misc_feature (1003)..(1003): n is a, c, g, or t
  misc_feature (1008)..(1008): n is a, c, g, or t
  misc_feature (1257)..(1257): n is a, c, g, or t
  misc_feature (1265)..(1265): n is a, c, g, or t
  misc_feature (1347)..(1347): n is a, c, g, or t
  misc_feature (1383)..(1383): n is a, c, g, or t
  misc_feature (1406)..(1406): n is a, c, g, or t
  Peptide Sequence Number=SeqID_6051
  Probeset Number=SeqID_12135
ttcgaccgccgcccgctttgtggttttttatcgctacangcaggcgcaccgcacactgttnacggtagacaaatgtagatggagagagatatcttaactgacgagaggttggagaacaagagccgaatacaccaccacccccttccacgtgaaaggaaggctcagcatctcgtacgcgaacaacactctcgcgaaccaattaatagatcgtactctgtggccttctgtgcctctagctggttattattgttgctactattgactccatctctctcctcactcacaataaagatacacatacactacgagcaatgtacgcgggcgagtggtgagtggcggatgcgagcgacaccacagcgctgacgagccgcttacacacgtgcatatagcgccgaccttatgtcttgtactcattagtatacacgattgtgagacgatggtaatagcgtactatgtgtcaaattcactgtatccctctaactctctcccatcctaaatcacgagtggacattattatatttcgagccgaactacgttataatcacatttttttgttttcatctcgcgtgaacgcacgagcactaatagaatgcattgtaatgtacataagatgaggatgaccgcgagtcgagcgcgctatacgcaaatgacgancgacatgctcagactcactcttcgacggtacccgctctcgcttaacttctgnacatcactatagctaacgtaagagcgaacgagtccgctgagcacattgtaagaatctacgcgactcatctcgcatagcggttccccaccgctcataggngattaactgttagtctgtgaatatggggtctcactacgaaactaactcgcgcacaccacncaacagatgtctcttacgatagagacggagataccgttgatgactancgagccactgtactcgcatgaatctttatatccgatctgactaccacgctgtgacacgtgctcatccgtcgtcacagcgctacgcgtatcnatgtnctgccaccacatttggatactatatatactgcagtacacgctgcagagatacagatacggagagatagacgtacacgacatagtagcgcgcatcgctagcacatgattatgcctggacactctactaactactcacgtgacaactatagaatatctattgcccgccacgtctccagtccgctacaatcgcagcgcacacagatctactggtgatctgtatgtgcaatgatcctactatcctctactgcnctatttcnatcaaccgtcgcagtatcactacccgtgagcgatcgcactccgcgtagtctgcgctccatcttgattatgaacatgctcctnactagatggagagtcaactcgcagtacgatcgtcangatgcgagagcgacgtctatcgnag

SEQ ID NO: 2357 - DNA, 1451 bp, Glycine max
  misc_feature (35)..(35): n is a, c, g, or t
  misc_feature (47)..(47): n is a, c, g, or t
  misc_feature (62)..(62): n is a, c, g, or t
  misc_feature (102)..(102): n is a, c, g, or t
  misc_feature (114)..(114): n is a, c, g, or t
  misc_feature (167)..(167): n is a, c, g, or t
  misc_feature (185)..(185): n is a, c, g, or t
  misc_feature (334)..(334): n is a, c, g, or t
  misc_feature (342)..(342): n is a, c, g, or t
  misc_feature (446)..(446): n is a, c, g, or t
  misc_feature (468)..(468): n is a, c, g, or t
  misc_feature (1111)..(1111): n is a, c, g, or t
  misc_feature (1236)..(1236): n is a, c, g, or t
  misc_feature (1395)..(1395): n is a, c, g, or t
  misc_feature (1421)..(1421): n is a, c, g, or t
  misc_feature (1426)..(1426): n is a, c, g, or t
  misc_feature (1430)..(1431): n is a, c, g, or t
  misc_feature (1433)..(1433): n is a, c, g, or t
  misc_feature (1435)..(1435): n is a, c, g, or t
  Probeset Number=SeqID_12136
cttgtgagtctcgctacgaatcatgtgctgtagcnaaccagagatancacgcacaagcgtcnctctcactcatacataacgaacatccacgcgcagtcaggncgacacgggaangatagcacacagaatagacacgcacacaccgagtggccgcgcgtacgccgacngtcatcgcgtacagagcncgaggtcttctcgacagtagcctcattatatatgaatatacgagccggcgagtatgcacagagtactaaacgtgaggatagatatatcacatcgtgagcgatgcagatacaacatcacacatcttgttagtttcaatgtgtgtcgagcnaacatagntgacacatcaccacacgtcagtacgtctgctgcgctagcagtcccatcatctacgtatgtaggagtcagcgtcatatctctcgcccccgtcgcggttgtacgangcccgccacacatcgcacgatncaacgtgagtgatcacatacgaccatatcacgacgaggatagctgtctaaatctataaattaacacaatataatatatagaatatcaccacaacctctcgccagctgcggtgtgggtggagtggtggtgggagaggagttgcatcccacgagatatggcgtcatctccacatactacttaggacgcgagaagtgaagatatagaaccgcaggctagatgatggaatatgggtggggtggtgttcaacatcaacgagagacacaaccatacacacctaacacacgctacgtgtgtagtaggccagtgcgtattcgcgtagagcgtagatcttcgtgcacgcctagatggacacagagtcgcaaaggaatatatcgccgcaccggtcgcagccagtcgaccaacgacataccaccgacagaaatattagatccacatcatcatgcggagcaagagggtatacaatcccttccggtagaagaaaatcccaactatagataccgaagtgtaagacgttcaggtgtgtcaactatatcatatataagacaggtacatacatgagcgaacaaagagaaactcttcatagtagtgatcatgtgagcagacggctgtgttgcagcgccgtcacattgcggacgcccgcacnaaaaacacatgcgtcagcttctaaacacaaccctcgaaaagagaaaaacaactgaacaagatgtcaaggattcattctcatagaaatcgctagactatacggctcgattccgctgtgtgcgtctnttctgcattacgatataatagagagcacaactagaccacatataaaacagacactctcctctcttttctgtgcggcgaggtgcccgccatcacacaacggtgcaccagacgcgggcgccccctctctaccactactgtgccccccccacacaaaaaggngcctcccttgtcttctcttcctcccnttaanaaannanancggggggcccacccaa

SEQ ID NO: 2358 - DNA, 1419 bp, Glycine max
  misc_feature (1)..(1): n is a, c, g, or t
  misc_feature (58)..(58): n is a, c, g, or t
  misc_feature (63)..(63): n is a, c, g, or t
  misc_feature (129)..(129): n is a, c, g, or t
  misc_feature (286)..(286): n is a, c, g, or t
  misc_feature (367)..(367): n is a, c, g, or t
  misc_feature (492)..(492): n is a, c, g, or t
  misc_feature (555)..(555): n is a, c, g, or t
  misc_feature (954)..(954): n is a, c, g, or t
  misc_feature (979)..(979): n is a, c, g, or t
  misc_feature (1084)..(1084): n is a, c, g, or t
  misc_feature (1165)..(1165): n is a, c, g, or t
  misc_feature (1230)..(1230): n is a, c, g, or t
  misc_feature (1288)..(1288): n is a, c, g, or t
  misc_feature (1295)..(1295): n is a, c, g, or t
  misc_feature (1314)..(1314): n is a, c, g, or t
  misc_feature (1319)..(1320): n is a, c, g, or t
  misc_feature (1322)..(1325): n is a, c, g, or t
  misc_feature (1327)..(1327): n is a, c, g, or t
  misc_feature (1339)..(1340): n is a, c, g, or t
  misc_feature (1342)..(1344): n is a, c, g, or t
  misc_feature (1347)..(1347): n is a, c, g, or t
  misc_feature (1367)..(1367): n is a, c, g, or t
  misc_feature (1371)..(1372): n is a, c, g, or t
  misc_feature (1376)..(1376): n is a, c, g, or t
  misc_feature (1379)..(1381): n is a, c, g, or t
  misc_feature (1383)..(1384): n is a, c, g, or t
  misc_feature (1389)..(1390): n is a, c, g, or t
  misc_feature (1392)..(1392): n is a, c, g, or t
  misc_feature (1395)..(1397): n is a, c, g, or t
  misc_feature (1400)..(1401): n is a, c, g, or t
  Peptide Sequence Number=SeqID_6052
  Probeset Number=SeqID_12137
nagggtgcgtatgtagaggatagtacatgacaagttatagtgttgtgtgtgagtgagntggangtatatgtgcatacagactatgagagaccgaaggcagatacgatgacgcgtgtgcgtggtgtcgcnccatgagcggtgttagatgggctgattgtatatggtgcagcgctatgtatgcaggcgcgcgtgtctagtagtgatgcccattcatctgcgcgtgtctgtcggtacgctctaacgtatctcgcatcacgtctccgctccactctaagcattatcatcnctatactgtatacgaggacacacactcagttacaatcatatcaactcgtatgagtagggatagatgggatgtatgatggantagtgtcgcctggtgtgtgggtggtgtactgtctcatcttattgagcagcaatactctatgcatagcagactaacgtcaatgcacattgtatgtatatgaatgtctagtatggtgtagtgattcnattcagactcgatacattatatcattgggtatacatgtgtttgtatgtaatgtgtggtggggncgagacactccacactctacttcgttgtttgtattgtaatccatctacagttcatattgtatagatttttatcaatgactccaatcttcacgtatgctatacatatatattatagtgttatatttattgttatatttgtagtgtttaatgtaagtccgattctacatgccgtgatagtttagttagtggtgaggtatatatactatttatttttcttctctcctcattcatatcagacactcgtcacctcataatccactctagcacgcgagggggcgccaggtcagcacggctggctatctccactcatctcctcctctctggctcaccatcgccatcacccacgtacgtagaaaaatatgaagaaggtaaagaacattaacagcatgcaatgagatncaatcttctacaaatgacaaaaccntatcgtgttagacgcagaaaagtctggtagcctgattccctctggatgtagagaagtcttacggtctataatctacacatgctggattatacatatgttataggnatccccaacttcatcaactattcctccctaccattatacataccaacagtttgcaatgaaaaccgtcaacacactctgtcntctgttgttcctccactccctcctctctcctcctccacatatagttgtgcttgagtgggtaatgnttcttatatcactagtagaacagttgtgtggcactcctcttattgataggaaaaagtntaatatnaaaagatgtgtggtatagntggtnngnnnntnggggggacatgnngnnnggnataaattatgggtagttagnatanntatnagnnngnnggagnngnggnnnganncaccacacacaccaccca

SEQ ID NO: 2359 - DNA, 1822 bp, Glycine max
  misc_feature (1)..(1): n is a, c, g, or t
  misc_feature (44)..(44): n is a, c, g, or t
  misc_feature (66)..(67): n is a, c, g, or t
  misc_feature (69)..(69): n is a, c, g, or t
  misc_feature (71)..(71): n is a, c, g, or t
  misc_feature (73)..(73): n is a, c, g, or t
  misc_feature (138)..(138): n is a, c, g, or t
  misc_feature (140)..(140): n is a, c, g, or t
  misc_feature (211)..(211): n is a, c, g, or t
  misc_feature (216)..(216): n is a, c, g, or t
  misc_feature (230)..(230): n is a, c, g, or t
  misc_feature (235)..(235): n is a, c, g, or t
  misc_feature (298)..(298): n is a, c, g, or t
  misc_feature (333)..(333): n is a, c, g, or t
  misc_feature (343)..(343): n is a, c, g, or t
  misc_feature (355)..(355): n is a, c, g, or t
  misc_feature (362)..(362): n is a, c, g, or t
  misc_feature (390)..(390): n is a, c, g, or t
  misc_feature (410)..(410): n is a, c, g, or t
  misc_feature (454)..(454): n is a, c, g, or t
  misc_feature (463)..(463): n is a, c, g, or t
  misc_feature (479)..(479): n is a, c, g, or t
  misc_feature (483)..(483): n is a, c, g, or t
  misc_feature (507)..(507): n is a, c, g, or t
  misc_feature (599)..(599): n is a, c, g, or t
  misc_feature (656)..(656): n is a, c, g, or t
  misc_feature (679)..(679): n is a, c, g, or t
  misc_feature (751)..(751): n is a, c, g, or t
  misc_feature (757)..(757): n is a, c, g, or t
  misc_feature (939)..(939): n is a, c, g, or t
  misc_feature (954)..(954): n is a, c, g, or t
  misc_feature (1129)..(1129): n is a, c, g, or t
  misc_feature (1260)..(1260): n is a, c, g, or t
  misc_feature (1394)..(1394): n is a, c, g, or t
  misc_feature (1425)..(1425): n is a, c, g, or t
  misc_feature (1667)..(1667): n is a, c, g, or t
  misc_feature (1712)..(1712): n is a, c, g, or t
  Probeset Number=SeqID_12138
ncacacactctacgcgatgatgtcgtcgtacacggcatagttantacgagcatatatatcatcaanngntntntgcgacgatcttccaatcacgtagacgcgacatcgtcatacatgcctatcatatactattctgtnancatgttataactatgtatatcgatgatatatcaacagcgtcgtacatatgtatctcatataataaataatncttgngtagtagtaagtanactantcctaatcatgtcaccactacatgttactacatcgcttccctctcttgtctgatgtcatcatnttgagagatatgctactcgactgatattgaaacgnatatatgacnacacatacagcnatctgcntagctatcgactcgtcatcatagctgantcgtacagtatatgctatanagatatataggtaacgtgcacgtaaacttgacgtcatatagcancagctcgantcaaccgacgtagagntgantcacaccgtatgcatagagcaagnagtgacatagcgtctatcgacgtccgctgtacatactacgagtgacgtgtcacgcgtgcgtctgcactcttcgtcgtataatatactcgtanttatctcgtatcactacatagagccgcgcaaggtgaccatgtcgtgagtgtagagangatgagatgtctagttagatacnattacagtggtgtgacactcttactatcgatgatctcgcatgcagtaacacctacatcactctgcttactantacacnaccaccgacgcgtgtcgtgcgagtcatcacacatcgaacagctcatgcacgcgtcctacgctgactgcgcgcaaaccacagtctctcaccacttatcacgcatcgcacatagacgctcacggctgcatgatacgtcaatgcgtcgatcgtacagtgatacttctgctctcgtgtcgtactgngaagatgtcgcacgngccgcgtgctgctaactcatcgtattatctctacatacagcgtgactatactacgatcgctccactatccgacacagagaggagacatggtagtagaccgagatcgcgagctacattaatgtagaagacgagaagatgagtatagagcataaccgagactaacgaacgacatgancagtaatacgacgaatcagttcgacaagtgcacatcgagcgtcatagcgacatcgcgaacccgtggttcgaagttgaacgtggtctaatatatatgactgctggtcaatcaagtctgcgtcacctactccncacgcgctcactcatcctacacgtctcgcgcaccgtcgtcccacagcgcttcctccacgccacactcggcggccgctgcgcataccgcgcgatctgtcatcagccacgccaccacatactctctgtgatagttnatatctcggacgacgtgatatattagtctangtgagactcacgtcgctactccctaagattgtgtgtcgctagctgaaaccataggcggccgcgtgcaatccacatgacggaagaagaacaggagcatgagtatgcatgagagctgatgattgtgagataagtgaaaggcagagcagcggataagaggtggtgggtacggaagaagaggcgacgcgcacacgcgtacgaaccactactcacacctccggacgagactcgcggtgcggggagtngcgcccacgccacgtcgtctccgtctctactcgttctctcctcanaagtattgtttgcgttgttcatcaggcggaggcaaattcattcctcagagagaggagcgagacgtagtgtggagggaggaggtagagaagaaggaaaggaggggagtaga

SEQ ID NO: 2360 - DNA, 462 bp, Glycine max
  misc_feature (224)..(224): n is a, c, g, or t
  Peptide Sequence Number=SeqID_6053
  Probeset Number=SeqID_12139
ggtatgttctgctctatcatcatgttctttgtgggtacaaggatctacgtgcatgtgaagccagaaggaagcattttcacgagtattgcacaagttctagtggctgcttatagaaaacggaaagttgagctaccaagtgagaagcatgttgatggggttttctatgatcctccacttactgggacacaagtttttttaaagctaccactgaccaaccaatttangtgtttgaataaagcagctgtaataatggagggggagcaaaaccctgatgggagtagagcaaataattggaaagttgtcatcatccaacaagtctaagatgcgaagtgcttggcaaggacttgccaaatatgacctgcagggttctcacgatttacttgcatgactctgcaggtacatttaattgtcgcaggcctacgaagttcgaagacggtcttgagcgaaatgcgaattccagcg

SEQ ID NO: 2361 - DNA, 344 bp, Glycine max
  misc_feature (52)..(57): n is a, c, g, or t
  misc_feature (92)..(92): n is a, c, g, or t
  misc_feature (114)..(118): n is a, c, g, or t
  Peptide Sequence Number=SeqID_6054
  Probeset Number=SeqID_12140
aatgatttctgatactttagtttggccaatttatttataacctacaatttcnnnnnngatttcatgatattattttgttgaatctttgtttntgtgatctgttagggaacaggnnnnntataagaaccctgagaacaatagttgttggagacgtccacctgtagaggaggttctggcaaaactaacgactaatttcaacaaagtacactccaggcagtgtgcagatgaggctgaactggctgaacatgttgtcggtttgacatgtagcctagcagcctgaagttttggattgtaactaattgctctcctccctgaatttagctacaggaagtgcttaatgattt

SEQ ID NO: 2362 - DNA, 1723 bp, Glycine max
  misc_feature (1)..(1): n is a, c, g, or t
  misc_feature (174)..(174): n is a, c, g, or t
  misc_feature (480)..(480): n is a, c, g, or t
  misc_feature (552)..(552): n is a, c, g, or t
  misc_feature (573)..(573): n is a, c, g, or t
  misc_feature (575)..(575): n is a, c, g, or t
  misc_feature (625)..(625): n is a, c, g, or t
  misc_feature (711)..(711): n is a, c, g, or t
  misc_feature (768)..(768): n is a, c, g, or t
  misc_feature (824)..(824): n is a, c, g, or t
  misc_feature (854)..(854): n is a, c, g, or t
  misc_feature (902)..(902): n is a, c, g, or t
  misc_feature (934)..(934): n is a, c, g, or t
  misc_feature (951)..(951): n is a, c, g, or t
  misc_feature (1032)..(1032): n is a, c, g, or t
  misc_feature (1044)..(1044): n is a, c, g, or t
  misc_feature (1064)..(1064): n is a, c, g, or t
  misc_feature (1067)..(1067): n is a, c, g, or t
  misc_feature (1072)..(1072): n is a, c, g, or t
  misc_feature (1078)..(1078): n is a, c, g, or t
  misc_feature (1088)..(1088): n is a, c, g, or t
  misc_feature (1133)..(1133): n is a, c, g, or t
  misc_feature (1189)..(1189): n is a, c, g, or t
  misc_feature (1193)..(1193): n is a, c, g, or t
  misc_feature (1212)..(1213): n is a, c, g, or t
  misc_feature (1216)..(1216): n is a, c, g, or t
  misc_feature (1229)..(1229): n is a, c, g, or t
  misc_feature (1236)..(1236): n is a, c, g, or t
  misc_feature (1301)..(1301): n is a, c, g, or t
  misc_feature (1315)..(1315): n is a, c, g, or t
  misc_feature (1322)..(1323): n is a, c, g, or t
  misc_feature (1347)..(1347): n is a, c, g, or t
  misc_feature (1355)..(1355): n is a, c, g, or t
  misc_feature (1390)..(1390): n is a, c, g, or t
  misc_feature (1397)..(1397): n is a, c, g, or t
  misc_feature (1402)..(1402): n is a, c, g, or t
  misc_feature (1404)..(1404): n is a, c, g, or t
  misc_feature (1406)..(1406): n is a, c, g, or t
  misc_feature (1410)..(1410): n is a, c, g, or t
  misc_feature (1437)..(1437): n is a, c, g, or t
  misc_feature (1441)..(1441): n is a, c, g, or t
  misc_feature (1444)..(1444): n is a, c, g, or t
  misc_feature (1447)..(1447): n is a, c, g, or t
  misc_feature (1449)..(1449): n is a, c, g, or t
  misc_feature (1453)..(1454): n is a, c, g, or t
  misc_feature (1482)..(1482): n is a, c, g, or t
  misc_feature (1511)..(1511): n is a, c, g, or t
  misc_feature (1515)..(1515): n is a, c, g, or t
  misc_feature (1546)..(1546): n is a, c, g, or t
  misc_feature (1549)..(1549): n is a, c, g, or t
  misc_feature (1565)..(1565): n is a, c, g, or t
  misc_feature (1578)..(1578): n is a, c, g, or t
  misc_feature (1587)..(1587): n is a, c, g, or t
  misc_feature (1608)..(1608): n is a, c, g, or t
  misc_feature (1613)..(1614): n is a, c, g, or t
  misc_feature (1616)..(1617): n is a, c, g, or t
  misc_feature (1630)..(1631): n is a, c, g, or t
  misc_feature (1637)..(1638): n is a, c, g, or t
  misc_feature (1642)..(1642): n is a, c, g, or t
  misc_feature (1649)..(1649): n is a, c, g, or t
  misc_feature (1654)..(1654): n is a, c, g, or t
  misc_feature (1656)..(1656): n is a, c, g, or t
  misc_feature (1664)..(1664): n is a, c, g, or t
  misc_feature (1669)..(1669): n is a, c, g, or t
  misc_feature (1672)..(1672): n is a, c, g, or t
  misc_feature (1682)..(1704): n is a, c, g, or t
  misc_feature (1709)..(1723): n is a, c, g, or t
  Peptide Sequence Number=SeqID_6055
  Probeset Number=SeqID_12141
nttctcgccgttcacgacgatcgcgtgcgcagcgcgtagatgtgattatatacacgcatatggtttatcgacatccttatagcgcgtgttgattttgtgatagccactatgtatggtgtcgtgagatcctcgtgtacacgctcgactgtctctctgttcgtgcattgtacattntctccctctctgattagcgttcttactacatgtgtcatgtggcgtatcatattctctcgacgtatctctaccacctcacgtgatgattactgtagtgctgtcgcgaatcactgtaatttcgattttcatttgctccatatactttctactccactgcatacactgagattgtttacagccgtctctctgcgcatgtgtattctaatagtattctcaccgcagtatacgagcatgcgtagcgtcatcactgtgttggtcacagatatctctgcaacatatatctacagccacagttatatatatatnccgactactctactctacaacatggcgcaatctggcgcgcgacacactctcacacatcactacacacagcancgtgctcgcccacgccagcgncnttcgcggcgtccggctgtacgctgacacctgcgcgccgcactcatagtcnctctctctctcgttcctgtctctcgcggctctcgcgtctttgattcactgctgctgcttctgtgcgctcgtgttgtgtgcgatctngctagtatgtcgcggtgtgacaatcgcactcgcactccgctctcatctatgtcaccncctccactccgcgacgcacacgcacgcagcacactcacactccatactcacatcantaagtatgcgccactacaccgcttcatgtncgctagtgcctcttcatcgtcacctctgagctcgtagccacgtgatgntatcgtgtcgccgacacactacagacaccagnagaaaacagtactactncttcatcacactgtcacgtagctctatcacatacatctatatatcgtacgtagacagtcagtctacattctcatgtatttntttacacctctnagtatgatataatatttgtncantattnccgtcntcatactatnactctcttaatactcttctatgctctatctgctctctgtgatacntctacatctttcttatctcttgctatctgtccgtctccgatcagtctttctatgtngctnttctgctctctacgtatcnnatngttcagataatcntggcttnttttttacctatacgtcctgtctctcctctcactgtcctatattcgttctatttaatagtccgtngtatacgttgctantctatannatagtgtttatctatgattatatngaattatnaaatcctactataaaatcatgaagttgtcacgatnattatanctccntntnttangatctacacacgacacagcagcaaacnaganagnaanangagnnacgccaaatcgctccgcatatgccgacngccagccacgacgcaagcgcgatgcacangacnccacacgctgtgctcagagcgacagccagcngcnagacgacaccaacgancagaacggcgtgngcaagacgnaacacacccagctgattaganaaacnnannagagcacacaaanncacaannacanaaacagnaccanancacacaanaaaanaanacaaaacaannnnnnnnnnnnnnnnnnnnnnnaaaannnnnnnnnnnnnnn

SEQ ID NO: 2363 - DNA, 1628 bp, Glycine max
  misc_feature (12)..(12): n is a, c, g, or t
  misc_feature (22)..(22): n is a, c, g, or t
  misc_feature (25)..(26): n is a, c, g, or t
  misc_feature (35)..(36): n is a, c, g, or t
  misc_feature (43)..(45): n is a, c, g, or t
  misc_feature (58)..(58): n is a, c, g, or t
  misc_feature (62)..(62): n is a, c, g, or t
  misc_feature (64)..(64): n is a, c, g, or t
  misc_feature (73)..(74): n is a, c, g, or t
  misc_feature (81)..(84): n is a, c, g, or t
  misc_feature (86)..(87): n is a, c, g, or t
  misc_feature (94)..(94): n is a, c, g, or t
  misc_feature (96)..(97): n is a, c, g, or t
  misc_feature (101)..(101): n is a, c, g, or t
  misc_feature (103)..(104): n is a, c, g, or t
  misc_feature (111)..(111): n is a, c, g, or t
  misc_feature (121)..(121): n is a, c, g, or t
  misc_feature (132)..(132): n is a, c, g, or t
  misc_feature (150)..(152): n is a, c, g, or t
  misc_feature (154)..(154): n is a, c, g, or t
  misc_feature (163)..(163): n is a, c, g, or t
  misc_feature (171)..(171): n is a, c, g, or t
  misc_feature (175)..(175): n is a, c, g, or t
  misc_feature (181)..(181): n is a, c, g, or t
  misc_feature (192)..(192): n is a, c, g, or t
  misc_feature (195)..(195): n is a, c, g, or t
  misc_feature (211)..(211): n is a, c, g, or t
  misc_feature (241)..(241): n is a, c, g, or t
  misc_feature (245)..(245): n is a, c, g, or t
  misc_feature (267)..(267): n is a, c, g, or t
  misc_feature (299)..(299): n is a, c, g, or t
  misc_feature (302)..(302): n is a, c, g, or t
  misc_feature (328)..(328): n is a, c, g, or t
  misc_feature (330)..(330): n is a, c, g, or t
  misc_feature (344)..(344): n is a, c, g, or t
  misc_feature (359)..(359): n is a, c, g, or t
  misc_feature (363)..(363): n is a, c, g, or t
  misc_feature (385)..(385): n is a, c, g, or t
  misc_feature (388)..(388): n is a, c, g, or t
  misc_feature (390)..(391): n is a, c, g, or t
  misc_feature (394)..(395): n is a, c, g, or t
  misc_feature (400)..(400): n is a, c, g, or t
  misc_feature (427)..(427): n is a, c, g, or t
  misc_feature (473)..(473): n is a, c, g, or t
  misc_feature (554)..(554): n is a, c, g, or t
  misc_feature (564)..(564): n is a, c, g, or t
  misc_feature (588)..(588): n is a, c, g, or t
  misc_feature (593)..(593): n is a, c, g, or t
  misc_feature (596)..(596): n is a, c, g, or t
  misc_feature (611)..(611): n is a, c, g, or t
  misc_feature (614)..(614): n is a, c, g, or t
  misc_feature (652)..(652): n is a, c, g, or t
  misc_feature (694)..(694): n is a, c, g, or t
  misc_feature (708)..(708): n is a, c, g, or t
  misc_feature (736)..(736): n is a, c, g, or t
  misc_feature (739)..(739): n is a, c, g, or t
  misc_feature (741)..(741): n is a, c, g, or t
  misc_feature (844)..(844): n is a, c, g, or t
  misc_feature (851)..(851): n is a, c, g, or t
  misc_feature (864)..(864): n is a, c, g, or t
  misc_feature (891)..(891): n is a, c, g, or t
  misc_feature (904)..(905): n is a, c, g, or t
  misc_feature (907)..(907): n is a, c, g, or t
  misc_feature (910)..(910): n is a, c, g, or t
  misc_feature (1002)..(1002): n is a, c, g, or t
  misc_feature (1026)..(1026): n is a, c, g, or t
  misc_feature (1045)..(1045): n is a, c, g, or t
  misc_feature (1049)..(1049): n is a, c, g, or t
  misc_feature (1095)..(1095): n is a, c, g, or t
  misc_feature (1097)..(1097): n is a, c, g, or t
  misc_feature (1105)..(1105): n is a, c, g, or t
  misc_feature (1116)..(1116): n is a, c, g, or t
  misc_feature (1139)..(1139): n is a, c, g, or t
  misc_feature (1156)..(1156): n is a, c, g, or t
  misc_feature (1259)..(1259): n is a, c, g, or t
  misc_feature (1267)..(1267): n is a, c, g, or t
  misc_feature (1285)..(1285): n is a, c, g, or t
  misc_feature (1305)..(1305): n is a, c, g, or t
  misc_feature (1307)..(1307): n is a, c, g, or t
  misc_feature (1448)..(1448): n is a, c, g, or t
  misc_feature (1479)..(1479): n is a, c, g, or t
  misc_feature (1494)..(1494): n is a, c, g, or t
  misc_feature (1510)..(1510): n is a, c, g, or t
  misc_feature (1512)..(1512): n is a, c, g, or t
  misc_feature (1519)..(1519): n is a, c, g, or t
  misc_feature (1521)..(1521): n is a, c, g, or t
  misc_feature (1529)..(1529): n is a, c, g, or t
  misc_feature (1558)..(1558): n is a, c, g, or t
  misc_feature (1560)..(1560): n is a, c, g, or t
  misc_feature (1615)..(1615): n is a, c, g, or t
  Probeset Number=SeqID_12142
gtggttgttgtntccccccccnccnnctccccctnnccctccnnntttccttggtctngggngntggtggtgnntgttgcnnnnanncctctcncnncccncnncccaccnctctcccttngttgtctcctntttctctctctttagttnnntnaatttttgnttgtgttnttgngggttngtggtgtgtgntgncttctcccctctcctntcaccctcgtccgcgtgcgtcgtcgcgccncagncccgcaccaccaacccaacgcncactcgcactcatcgcgctacgacaggaagtnganatagatattcatatatctcacttctncnatacattaatagantagacagcgtgtctntggngtgagtactatatatgaaatantanannacnnctgcncgactgatagcttatgaacatgcgtanctacaccatcatctctatgggcggtgggccgtggtgtgtgtgtgtnggtgcgtggtcgggatcgtagagagaggtgagagagtgatggcagagccgacagctcgcttcttagttaagacgcagagcnaggagagganggagagggtgtggatggaggcacnaacancanatacagagcactcangtntgtagacgtgacgctcacgatcgacgccagcatataanagtcagacgaatacacacacgactctatatactccgcgatgnagtgcagtgactantaagtcatcatcaccgatgaatatagangananagaactacatacacaactacatcacacacaatgatagtacactgcgattttccatcgatactctcagcaagcctcgtctggagagacagattcgtgatgacangacatgngtgatgctacgangtagacagtatatatgtaagagtacgncgcacactcacannantantcgtagcctagagtaaggaagcgtactaaacacgcgacatagtcacacgcagttaatagatatgtgacacacaagcaagcagagtcaccgcntcagactgatacgatagacacctngctgcagcacgtatgtgantagnatgctatatatagtgcgagattatcgatatatgaagtatcacacgnantagattantaagcacacanatcgacaaatgtatacagtatangtacttcacacacatcngtatcacactccatatatcgagtgattatatatgtgatgataacaacctcctacatcattcgcgctcgctctgcgacgtagtcgttcgtgcggtccactacanccacgtcncgatctcgtactgagcgntggcgacacgtaccgacatncnacacacacagcgtgctgtgtgtctctctctcgtctcactgctgacactcgcactcgctactgaatatctgcgcacgaccaacataggcgtcatatgtatatctatttttctaaaccacctcaatgagtagattataacaanacatatagatacgagcaagagacgacatganactacgtacacaacncgcagacactcgtatncnatcatantnatcctaantatatctatctagatgtcctcgtgctgcntngcgcgcgcatcgctgccctcagtgcatgtatcgctgtgtcgtcgtggatcgtttnctgttgcttgctt

SEQ ID NO: 2364 - DNA, 966 bp, Glycine max
  misc_feature (649)..(649): n is a, c, g, or t
  misc_feature (678)..(678): n is a, c, g, or t
  misc_feature (778)..(778): n is a, c, g, or t
  misc_feature (783)..(783): n is a, c, g, or t
  misc_feature (789)..(789): n is a, c, g, or t
  misc_feature (791)..(791): n is a, c, g, or t
  misc_feature (797)..(797): n is a, c, g, or t
  misc_feature (801)..(801): n is a, c, g, or t
  misc_feature (810)..(812): n is a, c, g, or t
  misc_feature (821)..(821): n is a, c, g, or t
  misc_feature (829)..(830): n is a, c, g, or t
  misc_feature (834)..(835): n is a, c, g, or t
  misc_feature (838)..(838): n is a, c, g, or t
  misc_feature (866)..(866): n is a, c, g, or t
  misc_feature (875)..(876): n is a, c, g, or t
  misc_feature (886)..(887): n is a, c, g, or t
  misc_feature (906)..(966): n is a, c, g, or t
  Peptide Sequence Number=SeqID_6056
  Probeset Number=SeqID_12143
ggctcgagtggtaattcatgtaataaaattcaatttcagttactaagatgaaactaattggaaaactcagaactacaccgaaagtatttaaaaaagtgaatctaattgtcagcgtctaagatttgatggccttgtttctggggtgtcttagaaggtgatgtaactgtgcagggaaaaacagtatctctataatcgtgccaattgttgtcccaattgtcgttgtgattgtacttttcattgttggagtctgcttcctacgtaagagggcaagcaagaagtataacacttttgtccaggattcaattgtggatgatcttaccgatgtggagtccttgcaatttgatttggctacagttgaagctgccacggatggattctcagatgagaacaagattggccaaggtggatttggggtggtttataagggtgtcttccttaacagacaggagataactgtgaagaggttgttagttaccttcttgctgggtgctgtttagttcaggaatgaacctgttcttgtggccaagcttcatcatacaagtttgatgagactatggggattttgcttggagggacacgagacgatccttatctatgaatacataccaaacaaaagccttgatcgctttttatttgaccctgtaaaganagagagttagattggtcaagacgctacangattattgtttgcattgctcgaggaattccagatttacacgaaaattcctagctataattataaccgtgatctcacagctggtattgtttatagatgaanatttnaacccnanaattcngatntggcttggnnnaattttcangctgatcnnactnnttnattccggaggatttttgggactatgttncttgtttcnntattggcttnntggcatgtttttttatatnnnnnnnnnnnnnnnnnnnnnnnnnnnnnnnnnnnnnnnnnnnnnnnnnnnnnnnnnnnnn

SEQ ID NO: 2365 - DNA, 276 bp, Glycine max
  Peptide Sequence Number=SeqID_6057
  Probeset Number=SeqID_12144
aaaagaataagtcgctaacagataggccgcgtcagttgcgtttgagcggccgttccaggacaataaattgcaattcagtctaactcgaccggcatgagagagctatggtctttggcctgggcggcctcgatctgtttggactcatcattcctggaaccatgttgcaagatacggctgtggcacccagtggcttcattaaatttgtagccggcatttgtcctctgcctcagatttatgctggtcccttgacaagctgccttcggatgtgagaaagcg

SEQ ID NO: 2366 - DNA, 1522 bp, Glycine max
  misc_feature (1)..(1): n is a, c, g, or t
  misc_feature (4)..(4): n is a, c, g, or t
  misc_feature (39)..(39): n is a, c, g, or t
  misc_feature (110)..(110): n is a, c, g, or t
  misc_feature (152)..(152): n is a, c, g, or t
  misc_feature (166)..(166): n is a, c, g, or t
  misc_feature (178)..(178): n is a, c, g, or t
  misc_feature (420)..(420): n is a, c, g, or t
  misc_feature (469)..(469): n is a, c, g, or t
  misc_feature (748)..(748): n is a, c, g, or t
  misc_feature (860)..(860): n is a, c, g, or t
  misc_feature (967)..(967): n is a, c, g, or t
  misc_feature (1062)..(1062): n is a, c, g, or t
  misc_feature (1098)..(1098): n is a, c, g, or t
  misc_feature (1104)..(1104): n is a, c, g, or t
  misc_feature (1315)..(1315): n is a, c, g, or t
  misc_feature (1456)..(1456): n is a, c, g, or t
  Probeset Number=SeqID_12145
nganttgatggcgagtgggatactgaaagtcacgtggtnagcgtgcgtagtgcgtagatgtgtcacagtatattatgtttgtgttacagctgtctgcgtagtgtgtgtcntttcgtagagctgatgtagttatggtagtcactctctaatgnattgtggagatacngctgagcaacanagaatgtgtccacgcgatcgcgtggtgtgtatgtatggcccatcaccacgcatatggtatgtgtgtagacagcacacacgtggcttgtgtgagagcgcagataagatttacactacaacagatagtatagtacgatagagcaacgcacacacacagcggtgctgattgtggtgtggtggttgtttgatgttgtcagcagtatgtataggaatgtatgagtgagaggatatagagaagaagantagagcgatgagttgtggctcctgaagatgcgttggtagtgacggatantactatcccgattgttatgttgtggtgtccacacacattactgttgtagtgaggagttgagcaacgaagtaagtaggaagaggaatcgtgaagatctgtgcgagtgggccgcacccacgctggatgtacggtcgagttgggtggttatgtatctatatacatatagttacagcagagggtgtgagttgttatatacaccactcaagttctcgatatattatataatcagcacacattattggtgattgtgggtgtgaaggcgcgtagtatgtagtgccnccctagctatatatgtcacacaacggcacagagtgtatactccacgccccggaaggtagagtgtgggcgtactcacataaatatatggtgtgtgggagactggtaagtgttntaataataccacatcaatgtagctgatcttcagcaagtggtgttgtgttgtacacgttacggatagagagtgtacaacagccgaggttatgaagacacagtatatgnggtggagcggagagagagaggtgtatgtggtatgcacaaggatggtggagtagtatgtattgtgttttctatctcgacgagtatagattcacgtngttgttgatgttacggcgcacaagtataataagagntagagntacaaacagcacaaaaggagagagacacacaaaaatattagtaaacagaaggtatgtatccaaatatgaattactttgttgattaaggtgaatgagtgagggccccgggtggcatctcacaatggtgtagttgagagctgtcagtggacaccaaaagcagttatggctctattttatctcccccgtagtgagacacgccatattagagtanataacaacagaggatagataaatgagtaacttacttttgccacctgttcgggcgcgaccccccgcctagtttgtgtaggacccgtgttccgcctcacccccacccctcataacacaacaagataatgtatagatattgtgncaccgccagaggtgtcttccatattgtgacgcccgtagtcgtgttggaaagaaggagcggccgccc

SEQ ID NO: 2367 - DNA, 1603 bp, Glycine max
  misc_feature (1)..(1): n is a, c, g, or t
  misc_feature (3)..(3): n is a, c, g, or t
  misc_feature (51)..(51): n is a, c, g, or t
  misc_feature (55)..(55): n is a, c, g, or t
  misc_feature (59)..(59): n is a, c, g, or t
  misc_feature (110)..(110): n is a, c, g, or t
  misc_feature (125)..(125): n is a, c, g, or t
  misc_feature (338)..(338): n is a, c, g, or t
  misc_feature (384)..(384): n is a, c, g, or t
  misc_feature (418)..(418): n is a, c, g, or t
  misc_feature (421)..(421): n is a, c, g, or t
  misc_feature (461)..(461): n is a, c, g, or t
  misc_feature (821)..(821): n is a, c, g, or t
  misc_feature (925)..(925): n is a, c, g, or t
  misc_feature (1004)..(1004): n is a, c, g, or t
  misc_feature (1055)..(1055): n is a, c, g, or t
  misc_feature (1155)..(1155): n is a, c, g, or t
  misc_feature (1244)..(1244): n is a, c, g, or t
  misc_feature (1283)..(1283): n is a, c, g, or t
  misc_feature (1303)..(1303): n is a, c, g, or t
  misc_feature (1522)..(1522): n is a, c, g, or t
  misc_feature (1534)..(1534): n is a, c, g, or t
  misc_feature (1565)..(1565): n is a, c, g, or t
  misc_feature (1570)..(1570): n is a, c, g, or t
  misc_feature (1576)..(1576): n is a, c, g, or t
  misc_feature (1582)..(1582): n is a, c, g, or t
  misc_feature (1594)..(1594): n is a, c, g, or t
  misc_feature (1603)..(1603): n is a, c, g, or t
  Peptide Sequence Number=SeqID_6058
  Probeset Number=SeqID_12146
ngnaggcgtgatggtcgagagcatagagtcactagtgtacacatcgtaganagantcantgacgcgaagtagtaatactagcagagatgctgcgtgtatggtcagtaacnacgcatgtatatganttatgtgtatatactgcggattatgtgagatggatacacgatagtatcatcatgtagatataagtgagatattcatatcgcgcgtgattgagatacatataatagcatacatatgctcagatgtatagtgagcaggatatgatatatagacacacgcagccatagaaacgatgagcagtgcatcatgagatgtttagctatcttctcgcatcngaacaacgtagagcggatatctgcataggattagacatgatcagantatctattcgtgttatgtgtaggttacactgatntgntctgtagatcagtactcagagcagatatgatgcacacatntaatgaagtgagacatatatgagtcgtgatgtgctatgtgatgtgttggtcatgtgtgtcgcgtgtgacggatgcacgagtgagggagcgcggcggagtcgagtatcatcttatgtcagcgcgtgcgagatgaaactcttgcaagttagagaaaatagataccagaaagactatatatagagtgagaggttagtcgacggatcacgcatgcggagtgtcatgtataatctcgaggtacaagtagtgagtggctgtgtgtgtgatgtcgcaatcataataaaggaatggcgtagcgaatgatgtggtggtcgcgtagagagtatatacgaaatggagtggcgtatatacattgcgctgtgngtatagtatagtaggacagaaatgaagtagagtgtaatcgtcgtagagaaagtacatgcgctgtattagtggggatcgtcgcaatatagtacgtcatatgtagntaaatggtgtgtgtgatgagcagaggaggggtatgtcgaagtttagatggtatcgtaggtagtggcgctaggtggtatnctagatgtgaggattgggtggtgatccatcttgatcgttcagtagtacgantatgtagtctaatcggtacggctcgattatagtgtctcgtgctatatgatctggtctcacgtagctcagtgagatgattgatcacgtgagaatataaagngatgagagggtgcattgaagaagtgtgatagactatgatataatataacaaaaatgtaagacgacaaatagaagtaatgatatattatngtctagaacgacagcccgcggattagatgtcagggacgngcggagctgtatgaggtgtnagcggagagtcataatgacagccagagacgcgggacgtgtgtatatactctcgatatatgttgtgaggagtgtgatatgttcgtagtattacacaacataacgcgagagagcacagcactcagatacagagcttctattgctgtatatactaattacagataactatagaatagggatgatgtaacgtgcgtgttatgcgtagtttatatgtctagttntcgacgatgtcntgagtctcgtagagcgcattgagtgtgagtntcgcntaaagnttgtanaaacgtccgggngtgggagan

SEQ ID NO: 2368 - DNA, 1011 bp, Glycine max
  misc_feature (122)..(122): n is a, c, g, or t
  Probeset Number=SeqID_12147
cattcattcctctccactgttgtaacttactttattttcctaaccaattgggtacgggcccccctcgagaatttttccaaaaaggggcccccaaaaggatgtttcccctgatgattgacagnattggcacaggaatctcggcattaactgtcgtttgcatgaccccccaaataaaaggagaatttcagtgacaggagcctctaagctacttgccaatattttatactcttatcgtggaatggctttatctgttggtaccatgattgccggatgggatgagacgtttcctggcctatattatgctgacagtgcaggaggaagacttaaaggcactagattctcggttggatctgtttcaccttatgtttatgttgcattggacagcggctaccgctatgacctgtttatttgcggaagatgctgaatttgctcgacgagcctattatcctgcaacatctcccagatggggccactggtgaagctgctatcgtcttactatggtggaaccacaatggatggaataaactggcctggtgatgatggtcggactaactccattacaattcacaaaccaacctaaccacaagcaccgcgcataaataaaatgttcgagcgctactggaggtctgctagaattaactcccgctatgtatctttagttctcctttgcttggccacagaattttgaacccccctggttggtaaacgcttcacttccacactttggaaatggccctacagtttgtatctttcccatgtgcttgtccttactctggctctgcattcaattacaggcacctatacgtaattctgtcgtaattcctggcagatccggcgtgaccaccaaatataacaaaaaacgcaaatcatcgcctatgtcttcttactgttatttggcccccttcattctgtgagtcacttttccagattgtccaagttactagcgaccatatatcctaccactcggtgaacccgtaaccctctaactctctttacccagcacatcgcgac

SEQ ID NO: 2369 - DNA, 1404 bp, Glycine max
  misc_feature (12)..(12): n is a, c, g, or t
  misc_feature (24)..(24): n is a, c, g, or t
  misc_feature (27)..(31): n is a, c, g, or t
  misc_feature (42)..(42): n is a, c, g, or t
  misc_feature (382)..(382): n is a, c, g, or t
  misc_feature (539)..(539): n is a, c, g, or t
  misc_feature (1159)..(1159): n is a, c, g, or t
  misc_feature (1250)..(1250): n is a, c, g, or t
  misc_feature (1378)..(1378): n is a, c, g, or t
  Peptide Sequence Number=SeqID_6059
  Probeset Number=SeqID_12148
tttcttctcttngtattataattntannnnncgagggcgggncctggttgcttttgtttgtggtttactcttctcagccgcccacctctctccccccactcaccccaacccctagatgtgaatatatcatatatggtgctcacagtgtctctcgccatatctctcttatcctctcatttcctctctcctcttctttacaccctacaactcctccttcatcttcgaccttccttctatacatctcaaacttgatacatataccttctcgctattaagcgaaaggtgtagaatcaggtcgtcacctacatggattccgcgccacatctatagcagccaccccccacctcccacagccgaaagaaagggaatccctccttctaanccccatccttcttgtttgtatcatatatctgcgttgttgtatatatttgttaaagtttgtgaataatataatgaataaatgataaacatcattcacactacatattataacatatatcctctccctctctctttccctatagttgtctgtggtggcncattgcgccctatctgttagctgtggttccctctcgttaccttctgggctgagtaacatacgtagttattaggtaggtcattcatagagactcatgcactgactgtcacgattactaatctactgcaggttgatggtatgaagttgcgcatctggtaccacttgtaccctctgtacgataactacttatacattattctacacccctcaaaggataaagcagtttgctggatacaagtcgttatatatatgataacagatcataatatatacctcattcctctccaacatcccaccacctctcctcaccctaagatctgcataacctaccattctctatctccccaccctcctcccgccctacacaccttccttgactcttcatatctcttcaattgtgctgtcctatcatctagcgctctctatgatcatttagtttttaatattatctcctagttcttgttactttatatttatatatgattattatactttaatataatatagtattgtgattagtcatttgattataacaacaacacagataatcccaccaaccaccctccccactttcaatactactcacatcaatattaattaattaatcacctatacttatanacactgaactaaatacctagatgctagaaagcacatctcgcgccgcgcgcctctcttctcaccaccttctctccttaccgcatgactgctntgttctcctcgaacatctcatatacgtggtagtctgcgtgtaggatatgcttctgccacgcacgtcatgtcctctacgctgtgtgtaggtatctttgcctcgcactcagcatacactctcgctttccncaatatatgatctcctgctacagcag

SEQ ID NO: 2370 - DNA, 687 bp, Glycine max
  misc_feature (1)..(1): n is a, c, g, or t
  misc_feature (16)..(16): n is a, c, g, or t
  misc_feature (20)..(21): n is a, c, g, or t
  misc_feature (25)..(25): n is a, c, g, or t
  misc_feature (27)..(27): n is a, c, g, or t
  misc_feature (29)..(29): n is a, c, g, or t
  misc_feature (42)..(42): n is a, c, g, or t
  misc_feature (55)..(55): n is a, c, g, or t
  misc_feature (58)..(58): n is a, c, g, or t
  misc_feature (63)..(63): n is a, c, g, or t
  misc_feature (67)..(69): n is a, c, g, or t
  misc_feature (71)..(71): n is a, c, g, or t
  misc_feature (73)..(73): n is a, c, g, or t
  misc_feature (80)..(81): n is a, c, g, or t
  misc_feature (84)..(84): n is a, c, g, or t
  misc_feature (89)..(89): n is a, c, g, or t
  misc_feature (91)..(91): n is a, c, g, or t
  misc_feature (98)..(98): n is a, c, g, or t
  misc_feature (101)..(101): n is a, c, g, or t
  misc_feature (116)..(116): n is a, c, g, or t
  misc_feature (118)..(118): n is a, c, g, or t
  misc_feature (120)..(121): n is a, c, g, or t
  misc_feature (134)..(134): n is a, c, g, or t
  misc_feature (136)..(136): n is a, c, g, or t
  misc_feature (139)..(140): n is a, c, g, or t
  misc_feature (148)..(148): n is a, c, g, or t
  misc_feature (152)..(152): n is a, c, g, or t
  misc_feature (157)..(157): n is a, c, g, or t
  misc_feature (159)..(159): n is a, c, g, or t
  misc_feature (165)..(165): n is a, c, g, or t
  misc_feature (169)..(169): n is a, c, g, or t
  misc_feature (173)..(173): n is a, c, g, or t
  misc_feature (182)..(182): n is a, c, g, or t
  misc_feature (193)..(193): n is a, c, g, or t
  misc_feature (195)..(195): n is a, c, g, or t
  misc_feature (199)..(199): n is a, c, g, or t
  misc_feature (214)..(215): n is a, c, g, or t
  misc_feature (235)..(236): n is a, c, g, or t
  misc_feature (239)..(240): n is a, c, g, or t
  misc_feature (243)..(243): n is a, c, g, or t
  misc_feature (249)..(250): n is a, c, g, or t
  misc_feature (252)..(252): n is a, c, g, or t
  misc_feature (260)..(260): n is a, c, g, or t
  misc_feature (262)..(262): n is a, c, g, or t
  misc_feature (281)..(281): n is a, c, g, or t
  misc_feature (284)..(284): n is a, c, g, or t
  misc_feature (289)..(291): n is a, c, g, or t
  misc_feature (295)..(295): n is a, c, g, or t
  misc_feature (300)..(300): n is a, c, g, or t
  misc_feature (303)..(303): n is a, c, g, or t
  misc_feature (308)..(308): n is a, c, g, or t
  misc_feature (320)..(320): n is a, c, g, or t
  misc_feature (324)..(324): n is a, c, g, or t
  misc_feature (327)..(328): n is a, c, g, or t
  misc_feature (339)..(340): n is a, c, g, or t
  misc_feature (342)..(342): n is a, c, g, or t
  misc_feature (344)..(344): n is a, c, g, or t
  misc_feature (347)..(347): n is a, c, g, or t
  misc_feature (351)..(351): n is a, c, g, or t
  misc_feature (360)..(360): n is a, c, g, or t
  misc_feature (365)..(365): n is a, c, g, or t
  misc_feature (368)..(368): n is a, c, g, or t
  misc_feature (378)..(378): n is a, c, g, or t
  misc_feature (380)..(380): n is a, c, g, or t
  misc_feature (384)..(384): n is a, c, g, or t
  misc_feature (386)..(386): n is a, c, g, or t
  misc_feature (388)..(388): n is a, c, g, or t
  misc_feature (395)..(395): n is a, c, g, or t
  misc_feature (397)..(397): n is a, c, g, or t
  misc_feature (412)..(412): n is a, c, g, or t
  misc_feature (424)..(425): n is a, c, g, or t
  misc_feature (429)..(431): n is a, c, g, or t
  misc_feature (434)..(434): n is a, c, g, or t
  misc_feature (442)..(442): n is a, c, g, or t
  misc_feature (444)..(444): n is a, c, g, or t
  misc_feature (452)..(452): n is a, c, g, or t
  misc_feature (454)..(454): n is a, c, g, or t
  misc_feature (461)..(461): n is a, c, g, or t
  misc_feature (465)..(465): n is a, c, g, or t
  misc_feature (469)..(470): n is a, c, g, or t
  misc_feature (499)..(499): n is a, c, g, or t
  misc_feature (501)..(501): n is a, c, g, or t
  Probeset Number=SeqID_12149
nttttttttttttttnttanngccncnanaaaaaaaaagaanatttttttttttnggnggggngggnnncntnttgggannccnttttntnttgttanaanggggggggggggggngngnntaaaaaaaaaaananccnngggggggnggcnccccntntaaaanaccnacgnaagaaattntttggggggananaagnggggggttttttaannggggaaaatttttttttttnntcnnccncccccnnanttttgttngngttttttggggggggggcnccntttgnnnaaanaaaanggngtggngccccccaaatnttanatnnccgggggaccnnantnttntccncccaaaaanatttnccnaaaaaatttncnaggnantntgggggngngtcccaaaaggaaantgggaaaatccnnggtnnnaanttccaagntncccttttntntttgggngccnccanngccccaattttgttggggggatgggttancncctcccattgtgttttgtcccttgaactttaactcctgtttgaaattggcttacagatatactactcaagaaacattggctgtacccttgagaaatgaggatagagaagagaactacgcttagaatcttgacagttgaatcatccatttcagacaagacaaatataaactttgattcttaaatttt

SEQ ID NO: 2371 - DNA, 375 bp, Glycine max
  Peptide Sequence Number=SeqID_6060
  Probeset Number=SeqID_12150
gatcggaagaagaatatatttaagctttcacaaggagaatatgttgctgttgaaaacctggagaatatttatgttcaagcttcttctgttgaatctatatgggtctatggaaacagttttgagtcatacctcgttgctattgtcaaccccagcaagcaagcacttgataagtgggcagaagacaatgatataaccgcggacttcaattctctctgtgaagattctaggacaacaacgtacatacttgcacccctccgccggatggccgaggttaccacgcccaccgggcctcattttattaaagctgttcttcttcacccactcccattcgacatggaacgcgcccttctcaccccaccttcgaaacgccccgac

SEQ ID NO: 2372 - DNA, 614 bp, Glycine max
  Peptide Sequence Number=SeqID_6061
  Probeset Number=SeqID_12151
atgaagaagttgttctaccatggtgtgcgatgtgctatccggaaccagggaggttgcaggaattgtgtcttcatgtggagacttctgctcactcactcaaaacagtgtgatcacggggactgctcagttcccagatgcagagatctgaaggtattcatgggcaaggccaaaatggttactgctggaccctgttgtgccatggaatgctagcggatcagaaattaaccccctaggttttctcgagcagaagatttgttgatgaaaatgcaataaatttgttgttggctaaccggattgcaagttgcgaaataaataaaacggcgacctggtggcgacggcagcagcagcagagttatttgtttcgccggttttcctgaaacttgtgggaagaaggcggaggcttacatagacagacatcctgacaaatgtagtggtgtaggtgcaatacctgtatatgtttcctgcaggccatagatgatggatcgacaggatataggattattttgtttcttatttattttacccccctctcccccttgaccccattgagttgaacaaggccgcagttttgctcagccctgttaatccaggtccagttaatgtgtatattaact

SEQ ID NO: 2373 - DNA, 2009 bp, Glycine max
  misc_feature (1985)..(2009): n is a, c, g, or t
  Peptide Sequence Number=SeqID_6062
  Probeset Number=SeqID_12152
ccttcactctcttctccgatctcaaaatgcccgccgtttatggagctcgcttgaccaccttcgaagactccgagaaggagagtgaatacggttacgttcgcaaggtatcaggaccagtcgtcgttgcagatggcatggctggggctgctatgtatgaactcgtgcgtgttggtcatgataatctcattggtgaaattattcgtctcgaagggaattctgctaccatcaatgttcatgaggaaactgctggcttgatggcttttgatccgaggttacggactcccaagcctttatccgtggagtttgggaccctggaatactaggggaattttttgaaaagctctttcaccaactcaaaagcctgattctaccaccacagaacagatgggaaatgagcctaaggtggatgaagaagatagaatactcaatgaaatggaggaattgacttatgtaatggaccgcaagaagaaacgtgcaaagaagcttcttgcaaaaagaagagccaaggacaaggcacgaaaagcaacagggatgcaaatggatgcaatagatgatggttatgtagatcaggagttgtttgctctttcctctatcaagggtaagaaggatctggtagctgttgacaacactgagtatgaaggtgatgaaggagaactagaagacagtgagaatgaagaaacccatgaaagcccagagcattcatccggtgacttagaagattctgatgaggaacgtaaaagatacaacgaacaaatggaagatttaatggataaagcttatgagcggtttgtgatcagaaaggaaggaagtgcaaaacagaggaagcgaattaaaaaatcttatgatgcaaaggaccaacttttggagggtggtgaggatgatgatattgttcaatccaagtatgattcagatgaagatcagggtgatcaagaagcaaatccattaatggtgccacttaatgatggggcagagctcacccaagaggaggtcatgaataagtggtttagtcaggatgtctttgctgaagctgcagaggaaggagactttgagaaggatgagagtaaagatgaaatggatatagatgagcctaaggagaagatatccattgccaaaaaggtcaaagaaaataaaacagcagctccagcagtggtagctcaccctcagcctcaaccatccaaagcaggggatgattttgaaatagttcctgcacccgatactgattcaagtgatgattcttcctctgatgaatgggaagaagatattgaagccaaagctgagatattggcttatgctaagaagatgatgaggaaaaagcaacgggagcacttactggatgatgcatacaacaagtacatgtttgatgacgaaggattgcccaagtggtttctagatgaggagaggagacatcgccaaccaataaagcctattaccaaagaggaaattgctgcgatgaaagcacagtttaaagaaattgatgctcgacctgcgaagaaggtggcagaggccaaagcacggaagaagcgtgttgcaatgaggaaacttgagaaggtacggaagaaggccaatgccatatcagatcagacagagatatctgatcgttcgaagaggaagcaaattgaacaactatataaaagggctgttcctaagaggcctaaaggaatatgtattggccaagtattgattccatctaagggctggcaaggttgatttcgtcccgatcgcgttcatcctctggtatgctattaggcattcttctttaaggacatatgtcctcccatatccaaaaataatggtagcggtggtagtggttgttgtttgtattttgtaagcatatacgtgttgttggtaagtgtgataattctgccattgatatggtgattttttttcccccacactcaacgcctagtttgttgtatagctaatagaaattcctattcgtttatttttcctgaggattttatactttttattgcccgtggtttcannnnnnnnnnnnnnnnnnnnnnnnn

SEQ ID NO: 2374 - DNA, 2209 bp, Glycine max
  misc_feature (92)..(92): n is a, c, g, or t
  misc_feature (127)..(127): n is a, c, g, or t
  misc_feature (191)..(191): n is a, c, g, or t
  misc_feature (203)..(203): n is a, c, g, or t
  misc_feature (213)..(213): n is a, c, g, or t
  misc_feature (276)..(276): n is a, c, g, or t
  misc_feature (523)..(523): n is a, c, g, or t
  misc_feature (623)..(623): n is a, c, g, or t
  misc_feature (635)..(635): n is a, c, g, or t
  misc_feature (715)..(715): n is a, c, g, or t
  misc_feature (762)..(762): n is a, c, g, or t
  misc_feature (764)..(764): n is a, c, g, or t
  misc_feature (783)..(783): n is a, c, g, or t
  misc_feature (786)..(786): n is a, c, g, or t
  misc_feature (807)..(807): n is a, c, g, or t
  misc_feature (849)..(849): n is a, c, g, or t
  misc_feature (901)..(901): n is a, c, g, or t
  misc_feature (1034)..(1034): n is a, c, g, or t
  misc_feature (1053)..(1053): n is a, c, g, or t
  misc_feature (1058)..(1058): n is a, c, g, or t
  misc_feature (1117)..(1117): n is a, c, g, or t
  misc_feature (1124)..(1124): n is a, c, g, or t
  misc_feature (1195)..(1195): n is a, c, g, or t
  misc_feature (1310)..(1310): n is a, c, g, or t
  misc_feature (1338)..(1338): n is a, c, g, or t
  misc_feature (1342)..(1342): n is a, c, g, or t
  misc_feature (1353)..(1353): n is a, c, g, or t
  misc_feature (1389)..(1389): n is a, c, g, or t
  misc_feature (1406)..(1406): n is a, c, g, or t
  misc_feature (1422)..(1422): n is a, c, g, or t
  misc_feature (1431)..(1431): n is a, c, g, or t
  misc_feature (1688)..(1688): n is a, c, g, or t
  misc_feature (1774)..(1774): n is a, c, g, or t
  misc_feature (1823)..(1823): n is a, c, g, or t
  misc_feature (1914)..(1914): n is a, c, g, or t
  misc_feature (1931)..(1931): n is a, c, g, or t
  misc_feature (1974)..(1974): n is a, c, g, or t
  misc_feature (1977)..(1977): n is a, c, g, or t
  misc_feature (2038)..(2038): n is a, c, g, or t
  misc_feature (2056)..(2056): n is a, c, g, or t
  misc_feature (2061)..(2061): n is a, c, g, or t
  misc_feature (2072)..(2072): n is a, c, g, or t
  misc_feature (2108)..(2109): n is a, c, g, or t
  misc_feature (2113)..(2113): n is a, c, g, or t
  misc_feature (2152)..(2152): n is a, c, g, or t
  misc_feature (2154)..(2154): n is a, c, g, or t
  misc_feature (2157)..(2157): n is a, c, g, or t
  Peptide Sequence Number=SeqID_6063
  Probeset Number=SeqID_12153
cgacacactccaacaccactccctcttcactcgcacacagcccgcagcgctgtacaagagtatagtaaaatacgacagcgatgttgacagtngcggtcacggtagctacgcgctggtggataggctncgcatctcgtccgtgctttgtgatggcgtctaggtagtttattatatcatatattatgatagangcatctctctcntcagtgtagncatagatatgatgtatatatgcgtcgcctcaacgcgcacacacgctagctattattataatcnacctagtcattgtcatatcttattatctgtacgatcattctaccagcacgcgcctgtgtaataatatatgtctcgatatacatactcacgcaacgaacatctctatatgttcaacctctggcgactctgcgcatttatcttctctcagtcatagacccgccgacgacacagactctagtctgctgcttagtatgtagctgatgatgtatagtaatatgcgcgatgtccacgtctaacctctcaccancaccacgtgagctctgtcgctgtgctgatggtatgacatactccgatctatatatactatctagtcatcacagcatactatgcagacgcactgcagtccngctatcgcctcnacgcgcataaacacgaatcgagtgtatgacgatcgatacttagcatatagatatctgtcgcacctgtccgacgactgcanactacgcggcaccaatcagacctcatatcgtatcacacatatgtcantntgtatcatctgctcatcgntcnatatatctcagcacacgtaanctactagagcatctgcgccaccgctatatgtgaggttgctanatctgtatctattataaacgacaagaagcacgccgctgacgcacgcgccgtnaccttatccagctatcaccgttacacatcgccgtcagtgtgtctgcctcacactcctagacacgacgcgcgcgtaaccatatatgtatcaatgcaacacggtatgtaatgtgtcttgtgcatgaatggcgtcngagatccacgatgcataanacccncctcagttatgattatgttatgtctcctcgtccgcgctctcgtgttgtgtctctgtctnacccccntgcatatatcagcgcgctcacgctctctctgttctactcttcagcccatccctctctcaccgccgcttagntattctgactctctcttcaatgatcgccgcacaactcaggcgtcacacctcgcattgttgtgctgcatgatatctgcactcccgacaacctgtgatagtattttttatctgtatnatcacttgtgattgtgatcgcagtgaantcgncaacgcagtgntacgtgagctgacgtaccacgtacgttcgtacttantgtacgacgcgtgtctntccactacagcactantgcagcgantcttatacataattgatggacgcgacagatataatcgtctctgcattactatctcatattactatgtgtgtcgctgacttcttgcctactccatctgatacgttcgtcgtccgacttactatgttatatatacgtatcgacgcacgcatccgcgcatgattactgatgtactgatacagcgtatcgtgtatacagcgcactacgatactcacgtagagacgcactacgcacgtcacgccgccacgctatctattatnatgatgatacatgatcgatcagactacgcttcactcaacatatgacagtgacggcagtgcagtgtacactcatctcacgcgatcanctcccgaacatagtatacatcagcacacgtgactgactgctaatcgaanatgactcgtataggtcgtcaatgagtcagctatgcgacacatagcatgatagctagatgatgtagagtcgactgcattactatcaatgtgncatagtgtatctatgcntactctcgtacgctctcgtatctcacagcgcgaactgattatntanatatatgctagtcgtcacatcagctgtcacgctatcagtcgtgctgctgaacgtgatgagntactacttacgagatgtntacantcatgaaccgnccctcacatgcagactgacctcagtttcaatgacanntatngtgctactacgacgattacatcagctacattagcgtcancnacntacagccactcacgtattagctgctgacgctcattattctgactgtacgtgc

SEQ ID NO: 2375 - DNA, 1876 bp, Glycine max
  Probeset Number=SeqID_12154
agtgccatacttgagggccctcgccgttcttcacatagctccttcgctcttgctccaggaaacctcgcagtgcctcgcagagatggccaaggatttcaggctgttcgctgccctgcgaattatttcagtgttcctggttcagactgcatatgttcccgatgaatattggcaaagtttggaagtggcacactatttatcatttgggtatgggtacttgacatgggaatggcaagaagggattcgtagctacctgtaccctctggtattcacaggactatacaagtttctgtctttgattggttttgacaatgtcaatgttcttgttcttggtcctcgaatcatccaagctttgatcactgcgtatgctgatacgtgtgtcctgtcatggatacgaaatcctctttatgggcgttcaccatgggccaaaattactattgttacatcctggtatttgttctacgttggatcacgaactctctcaaacacaattgaagccgatcttattggtattgcactttctaaatatccttggccttcaggaaagaccccaggaagcagcagctatcttatttggggtgctttagcttgcattgtgcgaccaactgcagctgtaattttgttgccactgtttctgacccatattatggcgagctcagaacggctttcagtcattgtgaagagtttgatcactgcatcccttgctgctgcacttgtgtttgctactgatacctatgtatcaaagagttcaacattcagtccaatcaatttcttgactgctaatattctacggaatgtggctagcttttatggtgaacatccaggcttttggtaccttacaaatggtattcccatgcttttaggagcgcagcttttgcccttcatgtatgaggtctacaaaatcatacgtggaccaacccgtaatagttatgacatcctcatgatggttgtattttggaacaccattctgctgtacagttttcagccccacaaagaaactcggttcctgctgcccctcctgcccatagctctgttttggtctgctggaggattaagtcgctttgagaaaagttctgtgaaagaaaattggggaagagcccaaaagattgtgagccgactgtcaagctaccttccatggttgcttctagtatcagctgttgtgccatctctgtactttggcctagtgcaccagaggggaactctggatgtcatgccatggctagcaaatcgtgccaaatcttgcccccaacaaactaaaattctgttcctcatgccttgccactcaactcctttgtatagtcacttacacaccaatgtgccaactcgcttcctgacttgtgtacctgatctgcaaagtacacctgaccctgcctatatggatgaagcggaattgttttaccatgatcatatttcttggcttgctaaaaacttcccagagactaaaccaaatctattgttctcgcatattgtccactttgactcacttcaaccaaagttggactcattcctacgttggggtggttactcagaagtggcatcttttttccacactcattttccttctgaacgagttgggacaagagttgttgttcaagaaagagcagcatctatgtcaggttgtgttgcagaatgagtggattaagagttttgatttgcaacaacttactagatttagtgagttctatttttttatgtttgdgggaccatatgactgcctttcatgaagttaaaactgtttttgatcaaatatatatcaaatcagatttgtattgttgttttcatactaatggctagtttgtaggagtgtcatttatgaaagtggctgatggagtgtatagaatattgttttggaaaatgaatgtttgcacctctctgtttt

SEQ ID NO: 2376 - DNA, 664 bp, Glycine max
  misc_feature (394)..(394): n is a, c, g, or t
  misc_feature (423)..(423): n is a, c, g, or t
  misc_feature (498)..(498): n is a, c, g, or t
  misc_feature (503)..(503): n is a, c, g, or t
  misc_feature (596)..(596): n is a, c, g, or t
  misc_feature (601)..(664): n is a, c, g, or t
gctttttttcattctctcgcaaatttcttagcgtcttttccagggacagatttgccatgcgattttaggcgatgcttgttgtctatttatcgatttattgatgtagttggccagagtttgcgcattattggtacttgatcacacatttcagtgattttcaactggcgtgtttgggaagtttctttctacatgaaggtgttttcttcttgtctggacttcccttcatatggcttgagagggcagggtggatgagcaagtacaaaattcaggccaaaaataacacccctgctgctcaggagaaatgtattgttcgcctgttgctttaccattttggtgtcaatctacctgttatggttttttcatatcccgtcttcaaatacatggacatgcagantagttgtcccctaccgtcctagaaagtanttctaatttcaatagtctttgacttcattttagaagactttatattctactagagacatacaatactacgcacanaatangtatacaaacatatacacaatattcatcatgaatatacctcccgccattgatctactgctagatatctgatgctactaaaatacttggccttnatttnnnnnnnnnnnnnnnnnnnnnnnnnnnnnnnnnnnnnnnnnnnnnnnnnnnnnnnnnnnnnnnn

SEQ ID NO: 2377 - DNA, 1394 bp, Glycine max
  misc_feature (49)..(49): n is a, c, g, or t
  misc_feature (76)..(76): n is a, c, g, or t
  misc_feature (100)..(100): n is a, c, g, or t
  misc_feature (119)..(119): n is a, c, g, or t
  misc_feature (123)..(123): n is a, c, g, or t
  misc_feature (164)..(164): n is a, c, g, or t
  misc_feature (173)..(173): n is a, c, g, or t
  misc_feature (223)..(223): n is a, c, g, or t
  misc_feature (288)..(288): n is a, c, g, or t
  misc_feature (442)..(442): n is a, c, g, or t
  misc_feature (474)..(474): n is a, c, g, or t
  misc_feature (494)..(494): n is a, c, g, or t
  misc_feature (509)..(509): n is a, c, g, or t
  misc_feature (574)..(574): n is a, c, g, or t
  misc_feature (1184)..(1184): n is a, c, g, or t
  misc_feature (1220)..(1220): n is a, c, g, or t
  misc_feature (1250)..(1250): n is a, c, g, or t
  misc_feature (1255)..(1255): n is a, c, g, or t
  misc_feature (1290)..(1290): n is a, c, g, or t
  misc_feature (1293)..(1293): n is a, c, g, or t
  misc_feature (1295)..(1296): n is a, c, g, or t
  misc_feature (1298)..(1298): n is a, c, g, or t
  misc_feature (1306)..(1308): n is a, c, g, or t
  misc_feature (1313)..(1313): n is a, c, g, or t
  misc_feature (1348)..(1350): n is a, c, g, or t
  misc_feature (1358)..(1360): n is a, c, g, or t
  misc_feature (1362)..(1365): n is a, c, g, or t
  Peptide Sequence Number=SeqID_6065
  Probeset Number=SeqID_12156
cgtctgcctccgatcgtcctccgctctgtccgcgcgcgcgcttcctctncgtctcgcacgcttcgtcgcgacgctnctacgtccggtgcgacatgtcgcncgactactaatcactgcgnatgnctagatctcacctcgcccgcgacttatcaatgccgcgctanctctcacgntcgcgcgtcgcgttgttctcatacaatcagcgagcggctacgcgctgttnatctctccacgtctggtgaggttactacgtacagcgagcctaaccgcggcgcggcgtcgcttcgnactcgatttcatacgcccgcatagactcagacccgtacgacacatccgcgcctcgtcacgacgcgagcctcgtctctcttctatatacacgctacaccatatcactctcctctcgtactctctccgactctcagcgcgcacggctcacggtctnagtggcgtgtcgacgtccgataggcagctcanttccgcacttacacactgtngtcgcatgatgcctnctctcacgaccatcgtcgatccgcgtcttaccgatccaccctctctaacctcccacaagcacgtngcaagcacgtatagctccggcttggcatcatcatctgctcgcgagccgccccgcaccctaaccattctgcactcgcacccagcgtacctgtgtccgctgccaccgtacgtactatgataatcacgcacatctgcgacgaccaagcagcggtgtattgacgtatctctcttcaatcgtccctgctccgcacgctacttcgctctgttcagagttaccactacgacattcctcgatagcggcgcgaacgaaaacacagcgcctcatcacctcattaggcttaatagtgcctttatttattattctgctcgacacgcccgcatctcactctcagcggcgactacacgtcggcgtgaacagatacgccgcaacacaaatcagctacataccttcttttttatttgtaccatcgcgctactcacaacaactctctgcttcgcgtcgtgcgtcgtggcgggttgcggatcttatcgacacggcgtccaaaatcactctcatacatccgtcgactggtattcgtcagacgcttgtcttcgtctcacacactccgcagagataacattgtttatcgcttggggcttacgtgtgtcctctgttctctcaccgtacacantaataaaaggaaaataatggtcatttatatatatanctaccaccgcgcgcgcattgtacaatcganttttntaaatattccaaaacaaaaagaaaaagccatacanaanannancaaaactnnnagggnacacaacccctccacacacaacaaagcgcgcaaannnagcaagannnannnnccccgccgggcgcacacgaaaaacaaaaa

SEQ ID NO: 2378 - DNA, 1536 bp, Glycine max
  misc_feature (144)..(144): n is a, c, g, or t
  misc_feature (250)..(250): n is a, c, g, or t
  misc_feature (710)..(710): n is a, c, g, or t
  misc_feature (1128)..(1128): n is a, c, g, or t
  misc_feature (1157)..(1157): n is a, c, g, or t
  misc_feature (1229)..(1229): n is a, c, g, or t
  misc_feature (1231)..(1231): n is a, c, g, or t
  misc_feature (1259)..(1259): n is a, c, g, or t
  misc_feature (1290)..(1290): n is a, c, g, or t
  misc_feature (1293)..(1293): n is a, c, g, or t
  misc_feature (1346)..(1346): n is a, c, g, or t
  misc_feature (1401)..(1401): n is a, c, g, or t
  Probeset Number=SeqID_12157
acaccgatattcctcacgtccacactcacgcaggcccacgcattggttgctgggggagtctgtgggcgacactaccaatgatatgcgcgttggcggcttccccctggcgcggcgaggcgagggctggttatcttccaccatganagggggacatcacccggcgcggcggagcgggttctccactgaaccgccagccgacatgcccacccgatggaaggcgcgacgaagaggaacagaacagaaaaggaanaagcgggcgggtgttacgccccccggagagagaaggcgaaagcagacgccccgccagagcgccccgccgtgggcggagcgtcagaagagtgtggggcggaagagagatgaggagcggcggagaaagacagacgcgtaccggcggttaggaggcgtgcggcgcagagggcccgccgcgaatgacccgcgcattagcgctagggccgagatagtcattgccgctggccgctaaggactatcccgcgggcgagacgcggagtggggcgagtcgcccccgatataatcaagataggagatggaacttcccgcgcggccggcgcgcggcgagaataaaacccggtggaaggaggcagatgagccaccgactacgcggctggtgccccaattgatctattctcgctctgatttatcccgcccactgccagagtgggcaccgcgagcagtgaatgcacgacgcagtngcggaagtgcgacgcagccgcgctctgcggggccccgcctattgcagagagcgcgccgactctttcaacgcagccgccccacgcccatttgctcgccgctgggggcgtttgccgcccagcagtatattggatgtagccccgcccgatggcggactacccggtgattatcgcccgaaaaacgagcattgccgagagtggttggccgccgacgaccccgcacggaggaggggccagcggagaatgaataagtctaacgacagtgccccggcgagtgcgcgctagttccgtctatagtcttcgcctcaatcgcaatgcgcggacggtcgcgcagatgtcagtcaacgcatggacgcagtgtagttcagagcaaggcgataccacgaaaggccccccgcgtagtatatatatacccacgccntcatcgtgcatatgaggatgaataatccncacccaccgccacaaatatcgaatgatagagtagagccactcccacgagtaatagctatcacgcaaaagtancncgcacccgcgcgccaccgcgactctgtntcctgagagagtgcagtcgcgagggagagcngcncctcgcccgcgcccgtcgtatctacacgctgattgatgtattgattagtgtcncgcgccgacacgcagacacacacgaatcactgccattgttgacaatgcataagcncaccccagcgcaatgtgtgtctcccaggaaagccacgtgcgcactctgatgatctacctatagctgctgctatcacgcatctcagaattgatatgctccacaatatgcgaacaaccagcagtgtctatgtatgtg

SEQ ID NO: 2379 - DNA, 1629 bp, Glycine max
  misc_feature (20)..(20): n is a, c, g, or t
  misc_feature (22)..(22): n is a, c, g, or t
  misc_feature (25)..(27): n is a, c, g, or t
  misc_feature (30)..(32): n is a, c, g, or t
  misc_feature (34)..(37): n is a, c, g, or t
  misc_feature (40)..(41): n is a, c, g, or t
  misc_feature (51)..(51): n is a, c, g, or t
  misc_feature (64)..(65): n is a, c, g, or t
  misc_feature (106)..(107): n is a, c, g, or t
  misc_feature (135)..(138): n is a, c, g, or t
  misc_feature (145)..(145): n is a, c, g, or t
  misc_feature (207)..(207): n is a, c, g, or t
  misc_feature (237)..(237): n is a, c, g, or t
  misc_feature (289)..(289): n is a, c, g, or t
  misc_feature (293)..(293): n is a, c, g, or t
  misc_feature (295)..(295): n is a, c, g, or t
  misc_feature (474)..(474): n is a, c, g, or t
  misc_feature (805)..(805): n is a, c, g, or t
  misc_feature (865)..(865): n is a, c, g, or t
  misc_feature (963)..(963): n is a, c, g, or t
  misc_feature (1021)..(1021): n is a, c, g, or t
  misc_feature (1137)..(1137): n is a, c, g, or t
  misc_feature (1309)..(1309): n is a, c, g, or t
  misc_feature (1394)..(1394): n is a, c, g, or t
  misc_feature (1474)..(1474): n is a, c, g, or t
  misc_feature (1596)..(1596): n is a, c, g, or t
  misc_feature (1629)..(1629): n is a, c, g, or t
  Peptide Sequence Number=SeqID_6066
  Probeset Number=SeqID_12158
ctggtgtatttttggttgcncnaannngcnnngnnnnttnncggtcatctngaactgccagtcnntattattgcggcgcgcggagaaagagtgagcgtggtagttnnttatggcatgagatcatgtagtggcccnnnnccccccncgcccgcccctcgctacatatagtagataaactagagagacccccccccccctcaagatagnaactaaagatgtgaatctacaacaatagcnatccttcttttctttcatttgtataattgtcattgagcgccgcgcaggaganagananagggtctgactcatcttctcacggagtgatataggtgtgaaggtcgggcgagaagacgcagcgagcgcaacaacgactatcgtagtatacacagaggagagagacatcgagcgcacacgtcaagatcgagcgaaaagcaacacgcataatctagacactaatgcacgacgagtcgcgtntatgtgtgagacaatacatacttatcgatgctcttcagcagtggtgcaccacaagaaaaggtcacgcatatgtgatataatggagatgtagaagaaaatagaggctcacatgtagcgctctcagtcagagcgtgtacgatggtctctcactgtctgttgtgcgtgtgcctctcctttctcaggtcgacgggagacagaggtatatacgctgcacaccagagaacgagatatacaaaagtagagaatagagagtcgcgccctacctacgattgacaagataacgcatctatatacatacgattgatgtcgacgtacaacagaatgaaatgtnacatagacagtcacattctacttatgatcgattgagagggaataacgatatagagaatancgcgcaagtgtcatgatacgacgagaaggactccgcagccacgcctgttagctatatatcacgctgtactaacataccatgcgagtacacgagatctnttgcatactcacgagcgtatatgtgagtgtcgaataagtagggtgagcggatgctcgngtgatgcgatgatgatatatgacatacgccgctatatactttccacataatccacgtcccttataatgatccgatgctgtaatgatatatctcgagtgataatatctactgttatnagtctgtatcgtctagtagaacatagtctgtacgtagatgtggtccatgatcaccaacatattataacatgacaaggtacgctcacatcagctatatagacacgatcaagatagaatatacgccaaaatgaatgagtagcgaacaaccatcactactgtgacgcgctattcntcgtatcgtgtatatctgtcatccttctgcaaacagacggatactcctgtgcaaacaccacataactcaaggatatattgacatntatttaatgtactatagatacgaggatatgcgtacgaagatacgaggaaaaatatacatgacgagtgtagtaatgacgtncatataaacagcgagcaggatggatcataaaacacaactcatcgagctatcgcacacacaagatacacgcagcgcgaactgacattcacgagaagatgatgacagcgacgcgtcgttgcatnatacagtctcgcacgactcctcgtctaccacgn

SEQ ID NO: 2380 - DNA, 533 bp, Glycine max
  Probeset Number=SeqID_12159
actagtcagttttactgagtctctgttagcttcttcttcttctagatctgatcgcgattttcgccggaagaggtcttgttatatctatgggtcgtggaaacagctgtggtggaggtcaaagctcactcaattatctctttggtggtggtggtgatgctcctcctcctaagcccgctccagctccagctccagctccttctgctgagccaaccaaggctactgcacctgcacctgcacctgtagctgtgactgcaactgctctcaccaccgctactaccagcgttgagcctgcagaggtcaacaagcagatctctgctggtatcaaaactcctgttaacaactatgctcgagctgaaggacagaacaccggaaacttcctcactgaccgtccttcgaccaaagtccatgcagctcctggaggtggatcatccttggattatcttttcactggtggcaagtaaagtataataaaaacattatgtgtaatgcaaatgcgtatccattgtctccttgttgcattcgcacactataaa

SEQ ID NO: 2381 - DNA, 606 bp, Glycine max
  Peptide Sequence Number=SeqID_6067
  Probeset Number=SeqID_12160
agtgaaggagtcagcagtccagtccccccctgctgccggaagatatggcgatcgcgctcagattcgccgccaccccgccccgcctcgccgcgccgatacctccgacgagtgcccctcgcgcacatggaggagttgtgcgcgtcggcgcccagggcgggactcgctgtggcaggagactggcaatggcggccgcggattccgctcgctgtcgggccaagagagagggcgacggcgacggcgtcctcgcgggagtcgccgtccacggaggaaccggagcggaaggggaagatcagctgagcgtggtaatgaagttcggtggttcgtccgtgtcgtcggcggcgaagatgaaggaggtggcggggctcatccaagctttccccgaggagcggcccgtcgtcgtcctctccgccatggggaagaccaccaatctactcctcctcgtacgactgctttctggtcattttttcagacttacagccaaaaaaagttgtaaggctcactgtttcagtacatcaagaatcttcagtcacggaagtgttagttaaagtgaagtttgcatcttttgtcataatcaagctgaaattcgtcaagaatctgtcaagattc

SEQ ID NO: 2382 - DNA, 2024 bp, Glycine max
  misc_feature (49)..(49): n is a, c, g, or t
  misc_feature (74)..(75): n is a, c, g, or t
  misc_feature (138)..(138): n is a, c, g, or t
  misc_feature (184)..(184): n is a, c, g, or t
  misc_feature (232)..(232): n is a, c, g, or t
  misc_feature (253)..(253): n is a, c, g, or t
  misc_feature (294)..(294): n is a, c, g, or t
  misc_feature (464)..(464): n is a, c, g, or t
  misc_feature (502)..(502): n is a, c, g, or t
  misc_feature (757)..(757): n is a, c, g, or t
  misc_feature (860)..(860): n is a, c, g, or t
  misc_feature (971)..(971): n is a, c, g, or t
  misc_feature (1081)..(1081): n is a, c, g, or t
  misc_feature (1099)..(1099): n is a, c, g, or t
  misc_feature (1170)..(1170): n is a, c, g, or t
  misc_feature (1174)..(1174): n is a, c, g, or t
  misc_feature (1208)..(1208): n is a, c, g, or t
  misc_feature (1275)..(1275): n is a, c, g, or t
  misc_feature (1280)..(1280): n is a, c, g, or t
  misc_feature (1296)..(1296): n is a, c, g, or t
  misc_feature (1310)..(1310): n is a, c, g, or t
  misc_feature (1312)..(1312): n is a, c, g, or t
  misc_feature (1316)..(1316): n is a, c, g, or t
  misc_feature (1343)..(1343): n is a, c, g, or t
  misc_feature (1369)..(1369): n is a, c, g, or t
  misc_feature (1374)..(1374): n is a, c, g, or t
  misc_feature (1390)..(1390): n is a, c, g, or t
  misc_feature (1423)..(1423): n is a, c, g, or t
  misc_feature (1478)..(1478): n is a, c, g, or t
  misc_feature (1506)..(1506): n is a, c, g, or t
  misc_feature (1525)..(1525): n is a, c, g, or t
  misc_feature (1562)..(1562): n is a, c, g, or t
  misc_feature (1579)..(1579): n is a, c, g, or t
  misc_feature (1581)..(1581): n is a, c, g, or t
  misc_feature (1610)..(1610): n is a, c, g, or t
  misc_feature (1714)..(1714): n is a, c, g, or t
  misc_feature (1724)..(1724): n is a, c, g, or t
  misc_feature (1727)..(1727): n is a, c, g, or t
  misc_feature (1733)..(1733): n is a, c, g, or t
  misc_feature (1782)..(1782): n is a, c, g, or t
  misc_feature (1792)..(1792): n is a, c, g, or t
  misc_feature (1841)..(1841): n is a, c, g, or t
  misc_feature (1907)..(1907): n is a, c, g, or t
  misc_feature (1940)..(1940): n is a, c, g, or t
  misc_feature (1989)..(1989): n is a, c, g, or t
  misc_feature (2024)..(2024): n is a, c, g, or t
  Peptide Sequence Number=SeqID_6068
  Probeset Number=SeqID_12161
ctccacacatccccctcccctctctcccttcgcgcaggcgagcagcggntcatgtgaagtaatatccaattaanntgcctaatttatgtgggaggtggtggagtctcacgcggctctcgacgtgtatccgtgaggcgngagttagagcgggtgtccctcctctgtccttcattctagggtattntatatctgttctctgaaggacacgcagtgacgtggaagacattctctntaggagaaagggtactgtggncaccaacctacagagtaagcacgagatgtattagagctgtncggagaatatcgttattaaatagtaatgtgtacgctcacggtttggtacatagggagcattggagagacgagaagatagctactgtatataaatgcgcgggccgcgattgagcgtgacgtgtgaggacaggtcagagcgcgcccgagcggagaggacgtagctagtgagnatacagtgaggtgagagtacagttagacttagatgtcngacatcaatcattattgagcatcacacgctctcggagagtgtgcaatatagagaggactgtatagactaggggcgctaatatgagcgtcttaacgctgctgtacttgctcttgcatcgtgatactctacaatcgaatgatacagtaatacgtaatagaatcatagaagggagatgataatatatgctatactattgctcgggcgacagagtaggaacgtgacggtgatcctcttggacaattagcgtcaatggangaaagaaacactatattggagatgactagttgatacatcacggatagtatatcgatatctgggtgtatcatagagtatgttctctgcgagccacccactctantacgattacgggacaatctatcatagctctgggtatgatgagaatgacactcatgatacatgatatgtctcatatattggactctctctatgacatggatagatagtcgtngtgtgaccgtgtgcgagtctatagtgagtgggagagctatgcgggaacagaatgattacgggcgacagggtgtgcggtcagcatagcagatactatttagatgtcgtcgncatgtcgtagaatacgtncgacgcacgttgtctatgccatggtagaccggtgtaataataggatatgatagagatgtatcacatgcatntatnatcatgtcgatgagacgaagctctcagatgtggngtatacatcgagtcggatgatagtcatacgctgatagagtacgagcggagcgccatcgctatgcggnagtgnagccgtagacagcgtntgagtcgagttctntncgantgcatgcgactgattgagcatacacantacgtatcgatcatctcatgtgatantgtgncgtgtacgagttgatntcgactgagatacaacgctcgacgagagcatgntgaatcgctctatctcgactgcaaataagacgatgtacacgctatagatgcacanataggagatcactgcgctcgtcggtgcngcgtgtcgtggctgtcgancgacagtgtagagcagcgagtctgatcgtacgcttgntggttacggacgcgtcntnctcgacgcatcagctcgagcgatgtagantgacgcatgatggtagtgacatgacgatcacccaatgcgacaccatatatgctgctagtgagagtcgacgtgatagtgatcgtgactgtcgactatactaacantcgcagaagncancttgtntagtgaacagtacgcagatgagtaagatgatgagatgatatacgtcgangaacgtaggnatggtgatacatagtcatagtgcagatgaggcggatacgcaccatgctnccgtgagtgatgtgagcaggaccatcgtgatgagatcggctgagaagtaagtaaagctgatctacnagatgatccgccgcacatgcgcaagactgcatngctgtaagactgaaactaagatcggtactgaagataggacagacatctngctgactgctagcaatctactagtcgtcgcgaagn

SEQ ID NO: 2383 - DNA, 1562 bp, Glycine max
  misc_feature (18)..(20): n is a, c, g, or t
  misc_feature (22)..(23): n is a, c, g, or t
  misc_feature (25)..(25): n is a, c, g, or t
  misc_feature (30)..(31): n is a, c, g, or t
  misc_feature (33)..(34): n is a, c, g, or t
  misc_feature (77)..(77): n is a, c, g, or t
  misc_feature (93)..(93): n is a, c, g, or t
  misc_feature (169)..(169): n is a, c, g, or t
  misc_feature (193)..(193): n is a, c, g, or t
  misc_feature (287)..(287): n is a, c, g, or t
  misc_feature (289)..(289): n is a, c, g, or t
  misc_feature (363)..(363): n is a, c, g, or t
  misc_feature (1562)..(1562): n is a, c, g, or t
  Probeset Number=SeqID_12162
tgtgtggtggtggggggnnncnncnccccnncnncccccctgtcactcgcttccgcgccccctctccatgaataccncccccacgccacaacnagagaaacactgtgattgcggggaggctgtgtatcatcacttcataaaaacacacaaaaccgctatgtccgcatgntggtgtggaagcgccacagcgcanggtcgaggcgacggtgtgtggcacgccaccagttgcgctttggtgcatgcaaccacaactatctcagctactttctgcttcatataggagtacnanatataaaataacacatcaccatcgcttttggtactctcccccgcccgtcattatggtaaggagcgcgcagcctncttgcgtcagcctacatagaataacacacaagacaataatgtaatatctaatattacaacactattcgagtatttcatgtatgctgaaatatgcgatcccataccagtacggacaggcaaacgtatgggtgtgcgagatgcgacgcgctcgctggacggtctcgtgtcgacgcggagatttggcaatgtctggtgtgtatacctcaatctatatgtatagtaaataattggctagtggtgtgtcgcgtggctctgtcctctcgtcctcggccgctcgtgcgcaggccgcctggcgagtgagtgtgcggcgcctacgtcggcgcgctgccgcgttgatagaagaagaaaggtattatagacttcgtaccatgagcttatcattatttctgtctattctatatcatatactcattttctcaacgaccgactcagctgatcattaactggaaagaggatactacacgcgcgcctctcttgtacagtgatatgatggagatgctacgtcgagatatgactgtcgcatccattacgcgatgctcgtcgtatgtgcgttcgatcgctatactttctgctagtgccaattgtgagctgtgcctctactcgatacacacaccgccgcatcaccactcatactctactccacgtgcattgcatctcagcctctcgcactatatgcacaccagacctcgactgctcgagacgtactctacagacactgacacgatgtgcacaaccgatcagatcatcagtaaagctcgacagcactagactacatagcagactattacattgcgacttgaggcgcaccatccctcaacgcacgcgcgggctgactgaccgagcatacaagtcgggcgccgataggatactgtcacatccgacacacctcacgtcgtctactctcctcctcgggcgtcgtactgcagctcgcgactgagacactccacggtcccgcagcgcatgcgatcgtaatagcgagcgataaagtcaacgtacgaatgtataacatcgctatatagacagaacagcatgccatataaatctcgaatgatatacagaacaagagcacaatagacaaccagtgatctaaatagagtgctactcgtacatcgcatatatttctgcggagcgcgacgtatcgccgtgaattatatgggacagagtacgcgtaaggtagaacagcgcgacgaagtaaatan

SEQ ID NO: 2384 - DNA, 547 bp, Glycine max
  Peptide Sequence Number=SeqID_6069
  Probeset Number=SeqID_12163
caatgctacatatgctagtgttgattgatgacatctacaaatatgttaaagatgttgtggaggggctagttgccccagccaccataatcgggagttgttatatcaactgctgtgggttcccttccccaagtgtccccctccgtttttgataagcttgtgaatgacagttggccggatcccttgcttttggctgtatttatctagtattccaagaacgcagcttagcttggcttaaaaattgtacccagccgctcagattctgtgatttttccgcttgtgttatcgccgaagaccaatttttgtgagagagtttccctttcttgtcatatttccagaaacgtggaaggtcattgttttatacctcccctttctactttgcttatttttttgtggtttgtgctggtttgcaataggtgagttcccttattcccccagccacccagtgtagggctcccctgttaatttaatctttatttgaaagaaaatgagccaaagcttttccttttcaaagaaaaaaaaaaaaaaaaaaaaaaaaaaaaacaacccc

SEQ ID NO: 2385 - DNA, 674 bp, Glycine max
  misc_feature (1)..(1): n is a, c, g, or t
  Peptide Sequence Number=SeqID_6070
  Probeset Number=SeqID_12164
ngatatatagagaaggtggatctactgtcaaataaatgtggattagatggaggttttatgtacaaggaagatcctggcatgaatgcagctttgaaaaggctctttccagaaggcattgaggtgtaattgatgaatgttgggggcaagacgctggcaaccgtcctcctgaacatgagagtccgtggtggcatagccgtctgaggaatgatctcgcagtataatctcactctacttgaaggcgtcacaaatttgtcacagatcagatataagtggattattatgcaagtctttagcttcatggatttcgctcgcatatatctcaagttcttggagtttttcctgacaaatatcagagaggggaaggtagtgtatgtggaagacatatgtgagggacatgagaatggcccttcaacattggttgacctttgtagcggtcgcaatgcgggaaaacaagtgctcgtcgtttctcatgagtaaaaagcatgtgattatcgtgttcaatgggaagtcatcagtaatatttctggtttttttgctgaaaaattggcggtcaagacatcgccttggcagtcactttcctcacccgtatgacgatgctatgagttcgcgatagtctcgagagcagtatcaaatctaatgcacagttgatctcagaataaaagcaaagctaatca

SEQ ID NO: 2386 - DNA, 1407 bp, Glycine max
  misc_feature (1407)..(1407): n is a, c, g, or t
  Peptide Sequence Number=SeqID_6071
  Probeset Number=SeqID_12165
cttttcctctgctattgaaagtagtgatacgatgtctgttaattctggcgaaagacgtgaagattgggccggagattcgaagaacggtccaggagacaagaaaccagtatatgatggcgtctcaagcatggatccagatggcctcatcgattccaactgggaagaggttgttgataactttgatgatatgaatttgaaagaacaactgttaagaggaatttacgcctatggttttgaaaagccatcagctattcagcaacgggctattataccctgtattagaggccacgatgtcatcgctcaagctcagtcaggtacggggaagacagctaccttctctatatcaattctccagcaaatagacacaagttctcgagaatgtcaagctcttattttggccccaacacgagaattggctcaacagattcagaaagttgtaattgcattaggtgattttatgcaagcaaattgccatgcttgcattggtggcacgaatgtcagagaagatatgaggaaattagaatctggagtccatgttgttgttgggacacctggtcgagtatacgatatgatcaaccgaagatctctccgaactagcagcataaaaatcttcgtattggatgaagctgatgaaatgctttcaagaggtttcaaggatcaaattcatgatgtattcaaaacacttaaacctgaagtacaggtcattctgctctcagccactatgcctactgaagttcacgatgtcagtaaatgtttcatgagaaatccaatcaagattcttgtgaagaaagaagaactaactttagaaggtatcaaacagttttttgtttttgttgaaaaagaagactggaaattggagacgctttgtgacctgtatgacacactaagtatcacacaagctgttatcttctgcaatacaaggcgtaaggtggattggctgactgatagcatgcagaccaaagacttcactgtgtctgccatgcatggtgatatggagcaaagagagcgagatctcatcatgagacaattccggactggatctagcagagttctaatcactactgatttgctggcacgaggtattgatgttcaacaggtctcattggtcatcaattatgacttgccttcaaatcgtgaaaactatatccatagaattggtcgaggtgggcgatttggacgtaaaggtgttgcaatcaactttgtcactgaaaatgacaaacgtgtactgagtgatattgaacatttttataatacaactatacatgaaatgccaatgaatgttgctgacctgatctagtgattctgagccgaaatatggactttctgaccgtacatccttgaggaagatattttggaaataaagatcaaaattttccaaattgaagctcagcaaaaaaaaaaaaaaan

SEQ ID NO: 2387 - DNA, 1740 bp, Glycine max
  misc_feature (20)..(23): n is a, c, g, or t
  misc_feature (25)..(25): n is a, c, g, or t
  misc_feature (27)..(27): n is a, c, g, or t
  misc_feature (34)..(35): n is a, c, g, or t
  misc_feature (38)..(38): n is a, c, g, or t
  misc_feature (59)..(59): n is a, c, g, or t
  misc_feature (64)..(64): n is a, c, g, or t
  misc_feature (174)..(174): n is a, c, g, or t
  misc_feature (188)..(188): n is a, c, g, or t
  misc_feature (280)..(280): n is a, c, g, or t
  misc_feature (379)..(379): n is a, c, g, or t
  misc_feature (397)..(397): n is a, c, g, or t
  misc_feature (726)..(726): n is a, c, g, or t
  misc_feature (736)..(736): n is a, c, g, or t
  misc_feature (757)..(757): n is a, c, g, or t
  misc_feature (776)..(776): n is a, c, g, or t
  misc_feature (824)..(824): n is a, c, g, or t
  misc_feature (852)..(852): n is a, c, g, or t
  misc_feature (906)..(906): n is a, c, g, or t
  misc_feature (974)..(974): n is a, c, g, or t
  misc_feature (1007)..(1007): n is a, c, g, or t
  misc_feature (1142)..(1142): n is a, c, g, or t
  misc_feature (1215)..(1215): n is a, c, g, or t
  misc_feature (1237)..(1237): n is a, c, g, or t
  misc_feature (1306)..(1306): n is a, c, g, or t
  misc_feature (1308)..(1308): n is a, c, g, or t
  misc_feature (1375)..(1375): n is a, c, g, or t
  misc_feature (1377)..(1377): n is a, c, g, or t
  misc_feature (1451)..(1451): n is a, c, g, or t
  misc_feature (1488)..(1488): n is a, c, g, or t
  misc_feature (1516)..(1516): n is a, c, g, or t
  misc_feature (1546)..(1546): n is a, c, g, or t
  misc_feature (1553)..(1553): n is a, c, g, or t
  misc_feature (1583)..(1583): n is a, c, g, or t
  misc_feature (1605)..(1605): n is a, c, g, or t
  misc_feature (1635)..(1635): n is a, c, g, or t
  misc_feature (1647)..(1647): n is a, c, g, or t
  misc_feature (1661)..(1661): n is a, c, g, or t
  misc_feature (1674)..(1674): n is a, c, g, or t
  misc_feature (1701)..(1702): n is a, c, g, or t
  misc_feature (1712)..(1712): n is a, c, g, or t
  Peptide Sequence Number=SeqID_6072
  Probeset Number=SeqID_12166
tggttgggtgtttgtgttgnnnngngnggcgggnntcnacttgtagaaaaacaaacttnttatnttgaaaagattctctgtcgatatgagattcatagttatcgaatgtcacaccacaggaagaaaagaacacacccctctctctctctcctcattctcccacgccctcctccnacctaatatacgcnatagtcacattatattgttgcgattcgtatttatatctactacataatcacatctctctccaaccgatattctatggggatgtacaccactnctcttcgatacacgcactctttgtcggtctatcttagacttgtcggcgagatcgagacgcacgagactgtgactacatccatctctcacctgcatcganctctttcagacatataanattacgactcctgtctggtctctctgcgtctctacttctattcgacagatcgtctctcataataagtagttctatcttcttattccttcctcctcttctctaatctaattatattccagatgtgtatattatatacgtatcgcgagacagcgtaacggagacgaggagctacgataatcataagaaaagaatgtgtaccgacatataaatggatagcatagtatctctcacaaagctatatttctctactcatactagtatcacagagcacttcacctatccacactagtagtacgatacgcgctttgagcatgtcatcacaagtgctnaggtatgtancatagttgacggcgtgatatncgcagcaaggtgatctgantgctcgcagatcgacactcatatagaagacaacagatagatcgataanacctcactaccagacgatatttacacanagagaacattatagatgtacacgaaatgacatgcgcagacatctaataacagtnacgactcgtctacacacgtcgacaagataatgttagagcagtgacagatcttagttagatcatcacantcagtatatatggaacgaactgaatgtatagantagagagaactgaaggagacataggacgcactctcgatatcgatgctaagtagccgctgtagatagacacatctcagtattacggctatcacgtatacatacacaccgcatatctctagtatcagtgagtacgcnaggatcggacggtagattgacatacatcatcgtacgacgttagtacgctgtcgatcgacgacgctacatagtngtcggagagccgagaagcgtcngaccgcggatatataatcgaccactcatatcacacactacacgagcgacgtatcgcagacgtatacgtnangacagctgtagtgtatatcgacacgtacgtacaacatcgtacgacgacgtatagtacatatatacgnantcgcgtataggatcatcgcgatactagattatgtacatgagtagaatgagtgattcgcagcgtacgtctcacgncagttcgtaagtgaatcgacttcgctcagatgactantacacgcgtgctatgaccgcaatcgagncacgctatatctgtgtctacggcgattttnatcacgncatcagtatacgactaccgtaccaagcgtncaaatatgatcatgatagtagnagatactcatactcacatagcacatttcgncgttctgatcanacgcatcatcgctntcatcacatttanagtcgtgatctccgtcacgacgactanntcgtatacgncagatcacgtaggaatcatgatgcgtgt

SEQ ID NO: 2388 - DNA, 1620 bp, Glycine max
  misc_feature (1)..(2): n is a, c, g, or t
  misc_feature (17)..(19): n is a, c, g, or t
  misc_feature (23)..(23): n is a, c, g, or t
  misc_feature (27)..(29): n is a, c, g, or t
  misc_feature (32)..(33): n is a, c, g, or t
  misc_feature (50)..(50): n is a, c, g, or t
  misc_feature (74)..(74): n is a, c, g, or t
  misc_feature (158)..(158): n is a, c, g, or t
  misc_feature (360)..(360): n is a, c, g, or t
  misc_feature (431)..(431): n is a, c, g, or t
  misc_feature (466)..(466): n is a, c, g, or t
  misc_feature (523)..(523): n is a, c, g, or t
  misc_feature (543)..(543): n is a, c, g, or t
  misc_feature (590)..(590): n is a, c, g, or t
  misc_feature (628)..(628): n is a, c, g, or t
  misc_feature (709)..(709): n is a, c, g, or t
  misc_feature (732)..(733): n is a, c, g, or t
  misc_feature (753)..(753): n is a, c, g, or t
  misc_feature (760)..(760): n is a, c, g, or t
  misc_feature (762)..(763): n is a, c, g, or t
  misc_feature (889)..(889): n is a, c, g, or t
  misc_feature (959)..(959): n is a, c, g, or t
  misc_feature (967)..(967): n is a, c, g, or t
  misc_feature (999)..(999): n is a, c, g, or t
  misc_feature (1002)..(1002): n is a, c, g, or t
  misc_feature (1021)..(1021): n is a, c, g, or t
  misc_feature (1095)..(1095): n is a, c, g, or t
  misc_feature (1135)..(1135): n is a, c, g, or t
  misc_feature (1205)..(1205): n is a, c, g, or t
  misc_feature (1244)..(1244): n is a, c, g, or t
  misc_feature (1307)..(1307): n is a, c, g, or t
  misc_feature (1431)..(1431): n is a, c, g, or t
  misc_feature (1476)..(1476): n is a, c, g, or t
  misc_feature (1535)..(1535): n is a, c, g, or t
  misc_feature (1600)..(1600): n is a, c, g, or t
  Probeset Number=SeqID_12167
nngggggtgtgggttcnnntttnttcnnnggnnccggggaacagggcgantttgtaatattcttgtattgttancgcaacaacatccatcctctcgatatatagtcacgatgtgcggggtcgacgacagtgtttacacgcatccccaattgccctcgntaaaacatcgacatacgaaatgccatacagagatgttgggtcatctatcgtgcacgaattctctcgccctatcaccagcgagcactcaaaagctcgcgccgggtatctcttttatgtgagcctaacattgttcctcctccctctccctacacacaaccacttcggctctaactaacaataatattgatataattgcaacganatagatatatacacaatatattgtttataaatcaacgggcgcaaagacggagagcgaatatatgagagatnagtatctatgttatgatattcatttcagtgtcatncgatgttctcgttcgtgatgtaggaagactcgtgtgtaatcatcccaacacggcttncatcgtctcgatacggtcgnaatgtgtggaaatctgactgatgaattcggtgaatattggagtctgnttatcgctatcctcacgaccgaggcgcggtgcgtgctncgctgtgcctcgctgtgggtgcgtgtgatagtatagtaatgacacattgtagtatatatagatgatatataactaattatntataataaattaatatatatatnnggtgcgtgtcaaaaagaccnacacaanannagactgtataataataaacaccgcggcaccgcgccgtctgcctgcctccttcatctccatatctcttctgttcgaaataaatatacaccgactctgcttgttctgtgtcctcgcgacaacaacgantatgggttttctgtgggcgtagtggtgtcctcttgctcctcgccgcttgctgtatatgtgtggatcgatncacattcnccaccccacacacaccacactctatattatanganggggagacgcgatacgacnctatcattaaccttaccattatatgatcacttgtcattacatatgattcactctataccactactgcaccatcntgccatcgctcatacacaacaatggcgcatgtgtacatanatcgctctgcgtgcgttcacacgactcgctgtctcatctcaccaaacgcagcatctgagcgccacctgcntcaaatctcgtcatagctctctgtctgtgtcactctcantatatctcacgcgctataaagatacagctgtcgtggcatcgtacgggcgcgatatctactacngacgaccatctaccgtctgctgttgtctgtgtgtgtctgcttctagctgtcgtgctcaatacatactcaccgactgtgcagagacactatacaactatggcgcgagcagaggtcgtcgattcgngtagccgtccaccagcggtctcatatcacgcggtccttctatttntatatcatcatctctgtctcgatacgtattattgtgttatttatgagctatagtgcagncgctcagagcacaaataacggtcgagtgagtgtgatgtaacgacgacacgctacgctgatccgangccgaccacgcagcacaatg

SEQ ID NO: 2389 - DNA, 417 bp, Glycine max
  Peptide Sequence Number=SeqID_6086
  Probeset Number=SeqID_12168
aaaactactctgccgccgaagccatgccgccgccgcagaaaaagaccaaggtggaggacgaggtgccccgcgcgacggtggccagcgccgtggtgtcgctgaccaactggatgcgcgagcgcgcggcggaggcacccccgaacctgctcgcggacgagcgcgacgacgtcgtggtgctccagctctcgctccgccgcgtcccgcccaagcccaccaccaagccgcacctcctcccgctcccgcaccccgtcgtcgcccactcggccgcctccgtctgcgtcatctccgacgaccgcgccggctccggatcccccgccgccgcccccatccttgacgcggccaggtccctcgagctccccgtctcggaggccatccccttctatgccctgcggaccgactaccgcccctacgagtcgt

SEQ ID NO: 2390 - DNA, 595 bp, Glycine max
  misc_feature (289)..(290): n is a, c, g, or t
  misc_feature (299)..(299): n is a, c, g, or t
  misc_feature (394)..(395): n is a, c, g, or t
  misc_feature (405)..(405): n is a, c, g, or t
  Peptide Sequence Number=SeqID_6087
  Probeset Number=SeqID_12169
ctacgcagatcgcagcaaaccagagattgaactccgacgatgcctcccgtcgctcctcgatccggcgatgccatattcgccaacgtcgaacgcgtcaatgcggagctgtttactttgacgtatggcgcaattgtgcgtcaattgctcacggatctggaagaggttgaggaggttaacgagcagcttgatcaaatgggttacaatattggaactcgattgattgatgagtttttagctaagtctaatgtctcacgatgcaacgatttcagagagactactgatgtaattnngcaagttgnttataaaatgttcccttggcggtactgcatctgtgaacacattgcgatgctgatgcaaacatgtgtaatattgtttttgcagataatccattggnnaaaatttggntgagctttcctgacaactgccaaggtttgtactattgcaacatcttaagtgaagtcatcagaggaaccttaaaatatgtggtcaatgaaaactggaggaaactggccttccgggaagaacctccccgaggataaggttttttgatttgcagggaaaaacttctccaagaatgttcctgaaagaaaatcaa

SEQ ID NO: 2391 - DNA, 525 bp, Glycine max
  Peptide Sequence Number=SeqID_6088
  Probeset Number=SeqID_12170
attggatgccgctttcgggtcattgtctttgtcaaagactctggcatcatcaggttcgttgacctgcagatccacaccgaccccaacatcccttactcagaaacccctagtggctggacggtggtcacatggatcctggaggggctcaatgagggtttggaaacccggggtggtttgagcttccggcaggagcacgaactccgttctagtgatatctccaactacaacttgccccagtctctatttgttaccaaccccattctcagcgcccatgaagatggcttcttgtacctcaggaccaatgtcagtagcagaaccagcagcaactcgagagtgatcactgttgacatcaagcatgggaagctgctggatgtgcaggacttcgatatgcagagacccaacacctacatgcgcaccgccatctccagccatctcatgcccccagtttcaaaggagaatttgaaacgacgagcgacagtgcctcagtgatcctctcggcaagaagccacagcatcagcttgccat

SEQ ID NO: 2392 - DNA, 1512 bp, Glycine max
  misc_feature (38)..(38): n is a, c, g, or t
  misc_feature (41)..(41): n is a, c, g, or t
  misc_feature (43)..(43): n is a, c, g, or t
  misc_feature (71)..(71): n is a, c, g, or t
  misc_feature (99)..(99): n is a, c, g, or t
  misc_feature (275)..(275): n is a, c, g, or t
  misc_feature (349)..(350): n is a, c, g, or t
  misc_feature (770)..(770): n is a, c, g, or t
  misc_feature (793)..(793): n is a, c, g, or t
  misc_feature (858)..(858): n is a, c, g, or t
  misc_feature (960)..(960): n is a, c, g, or t
  misc_feature (1033)..(1033): n is a, c, g, or t
  misc_feature (1035)..(1035): n is a, c, g, or t
  misc_feature (1086)..(1086): n is a, c, g, or t
  misc_feature (1160)..(1160): n is a, c, g, or t
  misc_feature (1283)..(1283): n is a, c, g, or t
  misc_feature (1459)..(1459): n is a, c, g, or t
  Probeset Number=SeqID_12171
gggggggggggggtgtctctcaccgcgcgcggcgcccnccncncttgtttgttcttcccgttccttgtgtngtgttgtgttgttctcgtagaatgcaanacacacaaccaggaaatggggagctgagccggggcgtctacctcacccgtccgtaagatccaagtcttaacgttgtagggtctcccccctctcactcacacagacatcatcttgccgctatacatactctttcctgtctatgcagccgcgtctctttgtgtgctcatagtggccgnacgtgtggtgtccgagacacaacaccatcgatgtcgctgcaccacccacgcgcctaagctatctatctctatgnnccgaagacgatcatatgttggagggaatatgtgtacaacaacaacacgtcgcaactcaaataacagtgtaacacattgtatacgtcaaaaatcacgtgtcgttgcagaaacatggccagtcgacatctagcgtcgcaccatggcttgtcaggacccttatacactctacgacatctacttgttgtgcacattattcttgcagccggtgccaggtaatctccgcagtgatagcctacgtgtattcctcactcatagtcttttctactacctatcttctcgcataccttcggtttctgttggctatcttctcctttggatgaccttactcgttaccagctcgaccacgatggagtcgccacgactataactcaactctttctctctcgtgagactaaccggcagtcgtgcactttttgactnatgtgatgaaataaaataaaaanacaccacatccaatatggccgccccgtgctctggtcacccactccgcaccgtgctggctcaccgnctacgcgacacgcggcgtgtgcgtggataatacaccacgcacactacgctataactaataagtgacgcgctctcgcctaccctatgcagcctcctcgcgagngcgacctctctcttctcgttgtcgccgtccttcttcttaccactacgcttctcattgattctctatccaatgnanctacgggcgtgttcatctatgatacaacacccgcgttgtatctaggtcgantctcgcgctcgtctctctacacgctctctaacacacgagacaagcgatcgacactgatgcatgaacgaggcgcnacccacagggactcgatatacactctccccttgaccacagagacgagacgaggctcctcattcacaatatcatagagcgcttctataaacctattctctcgcgccgcgcgcgcacaccgacanactcttacgctactctggcactcgccgcccgcgctctatctttatattaacttcaaccgttcacgcggacacacgtcaacaatagaggactatcgcctctctgcatctcacaacgtgctatatctcattctactcttaccaaatacttattcatctatgaggcctcatacattacnaacacaagtcgctattctcttcgtcctgattcttcgttctctctcgccacgcg

SEQ ID NO: 2393 - DNA, 1907 bp, Glycine max
  misc_feature (1)..(1): n is a, c, g, or t
  misc_feature (19)..(19): n is a, c, g, or t
  misc_feature (63)..(63): n is a, c, g, or t
  misc_feature (69)..(70): n is a, c, g, or t
  misc_feature (124)..(124): n is a, c, g, or t
  misc_feature (138)..(138): n is a, c, g, or t
  misc_feature (167)..(167): n is a, c, g, or t
  misc_feature (186)..(186): n is a, c, g, or t
  misc_feature (196)..(196): n is a, c, g, or t
  misc_feature (209)..(209): n is a, c, g, or t
  misc_feature (228)..(228): n is a, c, g, or t
  misc_feature (230)..(230): n is a, c, g, or t
  misc_feature (236)..(236): n is a, c, g, or t
  misc_feature (321)..(321): n is a, c, g, or t
  misc_feature (348)..(348): n is a, c, g, or t
  misc_feature (374)..(374): n is a, c, g, or t
  misc_feature (388)..(388): n is a, c, g, or t
  misc_feature (508)..(508): n is a, c, g, or t
  misc_feature (556)..(556): n is a, c, g, or t
  misc_feature (562)..(562): n is a, c, g, or t
  misc_feature (576)..(576): n is a, c, g, or t
  misc_feature (604)..(604): n is a, c, g, or t
  misc_feature (606)..(606): n is a, c, g, or t
  misc_feature (677)..(677): n is a, c, g, or t
  misc_feature (681)..(681): n is a, c, g, or t
  misc_feature (908)..(908): n is a, c, g, or t
  misc_feature (1413)..(1413): n is a, c, g, or t
  Peptide Sequence Number=SeqID_6089
  Probeset Number=SeqID_12172
ncacttcgctcgtcaccantttctctacttcactgaccagttctcttaaactcctcttccacncggctnntcctctccatctgcttcatcgccgctacgtcgtcggcgcatgcatagatcatcnaacgtcgggtcacnccatatcgcgagcatcctcgacatatcanctcatagtcgtggctgcgnttcgagcgangcctacatcacgnttcacgtctcattctctantntctccnatcgactcgacacactcgcacacgatcccaactctcactctacgggtacgcaccgaatttatgtcgtgtcatctagacacgtctnccatcatgaatacgatatatagatgcntgatgctgtgcgatgatgactgtgcntagtgtgtctgttncagcatgatattcgttcttagtctcgtgtactaccatgatgatgaccgtacgtatcgtcatcgctgtaatcatatatgatgttaatttaccatgacgcctcgctcgtctgattcactatnttcttcataccattcatcgtatcttcgtctgctctgtctgctcgctcncagctnagccgcccagtacncagctaccgttcattcagcatcagtgcncntcagtacactacatcagcgcacagtctccatatacgtgcgcgcggctacgctccggtcccgggcctgcttntttntatctctcgatctcatcaacgagcctcgttctctacgctgcgtagtttcatcctctccttatatggcggctctacttgtactggttaggctgctactccgcatctccctgtccatcgagccgcaactatcaataatatctcatccgcggacgcgcagcgtgcatacatctgagggcgcgcagtcgtcacctattcatcacgcacgcaccccttcgcgtccgctctcnttcgcccacctcctctactaatacgtcactgccgctgctgctgtcgcatgtacatttcttatctcgcctgagaacgcgcgttgatcgcgaacgcaataaaagtcccacaccctcgctccccgtcgaattacctactgcgattacaaccatccctctctcccatctcctcgcccttgccgcagctattctctcccacctccttcctgctcccttgtcatatataatttcaactcatatccccctgtgcgcctgcccgcctctcccccgcgcctctctctttctgtcagtctgtgcttaactcatattctaccacaccaccatcctatgcagcttcggcggcgggtcgcgtcgtgttggtgtctctcctcataatgttagtactcctatctcaacgcgctgggaggcgggaagtatctaatatataatattatctacacttcacttctgtcacgcgctggcttgcttgtcgcgtattactactcgagcgcaatcagcgtaaccgggnatacacaacaaattacactccaatatacgtggggcgcgcgctgatatataatttcccaatcgctttctcatattgtatattacattgcgacgcgcgagcgtcgctaaagttataatacatggaggtagattatcatcagtaagaatcatagaagagcggccggcactgatcctcataatatcctgcgcgtcgcttacatgttgcagacggccctctaaaaataaggtggcgcggctatataccatgcagctgtcattgttatttcgttctttacactgcgccccccttctcacttcgtatacatattgtcattcttcctcgctggcccatcacgccttcatggccggaaaaaatcctctttctttctgggctcgcgggcgcctttaatatacaagactggttagaaggggtgatattgtgcctccactccctcttccctcctctctctacgcccctctcgcctgtctacattatacctcctctcataccgctcc

SEQ ID NO: 2394 - DNA, 518 bp, Glycine max
  misc_feature (467)..(467): n is a, c, g, or t
  misc_feature (473)..(473): n is a, c, g, or t
  misc_feature (506)..(506): n is a, c, g, or t
  Probeset Number=SeqID_12173
ggtctcaagcaaccatggcaatggcaacccaagcctctctcttaaccccacccctctccggtctcaaagccagcgaccgcgcctccgtgccatggaagcaaaactccagcctctccttctccagcccaaagcccctcaagttctccagaacaatcagagcagcaaccgccaacaagaccacagaggcaccagcaaaagtaaaagctacaccggtcaggttcaccccaccagaacttaacccaaacaccccttccccaatcttcaaaggcaacaccaacaaactcctacacaaagcacaagtagaagaattttatatcattacgtaaaactcacccaaaaaacagatctttaaaatacccactgacaacaccactatcataaaagaagatcctaaccttctcaagttaaccaggaaagaacagtacttaactcttagaactagactcagatccaattacaaaatcaantaccanttctacatagtcttccctaatgaagaaagtcantatttgcacccc

SEQ ID NO: 2395 - DNA, 1361 bp, Glycine max
  Peptide Sequence Number=SeqID_6090
  Probeset Number=SeqID_12174
aatcaaaaaaaattcctgtaatcagcacagtcacctagtaatccactgatcccttcatctaaggttcagtccttactaactcgcagctctcgtgcctcacaaaaacccctcatcaggctccatggctgatgtcaaggcgggtttttggaccatcttagagcgatcttaaggtgggagtttacaaagacatattgctgtggaagtgaccctcaagtgccagatactaaggtcctcagggccttggtagcgagtgtggaatgaagcgtacccgcatggcagccaacaagggcgactgagatccagagttccctgagaagcaggggaggagaataagtgagcaggataacccacaatggatctggaagtcagactgtgtgattggcaggttaggagagagaccggaaaccagggagttgtgagcccaggtacttggaagaagatttccttaaagaaaaagaatcagaaataatgagtgacaacaaaaaccaaaaaaccaaaataaatatcaacattaaaataataacgaacataatattcaatattataacacacaagacctggaaggcgcgctgaaagagaagctcatgacaagaatgcccgtttactaactggaaggaagagcctgcaaagggctaagctaacccaagtggttatgtttggtatactaagactaaaagacaacccctctacaaaagaaagttctgtgctcagaaaaagacttgcgtttttccctcgtactacaatacaaagaagaataacaaaaaccccaaaataaatatcgctcaacgagccccatcaaatcaaaatgaaaaagaagatgattggtactacaaacagaccctctctgtaccatatcacccaagtcccatagctaaaaaaaaaagaccaagaaacgaacaacggaggtatcaaggacgagctcttggctgccctgtactatagtcaaaagatagaggattaaggccaggagttagcaggaaagagcccctatgacccgaagaaacgagtcagagaaaggataaaaatctggttgctggaaatgttctcggactgatgtttcaatttgttttgctgacacgtagacaggaaaaggtttaaatactaataaaaaaaacggcttgagaacagttcttggyyggycagatatagctgagtacctcctacaaaaacctcargattaaataaagaaaaaaaggcgaaaagaagacagccgaagaccaaaaaaaaagacaagggaagatgacaggtttttcgagagtgcaagacctaaagagcgaaagattgtgacaaaaaccgcaataaataaagtaaaaataacgaaaagtaactacaaatcaaaaattaccaaaacccccctacct

SEQ ID NO: 2396 - DNA, 1541 bp, Glycine max
  misc_feature (1)..(1): n is a, c, g, or t
  misc_feature (58)..(58): n is a, c, g, or t
  misc_feature (133)..(133): n is a, c, g, or t
  misc_feature (136)..(136): n is a, c, g, or t
  misc_feature (144)..(144): n is a, c, g, or t
  misc_feature (147)..(147): n is a, c, g, or t
  misc_feature (153)..(153): n is a, c, g, or t
  misc_feature (318)..(318): n is a, c, g, or t
  misc_feature (1456)..(1456): n is a, c, g, or t
  misc_feature (1491)..(1491): n is a, c, g, or t
  misc_feature (1523)..(1523): n is a, c, g, or t
  Probeset Number=SeqID_12175
ntatatacgtcatcatacgcgtcatcagcgattatagccatacactgttgtgttcgtnacatcgtactatactgcatcgagcgcatgagcatctacgcctacgtgtcaattacgacgcgcgccaccgcttccncgnagctctcntcntcgtgnttccgtcacgtacagttgtcgtacgaatggatatgcgagtagagcgtgagtggacagtccactagcggcagcggtcgagccatgttcgagtagaccactcagagactcgcggtggtgctcggcggttcccgcgcatacaataacgcaagcaataccgtcgacagnttgcggacgacgcccgtgtatctgtcttcgatgtgtgtaggttgtattattatttctgatctacgcatgttgttcgctgtgatacgagatagtacttatctgatatgttggtgtggtgtaagtatgacaggtctaaattctgagtgtgccgagactcacctcagagtggcgctcggaggttggtgagggaatggtggaagtgagttaattcatatacctagtgtcgcgtggtcatcgtcggccatccatcggtctattaatgttggcgggcacgagcgaggcgagagcgtgtagagcgtgtgcacgtagccacactgggttcgggagggtgcgccgatcgtcctcgtcgcattcacagatgttcacaccagcactgcactaatgtgacgtgtggagtggtgtctctagttgcgtgatctacgtattgagtgggcgtcacgggttctgcggtgttagcatacgattatatttctgaggggaagaggggcgccacacgcatcctaattgtcggtacaatacagccgcggacgcggtgagtgcggacggtgtattcaatcacatgtaatgtgatagtattcataggtgggatgattctcaatgcgcagcttagcttctcttcttgtcgggattgtgttacttaatgtatatccattgtggtgtgaatctcaaatacgggatggtattaatgtacgttcgtacatattgatggagtgttggtcaattagctctcttctcttactttattgtgccgtcggtgcctcttatcgtttttccgatgtttacaatcactcattctgctgctgtggatattagtactatccatatcggaacgcgtctctgcacgtgatgccgggcgatatggtagtccatctaggaatgtctccttatacgtgagttcgtaaatcgcactcatccgaccgaggactctatgagaggctgcctacataatgtgtaggaaaatggggcgggacagggggaggtagacgtcctcactacgacgtacgcgatgatagcttagtgtagatggtacttcgtagctcacttacccgacacgcccggggggatgcgcctctagtatttatgatccagtctccctctcccggcgttgagtaggtcgaggtttggaggtttgtgggtntgggggtggggtgtctctctacctcattattactntggtattttatgatttctatgtagtgctattngttttaacatacagaatt

SEQ ID NO: 2397 - DNA, 405 bp, Glycine max
  misc_feature (190)..(190): n is a, c, g, or t
  misc_feature (198)..(198): n is a, c, g, or t
  misc_feature (200)..(200): n is a, c, g, or t
  misc_feature (202)..(202): n is a, c, g, or t
  misc_feature (206)..(208): n is a, c, g, or t
  misc_feature (212)..(212): n is a, c, g, or t
  misc_feature (221)..(221): n is a, c, g, or t
  misc_feature (226)..(226): n is a, c, g, or t
  misc_feature (233)..(233): n is a, c, g, or t
  misc_feature (247)..(248): n is a, c, g, or t
  Peptide Sequence Number=SeqID_6091
  Probeset Number=SeqID_12176
gaaaaattcagtagcccttcatggaatatggcaccaattccattgcaaggaacttccactcattacaatcagcacataccacactacccatttccgcatccagtctacaggtatgcaattcaaacatgtcataataagctgtttttctaggagatataaggttagtggtgggagaagagaggggagcggncgtgggtntnancccnnntttnacatttctnccttntttttcncgctttcattcgcnngttatacaagacggaggtcctcttattgaccagattctcatcatatactaggtgaattgcatcactacaacatgcaggcatcctggttatcctcacccacatgacttgtatgaaatgaacttcaattatggctatggtggacagcagcttccactct

SEQ ID NO: 2398 - DNA, 1742 bp, Glycine max
  misc_feature (1738)..(1742): n is a, c, g, or t
  Probeset Number=SeqID_12177
ggtttgaaaggaattacacattatgctgatattccagaggtaacaactcctttactgaaattcatggctgaactggtgctgaacaaatcccagcgcttgaattttgattcttcttctcctaatgggatactacttttccgagaagttagtaaattgattgttgcttatggatcaagaattttgcctcttcctaataaagcagacttgtacacatccaaatacaagggaatatcaatttgtttgataattcttacaagagcactatccgggaactttgtcaactttggcatttttgaactttatggtgatagagcacttgttgacgctcttgatatcactgtaaagatcatattatcaattcctttggctgatatttttgcatttcggaaggtcgcagcagcttactttgcattcttggagtctctcttcagttgtcatttgtcatttgtcttgagtttggataaaactacatttatgcttgttgttggatctctcgaatctggccttaaagatagcgagaaaatatcatcacagtgtgcctctgctattgacaacttggctacattttatttcacccatgttactgttggagagtcagttacctcacctgctgctcttaatttagctggactcctttctgattgtgctgagcttttctctagaatattgagaaccctatttgaagttgttatatttgagaaccgtggcaatcattggactcttagccgagccattttgagcatgatactaatcagtgaagagatgttcacaaatgtcaaggctcaaattttggtttcgtatccaccagacctacaccagcggttttctttgtgctttaccaagcttatgacagatgtgatgctcagcttggatttaaagaacagggaaaaattctctcagaatctgatcagattcaagtctgagttttgtgccaaataactggcagaatggttttagccagccccagaaacaatatcatatctgctgcttttctctttataatatttaggttcttgtacattgtttaccatgattcgttttgttcttttgggaaggggattggatttttttcttttatcagtggtggggattttttttatgaaaggtctgctggcatttattggcatacctaactagaaaaaagcagggagagaatatagcaattcctatttgaacaggtatttttagatgaatgaggctcagatgccctggatgaaaccattaatctttccccatttaaactagctgaaaaattgttaaattggaaggggatttgtaaattgtagctactctattcagattcccagagcttacaatatatgatattatctgttaacactttaaaaaaaaaaaaaaaaactcgagttttttttttttttttttttttttttttttttttgggcaaaaggtaaaaaaacagagtcaaatatggggtcactttgaatgaacccttatcatttagtctcaatggctacaatggtggcccctttgcaccaggtaaatgttctaaatacgtggccaattgtagggctggggattcatccactgaacccttatttgggggacacttcttattacttgctcatgaatttggtgccactttatccagaaaaaatattagggctcgcaaaggggacaaatgggatcactatcccacacactacttttgggcaaaatctcaaggtgctgaaataacaggggcacaagtcgagcttggacttcttctggggtggtttcnnnnn

SEQ ID NO: 2399 - DNA, 1592 bp, Glycine max
  misc_feature (1)..(1): n is a, c, g, or t
  misc_feature (11)..(11): n is a, c, g, or t
  misc_feature (20)..(20): n is a, c, g, or t
  misc_feature (103)..(104): n is a, c, g, or t
  misc_feature (133)..(133): n is a, c, g, or t
  misc_feature (140)..(140): n is a, c, g, or t
  misc_feature (606)..(606): n is a, c, g, or t
  misc_feature (657)..(657): n is a, c, g, or t
  misc_feature (850)..(850): n is a, c, g, or t
  misc_feature (956)..(956): n is a, c, g, or t
  misc_feature (1288)..(1288): n is a, c, g, or t
  misc_feature (1298)..(1298): n is a, c, g, or t
  misc_feature (1333)..(1333): n is a, c, g, or t
  misc_feature (1375)..(1375): n is a, c, g, or t
  misc_feature (1499)..(1500): n is a, c, g, or t
  misc_feature (1533)..(1533): n is a, c, g, or t
  Peptide Sequence Number=SeqID_6092
  Probeset Number=SeqID_12178
nacctttctcncaaactccnccaacgcacgcactcatctactttttcctctagcctggccttcttccaagaaatacgcggcgatatcttaagaaccttctacnntgctcataagcttttatccactctatctntgtgtgncacgtctctaacgacctcttattttgtcgattctaaaacatgcgccaatacactattatcatagctatgcatctcgatacctcgactttcaatatgcgtctaacatctcgtgtgctctactacctcctaacggatcgcatcctcatatgttattttgtctctactgcgtactctacgatagactcatatcaccttccatctctcacatatatgtactatccaccacgaactgacttgcggtacctcagatactcacatcccaggagatggtcctttcgcccacatctgtatccctcagcatgaagcatcggcactcaaatatgtatcgtccaatcgtcattagtcggattatcgcgtcctcacccctacagagagggacgcgcttcaggctaaccgcaaattgctcccccctactagacgcagatcgatatataacagcgatgcttcctcctgcgcgcgctccgtntttcactaatcgttccgttgctcctgtcgtacaacaccacatggccgtctnacctccacacttctaactcgtacatttgaaacaaactattaccccccctttttcagtctatccttgtctcgtcaatcaagatgaaagtagtgcatccagttaccccgaatcactcaccccatacatcatacatagcatgtaatcaatctcttgtatatgggctgctactagcaaaacatcctgcaacaccccncctacacaacatttttgagatacaaatattaccaacgcctctaagatttgtttcgccctcataatgcctaacctacatgttcttctttatatagcctcacctcacngttcacgtattatctccccgcacatattgaccctgccgcataatccccctcttacttcaaagtaatcaataacctcctctacacctaatcggcccacacaatatatggctcgcctctctccattctctcatgcgcacatataacgctagtagtcccctcttataatcacacaagcgatgattatcgtggatactcgccctaccgcggttgatcacagtgaatccgttattatatctcccgcactcacatatctgagggacaacacatctgtttaccctcactccacctctgctaaccaccaagtcagacaccccataaatctcaacagcgtntctttatcgngtcgaccgctagagtatgtgctccgatcatacatnctctccctaatatctcgcccagcttttataatacaggggttntttccaccacgaatctacaacaaatctcgcgcacacacagagacaaatcacctctccctctcaacactgtgatcatctcatcaatgtaacggtaccacactccacaccctcattctatgtccannctatgacactacgtcgctccatagtcatataantctatcatacatttccacctcctccgcacttctatatcaacacgcctctcagatgttag

SEQ ID NO: 2400 - DNA, 560 bp, Glycine max
  Probeset Number=SeqID_12179
ggtagcagctgtcacacaccggtgtaagcgccgccggcggcaggaacaccccgatctcgacgatagatcgagaaagcgatggcgcttaccaacttcatcgtgacggtggccgttgtcggcgcgggtgtgctcctcttcaccaccgacatgcgcaggtccggcgccctcttccgccgcaatgcgcgccagctccagcagtggctccaggaggacacggcctccgccgcgtccaagtccacgaaagaagcagctccgaagaaacttgactcaactgtctccaaggagaggccaaaggaaggcagtcactgattcgagttgtttatatgattgctcttgcaccacccactggtttctctgcgccctgttgaatcggaagcggtcaattataaagcagaccttgaatgaagcgaagcgtgcctttgaatgcaacctgtcgcgaagtgctgctctacaaccccatagcgagtgaaagcttggagcttgttagtagaaccgaaccgttgagcgatttgcattgctgtttacagaaatatcatggaggaagctgcatgcctgtttgg

SEQ ID NO: 2401 - DNA, 349 bp, Glycine max
  misc_feature (44)..(44): n is a, c, g, or t
  misc_feature (105)..(105): n is a, c, g, or t
  misc_feature (121)..(121): n is a, c, g, or t
  Peptide Sequence Number=SeqID_6093
  Probeset Number=SeqID_12180
atcatggcaagcgtatgtggatgatcacctactgtgtaaaatcnaaagtaaccacctcactcacgccactatcatcgaccaagacagaagcatttaggctcaaancaccaacttccctcanttcaaacctaaagaaataactaccatcaataataactttaataagcctaaatcacttactccaactaaattatatatcaataacaccaaatacataatcatccaggataagcctaatactatcattcgaagaaaaaaaggtcctaataatattactataaaaaagaccggtacgaccttgatcattagcatttatgataaaccaataactccaggtcaatacaacata

SEQ ID NO: 2402 - DNA, 263 bp, Glycine max
  misc_feature (50)..(54): n is a, c, g, or t
  Peptide Sequence Number=SeqID_6094
  Probeset Number=SeqID_12181
ggagttcatccctgtgacagaagaagaagtgttagcgagtatcaatttcnnnnncctgctgttgatttctcactggcaaatagtgatgaggatacctggtggaaggccaatattagagagacaaaggaagaactggcagctagagggctgaagttcctgaactggtatgagttgggtatcatcagaaacttctaaaggtttattttacgagtttggtatgtcagcaatactacatattgggaacacactaaaattggactttg

SEQ ID NO: 2403 - DNA, 1454 bp, Glycine max
  misc_feature (58)..(58): n is a, c, g, or t
  misc_feature (95)..(95): n is a, c, g, or t
  misc_feature (209)..(209): n is a, c, g, or t
  misc_feature (455)..(455): n is a, c, g, or t
  misc_feature (589)..(589): n is a, c, g, or t
  misc_feature (596)..(596): n is a, c, g, or t
  misc_feature (628)..(628): n is a, c, g, or t
  misc_feature (648)..(648): n is a, c, g, or t
  misc_feature (651)..(651): n is a, c, g, or t
  misc_feature (778)..(778): n is a, c, g, or t
  misc_feature (1157)..(1157): n is a, c, g, or t
  misc_feature (1316)..(1316): n is a, c, g, or t
  misc_feature (1368)..(1368): n is a, c, g, or t
  misc_feature (1377)..(1377): n is a, c, g, or t
  misc_feature (1454)..(1454): n is a, c, g, or t
  Peptide Sequence Number=SeqID_6095
  Probeset Number=SeqID_12182
gtaacgatgaggagtgcagcgcagacgtagagctaagaaagtaatcaatctaaggaangatatcagagacggatactcataatattaggatgaanagatagctcagaggtgtatgtgtcggatataagcgaggtttagtagcatgtggtgagcgtaatgtgaagggtgagtagaagcaggtaagatgcgagcgtagtgatatatgagantgtgatactagatacgatgatgtataaggaagagagagatagatagctggtctagagtgagagaagtgacataacgacaggtgtgatgcgagtagaggcgttcacgagtaggacagcagcgtgccggactgatgtgcgggggatgctaggtagctagcgactagagcggagagatatagatccggtagagaagtgagagattagttgtgttatgtgtgcagtgtaagcagtgtcgtctgcagcaancaagtagataaggatgtatataacaactgttagtgaaatatatatagatgatgatatattacagagtgtattcagtgagagatgtattacatatagactcataaggagggagtgggtgttgggggtgtggggtngttcatncgtttattctaacgcatattagtgaggttgtngatttgttttattggttttnttntatttgtggggtgataatatatataaaataaaatatagtatgaatgtgtagtcaagacaccgactacggcatcttaactcagcttctgtgtgttatttcacgatgtgattcatgtcacgaatatgtntgtctggagggttatcagtagagtagtagagctcggtgatcgagcatgtgtgaggacaggatgcagggttataaagagtggtggtgatggcgcaacgataagagacgatgacgtgtgcttcgaatgagcgtagtctatatatcagaacctatgaattatgtggcgtactaatagacatgattagtgatgtgtataggtgttatttgtttcaggatggtatggttcgtgagtgggtgaggagaaaagagaagacatgcgacaagagatatgtggaaccgtagggatgacccggtgaagatgaggaggcaacagcgataaacaaagtagtagagaataggtaagataataaattaatagttgttatgtgtgcttcagtganctgataggtacataaagactactcgtaatagattgaaatggagagtagaagattagtggggaggaggtggcgtatgtgcgtcaggacacacacagacaaaggctctccttgcgatcttgttggtgttatcggctgcgggtggatatgtcgtggtgtagnaggtaacaactcttaggttcatctgtaatagtgttagaaaggcaaaaagaangagctagtntttgttttatgtttgttatcatatatttatcattttttgtaagtgtatggatgcgctgcggctcaacttccctcctn

SEQ ID NO: 2404 - DNA, 918 bp, Glycine max
  Probeset Number=SeqID_12183
attagtaaaatcctcaaataaaaaacttaatttcaacaaaagatcaaacaaatgtctagaggctcaccttccaaaaacagattgactaacttggcttataaacttgataatttcgaagctggtttattaagacaaaataaagctacaaataaagtcgataatcttgaagaaggatgtcatcgtcttcaagacaaaatgaccgagtacttggagtataataataaaaatatcaaaaatatcaaagatcaaattgttcatgtccaaggcatgctgaaagaagaaaaacaaagcagagaaaatctcactgaagaaactcatagagatatcaatgatattgaacagagaataagtcatttaattgaaaatgaaatgaatgcaaaaagagaaggtgaccagagaatcaacaatttaatccatcaaagacatgctgaattaatggatcttttgcgtagagagtcatctgtaagagaagaaaaccttaatttattaagtggaactcttgaatctgacctccccaaactcagcgaatccctcaaaaacttaaatgatgatagacaagaagtcgacgaagcaatcaccaaaaagttccagacagaattagtcaatttaagagaactcgttgatcaagaaagagctgaaagagaagagtctgaaaagataattcaagaaatgctcaagagtgtctttactaaagtcagagaagatatcgaacttgaaagacacaacagagaagaaactgaagaaactttgatgattttattaaatgaaacttgccaaaaaattaatgatgcaggcgatatctaaaacactgttgagaatatttttatgaatacatcacaattgttagttgctcactatgtcattctactttttatttgcataataattatttgatattatcgaaaaaatttcgtaact

SEQ ID NO: 2405 - DNA, 1478 bp, Glycine max
  misc_feature (1)..(1): n is a, c, g, or t
  misc_feature (13)..(13): n is a, c, g, or t
  misc_feature (15)..(15): n is a, c, g, or t
  misc_feature (951)..(951): n is a, c, g, or t
  misc_feature (1222)..(1222): n is a, c, g, or t
  misc_feature (1301)..(1301): n is a, c, g, or t
  misc_feature (1349)..(1349): n is a, c, g, or t
  misc_feature (1368)..(1368): n is a, c, g, or t
  misc_feature (1478)..(1478): n is a, c, g, or t
  Peptide Sequence Number=SeqID_6104
  Probeset Number=SeqID_12184
naaaacttcccgncnatctttcacatttatcaatatttacatgtcccgcgaacacagcaacctcttcctatatatgatgggagctttctcctctcctttttggtcagcgcccgccctcccttaatatagtagtgcgctgcccttcctaggcaccagccgcagagaagtcgctccttcttattctcggctaggagacctcgcggccaaccggacgaacctataggcgcccttgtataacactttccacagcttcgtacaacacgccagagctctgatcgattgacttcaccgtgtgtctgtattatcacacgctggatgatcggagcgagaagacgatgttttccttggctgcgccggcacatacaccacgtcgcaggactagacacaagagggtcactgccatgatttctctagtgcttgatcatgagcttgatgcattcgtaggcccagagagacagaccctcatcccatcgtatcacacaagctacccttattatcagtgatagctggctcgcgtcttcctcgtatcgctgtcaatgaagacgtgtcaccacgcctgccataccatacacccctacagatgtcgtcccatgcgcgtatctttatgtctttatctctgcgtcccacatccttcgctctcacgtgacgcatacacgcgtatattactaaaaagagtatatatcttctggagatgcatgcccatagtctgtgctctacaactaagccgcccacccgtgtatatgttgttatagtgtagtccactctccgtagcgaggccctcccactagactcctctccttatgacgacgtagtcgctacacgttgaagatgctgatgcgtctctactctggcatgatccaccgtctagtttttactcatgcactcgacatgtgactatcctcacgcgtcgaccctgcctggtatctatctcatattcgaacgctatgcttncacacgtgcacctactcatcccagtatgtagttatattctatcactgacgatgtattatgtctgtattcggctctcactccagcagaggcctacgtctatgagagtattaatgagtcagtatatgtacatcttagttagcctcacgcgcggtcgagtatctacgtcctctagacccgctccacccatcaccgcacatcgatatcttctcacaactcgtagtcaatctccgcgtctcccgcttgtcgtactatcctccgctcagcctgctcnacagccttcgcgtggacctaccacctcaacatctgactctatacatacgctctttctacggtccatagccatcgatcancatatctgataatcagacgcattatactgtactacacactctcgcgcnccgtaagtgcatacacatnaccatatatgtcgaggtgtgtcaactgtatcgaacgacacaacacacaccaaccactcaccgcactcacgtgatgtgaatataactcctccgcggaacactctccgtcgn

SEQ ID NO: 2406 - DNA, 1377 bp, Glycine max
  misc_feature (35)..(35): n is a, c, g, or t
  misc_feature (134)..(134): n is a, c, g, or t
  misc_feature (228)..(228): n is a, c, g, or t
  misc_feature (280)..(280): n is a, c, g, or t
  misc_feature (418)..(418): n is a, c, g, or t
  misc_feature (1287)..(1287): n is a, c, g, or t
  misc_feature (1305)..(1305): n is a, c, g, or t
  misc_feature (1366)..(1366): n is a, c, g, or t
  Probeset Number=SeqID_12185
cacacagtcgaactgcaatcatgagcgactacggncaatcgtgtatctcgtatgacaacatagcatcagcgttgagagcgacagatagtggatgtccaatagtgtaatatagatgagcaatgtatctcaagtgncgataccggacagatgtcgatgcagtgttttgcggtgtgactcgctaatacgcagtcacgtgtgacacatctgtatgatatcatacatcagtancgcgtgacagctcgatccatgtcgagcgtacatgcgaccgcccgtgctagtntgtctgagctacggatagcgttctatcgattggtggtcagacgtagtgagagacgtctatcgatagtacggagtgcagtgattggacacatgcaccgatcgcgcggcatgtacgagggtcagtagagtgcgacgttancgcggtcagtaggcagagtctttctctctgttcatatctacagatgcgcgttaacctgtagaatgataatatagttcgagcgacgcgagtcgtcataattaactaaacgggtgctcactactcttacgcgctagcagcgacgcagatcggcagtgatccgcatgtgcggagatatgtacggatctcaactacgttaatagtaatatctagtgtggtgtggcgcactcgggcgtattaacacacgcgcgcgagtaaagtataatagaataggtaagacacagtgtagtactgctacaacaccataatagcagagcacagacctcagtacgcgcaccgcattgttgtgtcgcgcgtacatgactgcattggcgcgagaggctataatgtagatcgtgagtgttgttagaatagcatatcgtcggctcgagagcagagaatactacacagtgtctacgctccccacgtgtagcaatcacgcgtaagctacttgacgactacatcatgtgtgtctgttttatgattgcatagatcactctacatgactgcctgaatcatcaggctagcgcagtttgatgaaatgaccatcaacataccaatcaaattagtgactatatatacatcatccgggatgtctcgctagtactataggagctgggcgtacgaggacgtgtgaggtataagtgcatacctccggcgattacttctgagttatcacatggagttagtgaggagcacggtgagccccacgcgagctgctgccactataatgaccagataagaatacatgagaataatataagaagttactctcatcctccacaaagaagagagtgccccagacaacatataggagtcgatggcgctgaggncaggagtatgtggtatanaataatgaagagacaaccgcaccacccacttagctctgagggatgagagtcaggagagtgnggaatagaaca

SEQ ID NO: 2407 - DNA, 242 bp, Glycine max
  Peptide Sequence Number=SeqID_6105
  Probeset Number=SeqID_12186
tcgactcgtgtacccctgcagtatgcttttcttccctggattacagtcaacagtagaccttcacaagagcttgtggcataggatcttcatggcttggaatggaggtttcgacctctatatatgggccaacctctgaggcacctgctcacaactgggaggagcgcatttgtcaacaaaaaagaagcttgtttctggagatgctgagccgtgtcttacgtatacaatttgaagctcctatctaa

SEQ ID NO: 2408 - DNA, 1376 bp, Glycine max
  Peptide Sequence Number=SeqID_6106
  Probeset Number=SeqID_12187
aaaagaaggtgccaattatagaactaaaaaactctttgttggtggtctcactcaaactaccactgatgagcaatttagaggatattttgaacaatttggcgagatagaagattcagtaattatgactgataaagaaacaggaaaatctagaggatttggatttattacttttgtttctgaagattctgttgatcaagttattgagagatataacgataataaaattgatggaaaatgggttgaatgcaagagggcccaagctaaggatgtgatgcaagctggcagtaaaaagggtggaagacacgacagcagaggaggcccaagtgactaccaaagacatggtggcggtggcgatagacgccgtgatgatagatcaagaggacaaggaggatattatcaaaacagtcccacttctcaaagtggtggtggtggtggcggctctggaagaagaggccccagaaatcaatctggtcaagataattatggaggtggttattatcaaggaggtggatatggtggccaaggaggatatcctggcggacccagaggaaattatgaaggagcaccttatggatcttatcctggatatgattatgctggaggtcaacctggttatggaggtggtgatggtagaggccctgctggcggatacggttatgaccaaggctactcagcttattctaaccctaactatcctaatccctatcaaaatccatacaatcctgcttatgctggtggttaccctggacaatataatcccgcttatggacaacaaggttatgatatgatggctgcaaatcctcaaaatgcgaatcctagcgcatcagccactgcttcaactaaaggaagtgaagcaacctcagccaatcccaaccaaatggctgctaatccctatgcacaaggcgctcctagtggatacggaggtgaaggacaatataatccaactgcttatggctacaatcctatgccacaaggagattatgctaactctgcttattatggtcaaccaggtatgcaacaaggtcaaggaggtcaaccaaaatatggaggaggtggccaagtacaatcaccttctcaaatgagcggtggtagttatcaaagacaaggtcaaccagatgttggacctattaaaggaagtgccaagaaaggaggatctgagccaagacattatcaaccatattgatagatgtattatttaggatttgtgtacttttgaataaaacataaaagaaaatttgattttgattttaatctcttttttcaaagaaagatgagattctgaattttagtatgaatataaataaaaattgtatggtgcgtatcatcatttctacaacaaatatactcatgataaagattttttcgaccttctcttc

SEQ ID NO: 2409 - DNA, 952 bp, Glycine max
  misc_feature (224)..(224): n is a, c, g, or t
  misc_feature (300)..(300): n is a, c, g, or t
  Peptide Sequence Number=SeqID_6107
  Probeset Number=SeqID_12188
accaaacccgaactggcggtacatgtgtgaaaagaaaaaaccagccacccgcctgcacagcggagcctcgccatagatcgtgcgcgccataagagctcgcccagctccgagcgcttcctcggcacattcctcccccgcgcggccgccggcgaccaacccgcctcggcggccttcgagctcgacgtggacgacctcttcggttctcccgagcggccgcggccgcngccgcgacgccggcccttgctcayctcctccatctgcgccgcaaaccctagccccccgcgccgcccgccgggggcnatcctcgaggccctccccgagcgcctcgagcctctctcgccgcccccgtctgcttcattcgtctcgacatcccccgcgtctccggcgatggcccttccacgcatgatccccgccatcccccgcccggtgccgtcgtcggcgatgcacatgccgcagtgcgcgccgatgaatgtgccarcggcgcggatgcggcgaccgacggtcgaggcgttygcaacttcgcgagtgaagcagatgaggacgactacgacgtggagatgttgtcsccgcacgaratggtggcgcgctcgccggcgtgggagtcgcccatgacgaccttytgggtgttggagggcgctggacacacgctcccatgacgaccttytgggtgctggagggcgctggacacacgctcaaggggaggcacctccgccaggtacgcaatgccgtgtggtggaagacctgcctgctcgattgatccattgcgtttgcatttggtagctgcctacagctattgaatttgtgtgtttgaattattttgaacattacacctgtaaaatttgtgttgtattactcaccattccggcattactyttatttatgaactatctatttgagctctcaggagacattgaactatttggtatggattaagataattgtgcttttatgg

SEQ ID NO: 2410 - DNA, 585 bp, Glycine max
  misc_feature (6)..(6): n is a, c, g, or t
  misc_feature (230)..(230): n is a, c, g, or t
  misc_feature (233)..(233): n is a, c, g, or t
  misc_feature (289)..(289): n is a, c, g, or t
  misc_feature (298)..(298): n is a, c, g, or t
  misc_feature (338)..(338): n is a, c, g, or t
  misc_feature (350)..(350): n is a, c, g, or t
  misc_feature (360)..(360): n is a, c, g, or t
  misc_feature (381)..(381): n is a, c, g, or t
  misc_feature (456)..(456): n is a, c, g, or t
  Peptide Sequence Number=SeqID_6108
  Probeset Number=SeqID_12189
gggaangagaccctcgggcccccgccaatgtgttttagggctgagatttattttatcctaccgtattgggtctgaacctatgatggaagattgactctcggaccttggaaacgagtaatgcaggacatgctggggccaatttggtaccacttgtggcttcaaataggataggaaaggagattattgagactgagcatggaaaaagtgagataacattttatggaaactgnttnataggaggacctactggagaaattgtttgaattgctgatgataaagaggaagctgntcttattgntgaatttgatttggacaatatgaaatgcatgaggcattgntggggtgtattncgtgataggngtactgatgtatataaggggnttttaacattagatgggaagaatgtggtggaatgatagataaacatgttacgttgtaactggtatagaattatangtggaatggtttaagggtttacaaatttggagaggggggatgagtgaggaagaaggtaggaacaaggtagaagggaggaatattatgtggttattggatggggtggaataaatatgggggaattaatga

SEQ ID NO: 2411 - DNA, 1366 bp, Glycine max
  misc_feature (1)..(1): n is a, c, g, or t
  misc_feature (565)..(565): n is a, c, g, or t
  misc_feature (567)..(569): n is a, c, g, or t
  misc_feature (672)..(672): n is a, c, g, or t
  misc_feature (902)..(902): n is a, c, g, or t
  misc_feature (1128)..(1128): n is a, c, g, or t
  misc_feature (1254)..(1254): n is a, c, g, or t
  misc_feature (1298)..(1298): n is a, c, g, or t
  misc_feature (1315)..(1315): n is a, c, g, or t
  misc_feature (1334)..(1334): n is a, c, g, or t
  misc_feature (1336)..(1336): n is a, c, g, or t
  misc_feature (1348)..(1348): n is a, c, g, or t
  misc_feature (1353)..(1354): n is a, c, g, or t
  misc_feature (1366)..(1366): n is a, c, g, or t
  Peptide Sequence Number=SeqID_6109
  Probeset Number=SeqID_12190
ngcggcgtcgtcggctctgtgcgtggactaatcaagagcttgtcatgatatgacttactgcatgtatagtagttgaatggagaacacacttcgcgtcgcgtgggctagtcagaggcgctctagcgacgctgattgacgcaccgcacgaaggacgtacctagaagtgagaatgtggtacaggaacctaggggaagaatagagcggtacaggagcgcgatctacagcacgcgttagcgccgtagccgacactgcgctctcactcatctcgcgtgtgctgcctgctacaattgagcaatactgtgcggagtgtccgagcaacgtgaatttatgatcaattattattgtgcttgggcctgtgtgtgtggtggttggtggaggttatctgatcttaaaggtgatggaggtatgtgtactctttcactacaaccactcgcagctacgactactggacagagacaatgctcgcactgcagcttcactacttctacacatctacgtcggtgccctctttttatctccagcacattgtgatgattaattatttcttattatgatatagataaanannncacagggggttttgtaaaataggattagagcatacgaacatcagctacagttgcgagacttcatccccccagttctctacttaacatcgccttattatagtantatgggtccggcgagaggagctaagccaataggaatcgcagagacgcaacaccaccgctcactccctacgcgggtgagcactcgtaattaaagaatcaggatattgtgggtcattcagataggtagacgaccggaacacatagtataagacgcctcctgaaccgtcctcacccacgcacaattatagacctaaatgagtgcgaggtgggtagagacgggaccgggaggcnacatccatgattcccgattccataaaacgggtgtacggtcttcaaggcacctacacccacaagcagttttttattactcacctctcctgagaacgacctaagataaggttgtggataaagattagaaacatgaacgttattagttcgactgtacgaaatatttgcttcaacgtaaatataacaatattgacgactgtttccacgataacactgtcgcgctggtgtngggccccctcaaagacggtaactacagcgcgtagatcatatgattatcccttctatgagtcggattgtctccctgataagtttccctccactcaacttcttcgtgggtgccgtctcgccgtcggtnggtatagggagtcctccagtccttccgtatggacaaagggaagnagtgcttcggttgatanaagttatgtttgcctcgtntntctaactaaaanggaanntcctcccacccn

SEQ ID NO: 2412 - DNA, 503 bp, Glycine max
  misc_feature (477)..(477): n is a, c, g, or t
  misc_feature (489)..(489): n is a, c, g, or t
  misc_feature (497)..(497): n is a, c, g, or t
  Probeset Number=SeqID_12191
aaaggttgtgtagttgttgtaagcaaaaaagagagatagagagaaatggctagcttcaccgcctccgcttccaccctctcggtcgctcgtcctgctctccttctcaagcccaccgtcgccgtctctgctcctgttcttggtttgcctccaatgagtaagaggaagggaggagtgaagtgctcgatggagaccaagcaaggaaacgtctcagccgtgggagctggagtttctgcggcggctacagcagctttgacagctgtgatgagcagcccggctatggctttggtggacgacaggatgtcaactgagggaaccggcttgccctttggacttagcaacaacctcttgggatggattcttttgggagtgtttggtttgatctggactttctactttacctacacttcatctctcgacgaggatgaagaatctggtctttcactctaaacatgaactatatatgttcttcatcagggncatctctctccntttccatntttcgg

SEQ ID NO: 2413 - DNA, 304 bp, Glycine max
  Peptide Sequence Number=SeqID_6110
  Probeset Number=SeqID_12192
tggtgtcaaattcggcgaggccgtgtggttcaaggccggtgcacagatcttctcatagggaggccttgactacttgggcaacccaaacctgatccatgctcagagcatacttgctatctgggctgttcatgttgtgctcttggggtctgttgaaggtaatacagatagtggaagaccctttgttgaaagataagacccattctaccctagtggtgcgttaagattctctagtctggtcgatgactctgttgcattcgttgagttgaatgtctgagatcttaaaacgaacatcatgtctaagtat

SEQ ID NO: 2414 - DNA, 517 bp, Glycine max
  misc_feature (516)..(516): n is a, c, g, or t
  Peptide Sequence Number=SeqID_6111
  Probeset Number=SeqID_12193
aattcagtcgtttcgttttggcgaacacaaaagagaagaagaaaactttaccgctgccgatctccctccgtggtgggccgtgctcgtcaccgccgctatgtgagggaggatctcctccgcctctttagtttaatctaagttttatttggtttcttgtctttttgggtgagggtttccttctcagtccggtgagtgctagtttggctctgtctcaagtagtctgtgcttgtcccttggtggcttgtcttccttggtgcgtcgcttgacatagtacggtggttggttcagttcttggtccagatctaccggatcttgggttgataaatttgtagggtcttggagtcttttgtggctgtttcggtgcttggatccctttagtatctgtcggtttggtgcggaggggtatgtttctttgaggctttttttttgcaacagtgaagcgtcccgaggatactttggttgctactggcttctctccggtgaaaaggtctgatttgaggtgtattgttcttcatnc

SEQ ID NO: 2415 - DNA, 502 bp, Glycine max
  misc_feature (466)..(466): n is a, c, g, or t
  misc_feature (498)..(498): n is a, c, g, or t
  Probeset Number=SeqID_12194
ctcttctcctcttccactctttggcacgcgccgcttcagcgcccgcgtccggctaccgcggcgtccgcctgcgccccaacggcggctactacgcggagatacactccggcgatcttcggctcggcctcggcacgtacgggacggcgcgcgaggccggctgcgcgtacgacgcggcggtgtggcgcctaggccggccgcgcggccagatgaactttcaggatgtctacatgctccaacaagcgctcgaccgtgccccgccaccgcgtctgaacacggcataagaccgtgcggagcacaacgagcggcagcgccgcctcctcgttgcccaggaggacgagcgggtcatgacggagtggcgccaccgccacccggaggacgtcgcctacgagcaggcctactgggcaaggcgtcgcgaggaggacacgcgaaagcgccgcgaggcgcggttggacaggcgtcggcgcanggagttggcgaacgcgcagtccgatctcattncagc

SEQ ID NO: 2416 - DNA, 1047 bp, Glycine max
  misc_feature (1)..(1): n is a, c, g, or t
  misc_feature (688)..(688): n is a, c, g, or t
  Peptide Sequence Number=SeqID_6112
  Probeset Number=SeqID_12195
ngtccctgagttcggctcgaggcacgtttcccaacttcaacattcacatattaaaaaacaacaagggttccttttctcgtcgatttcaactctctcagaagctggatgacgataatttcattgataaaatcaaacgaagagagctcatactggaaagtggagaattagcaaccattggtgccatcttcaactttagaggcaaaaagccagattatcttggagtgcagaaaaatcaaccggcattagcactatgtccggcaactaagaactgcatatcgacatcggaaaatgtcactaacctcacacattacactcctccttggaactacaatcctgaaggtaggaaagatcatgtgagcaaagaggcaatggaggaactgatagatgtgatagaatcgacaatactaccagaaaattttacaccaaggattgtagaaagaacagaagattatcttagattggaataccaaagtgtatacaagccacaaattttaacttcaatgtcaccaatatcattgtatgcagagggactcggtcgtggagtatcgatcagcatcccgattaggaaactttgattttcatgtcaatagaaagagaatcaaggcattgcgactagagttggaaaagaaaggatgggcatctcaagactcaatttaggacatcctaaccctaacccttaataacaggncgtaatatatttagtataaagtggaagtttaaaaaagttaatattaaagatgaacacacttgaccatctcaaaactttttctacttaagaggattagttatttcccctcaatttttgaggatcacaataaaaactatattgacatttgcaagaaaaattaattgctattgtatttaatattggagtcatagttgtacatttttcatacttaagatctgagatgatgaatgtaaggtgactttagtggtgacggaattaaagtgtatacaagccacaaattttaacttcaatgtcaccaatatcattgtatgcagaaaaaatgaatagtaactttttactattagactgaaaaaaaaaaa

SEQ ID NO: 2417 - DNA, 506 bp, Glycine max
  misc_feature (12)..(13): n is a, c, g, or t
  misc_feature (15)..(15): n is a, c, g, or t
  misc_feature (28)..(29): n is a, c, g, or t
  misc_feature (451)..(451): n is a, c, g, or t
  Peptide Sequence Number=SeqID_6113
  Probeset Number=SeqID_12196
tcgagtcagctnngntaggccccccccnncaagaagaacactactactactaaaaccaaggctcctgctgccgtcgctgaccccaagagagaaaaacttctcgccatccaagaaagagaacaactcaagggtctcttgttaccaaattcgtcgagaaatacggcaaggatcaaaagggcgataaagactttgttaataaacaagtcgttgaattcatgaagaacgaaaagcttactgaagaaaacctcaagaagcttgaaaacaaaatcaaggttggtgttactgctcaacctgctgatgctgcctctgttaaatctgctgccaagagcgagaaacaaagccatcaagttggtcaacaccaatatgctcatgatcatcaaggtgttcatcatcatcaccaccatgatgatgataatgtgtccaccacttcatcccagaaacccaagtcagnttatgcacaaggagattctgatgatgaatgggccacaatgatgaaatacgacact

SEQ ID NO: 2418 - DNA, 306 bp, Glycine max
  Probeset Number=SeqID_12197
cttgcatgcctgcagctcctctctttgtgcagggacacagtgtatggatcctttgagatattttgggcttgacatacctggcatgcatctgggtgtggttggtcttggtggactaagccatctggctgccaaatatgcaaaagaccttgccattgaaagacactgacaacataacctgtcctaaaaataaacataaatccatacaacatcttggagctgatttttttgtggtcagcagagaccaagatcaaatgcaggtgcctattactaattaatgttaatatatatttttttatttaacaacat

SEQ ID NO: 2419 - DNA, 502 bp, Glycine max
  misc_feature (82)..(83): n is a, c, g, or t
  misc_feature (97)..(97): n is a, c, g, or t
  misc_feature (177)..(177): n is a, c, g, or t
  Peptide Sequence Number=SeqID_6114
  Probeset Number=SeqID_12198
cttagcatcgaaggacaaattatagcctgagtctttgtgtgtacaagttccaccaaagccaccccaaattcttcctcatcannatcacacatagcanactaacgatccaaactctttcattttgcacatcaaaatgagtgaagatggcattgactaaccgcgaatggggacgggcgntatagcagctgctggcgtggtcacataaagcagaagtttatttgctgccatgggtgcataaaccagatggttatatgccgccatgatcgcctaaacccaaagttttattggcaaaacttagcggaaaccagagtcatccgatgaccccgagaactggggtttgcccaaaaaactgaggaggcaaccaatgggaaatgaagaactgaaaaaggggttggtggaaacgaaaaagggggggggttccggatttcctgagacccctcttcggtgttggggggggggggttttttttgggccaaggggggcaatgtggggggggggtttt

SEQ ID NO: 2420 - DNA, 1458 bp, Glycine max
  misc_feature (1)..(8): n is a, c, g, or t
  misc_feature (13)..(17): n is a, c, g, or t
  misc_feature (32)..(32): n is a, c, g, or t
  misc_feature (45)..(45): n is a, c, g, or t
  misc_feature (49)..(49): n is a, c, g, or t
  misc_feature (65)..(65): n is a, c, g, or t
  misc_feature (86)..(87): n is a, c, g, or t
  misc_feature (98)..(99): n is a, c, g, or t
  misc_feature (116)..(116): n is a, c, g, or t
  misc_feature (144)..(144): n is a, c, g, or t
  misc_feature (227)..(227): n is a, c, g, or t
  misc_feature (237)..(237): n is a, c, g, or t
  misc_feature (372)..(372): n is a, c, g, or t
  misc_feature (449)..(449): n is a, c, g, or t
  misc_feature (526)..(527): n is a, c, g, or t
  misc_feature (576)..(576): n is a, c, g, or t
  misc_feature (613)..(613): n is a, c, g, or t
  misc_feature (653)..(653): n is a, c, g, or t
  misc_feature (736)..(736): n is a, c, g, or t
  misc_feature (860)..(860): n is a, c, g, or t
  misc_feature (1027)..(1027): n is a, c, g, or t
  misc_feature (1030)..(1030): n is a, c, g, or t
  misc_feature (1047)..(1047): n is a, c, g, or t
  misc_feature (1263)..(1263): n is a, c, g, or t
  misc_feature (1369)..(1369): n is a, c, g, or t
  Probeset Number=SeqID_12199
nnnnnnnnccccnnnnnccccccccacccccnccccaacaaaaanacanaccgacccccacaccnaccgccgggggtccgagaccnngcccccgcggnncgccccccgcaacgctncaccgccccccgtggtgagagaaaaaangtgtaagacgagatgtgggtgtaggggggggtagagaaaaaacgaagacgggtggccggggacaataaccttatttgtttttntctctctctnttttcaacctctctgtgctctctgacctcgtcggcctcatgcatctgctgcgatagtatcctctttttgctttgtcttacttctttctttttgcttctgtgatttgtgtttgtgctgctatttttcatgctttgngattgatgtattagagagaagaggggagccaaaagtcgcgtgctctgtggggggagggccgacctcgcagtgtgttnttgtggttggtggtctgtctttctctcactgttctttttgtgtttgtgggttagatttcgtctggtgtgttatattnntaggtcggcatgtcacgcccggctggtcactctcccccccgccagcgcngaaaaaacacccgacatcaccgcggcgccgcggtacnaccttactcctccgcgcacacagccatcccggcgcgcgcnaacatcctacgttcgcgccgctgtgataaatcatataatacacaccgggtggttacacgtaagatcttgctttgtgttgaatnatatatgatatcgggtgcgccggagtgaataacgccttctgctgtactatcctctgtctttgcggtgactgtgttccgttcattgtattagtgtggtgggcggggcaagtatcatcactactantgtttgtgggtgtatactatattgcaggctgcggcctgtccttataccacccaccgccccgccgttgatgctgtggcgactggtgcggcggaatacacttaacactcggcggccgcgctggcgtctatctcatttatgtacaacgtatagtggcgtgcggctcgtcngcntcggcaggtcacacaantacgcaccagccgcgcgttatctgctccggtcgcgcggcgctggttatttaactttatgggtgcgcccccgccgctgcgtatactttgttttgatcgtaccctcgctcggtgtttataagacggtggtgtggtgtcgtataatctgcgttcgtaggcggagcggcggcggcgcgcacgaagcgcgccgcgcgcgccccgactcggtgcggtgaagnccacccgccactacaccgtctggtgtttcctttctcttgtctacacttgcgccgcgctctcctccagtattactatcaaccacctctctctgcggtgtgctggcgngtctgcgccgtggcgggacaatcacctgtcggcggcgtgcgttgcgcgcgtggaggtcgaaaatatgagcctagtggcgctcgccgcgt

SEQ ID NO: 2421 - DNA, 1476 bp, Glycine max
  misc_feature (70)..(70): n is a, c, g, or t
  misc_feature (103)..(103): n is a, c, g, or t
  misc_feature (130)..(130): n is a, c, g, or t
  misc_feature (262)..(262): n is a, c, g, or t
  misc_feature (295)..(295): n is a, c, g, or t
  misc_feature (444)..(444): n is a, c, g, or t
  misc_feature (623)..(623): n is a, c, g, or t
  misc_feature (788)..(788): n is a, c, g, or t
  misc_feature (965)..(965): n is a, c, g, or t
  misc_feature (972)..(972): n is a, c, g, or t
  misc_feature (1000)..(1000): n is a, c, g, or t
  misc_feature (1222)..(1223): n is a, c, g, or t
  misc_feature (1227)..(1227): n is a, c, g, or t
  misc_feature (1376)..(1376): n is a, c, g, or t
  misc_feature (1381)..(1381): n is a, c, g, or t
  misc_feature (1384)..(1386): n is a, c, g, or t
  misc_feature (1389)..(1389): n is a, c, g, or t
  misc_feature (1391)..(1391): n is a, c, g, or t
  misc_feature (1393)..(1393): n is a, c, g, or t
  misc_feature (1395)..(1395): n is a, c, g, or t
  misc_feature (1397)..(1398): n is a, c, g, or t
  misc_feature (1401)..(1402): n is a, c, g, or t
  misc_feature (1406)..(1407): n is a, c, g, or t
  misc_feature (1427)..(1427): n is a, c, g, or t
  misc_feature (1443)..(1443): n is a, c, g, or t
  misc_feature (1447)..(1449): n is a, c, g, or t
  misc_feature (1451)..(1455): n is a, c, g, or t
  misc_feature (1457)..(1458): n is a, c, g, or t
  Peptide Sequence Number=SeqID_6115
  Probeset Number=SeqID_12200
caagtagtgaagatgtgagtagcgctcataccacatcaccgtttcagcttacacatctgtctctgtccantgtgtgagtatgctgcaatcatcatacagttanataaatatatgtaattatgtgctacgncattcctatccacctatcttgttcatattgtgtcgtgattgtgctgatatacgtgcggcagtcttaccaagtatcgagtcttgatattatcataaccacagacatgatcgcacactattcatcaattgcgcnttcagctcactgcgctcttctactggatgtatntgtccagtatcgtatattgttgaccgtatatggtggcatgaagcagtagcgcagtaggcgttctgaggtcaataaggtgcgcgtggtctcatctcttctctcgttattcttgagtgttgcactcgtttgtcttaacgttatagtccatnacaactcttctacgcgcatgacgacgtcttgttacatcctctctactagatattgctcgctccaccctatctctctttcaacgtcgaggcgtgccgtctcgtacgtcactctgcactcgcacgcgcgaggtctgacctacacgctccatgtgatatctgcggtgcgcggtatgcacacntatagacatcggcggaacgtacgaatggatagcatgttgaagttcaaggatatacattgatgtatgatgatatgtgtctggtcggagtgcgcgtccgcgaggctcgtaccagagttcatgtagctacgtcgcagcatcctcgtcgtcttgactctccatcctatntactgttctcttacctattatcttctacttccacgtatacgatagaaccacgagcagcacgagcgccagcccaacatgataacgcagcgttcaccaagtggtagaggttgtggtttattgtatgtgagtcacgtagagagtcgtgcgttagttgcactacttgtcatcttcgctcantgtattntaaactccgtgagctagatttaagaganctcagcaggagagagtacgagttgtactcgccgttatttcgatgtctttctctatgttattgagtctgcttgtctccctcgtaattctttctccagctgcccgatgcgtctcaccctctatccctccgccctttctccgccgtccctctcccccttcctactccttgtcccgcgtagagttattagaccgtaataaatgtggagatatatgcggtcgggggnntatncccaccctccccgccgtggcgagcgccgagcgagcccaagggggaggggcctggcacctctccgtcagtgcctctctccactcgccacactccccgctcacacaccctgccttcctcgcctacccgaatggtagtgcgactcgccctantagtnttnnnatntnantnanngtnnggannggggggaatgggggcagacngagaaggagaggaganaggnnnannnnnanngtcccggggcccccaaaa

SEQ ID NO: 2422 - DNA, 1773 bp, Glycine max
  misc_feature (9)..(9): n is a, c, g, or t
  misc_feature (17)..(19): n is a, c, g, or t
  misc_feature (21)..(25): n is a, c, g, or t
  misc_feature (27)..(27): n is a, c, g, or t
  misc_feature (37)..(37): n is a, c, g, or t
  misc_feature (43)..(43): n is a, c, g, or t
  misc_feature (67)..(67): n is a, c, g, or t
  misc_feature (72)..(73): n is a, c, g, or t
  misc_feature (82)..(82): n is a, c, g, or t
  misc_feature (84)..(84): n is a, c, g, or t
  misc_feature (87)..(88): n is a, c, g, or t
  misc_feature (96)..(96): n is a, c, g, or t
  misc_feature (98)..(98): n is a, c, g, or t
  misc_feature (100)..(101): n is a, c, g, or t
  misc_feature (111)..(111): n is a, c, g, or t
  misc_feature (146)..(146): n is a, c, g, or t
  misc_feature (267)..(267): n is a, c, g, or t
  misc_feature (410)..(410): n is a, c, g, or t
  misc_feature (429)..(429): n is a, c, g, or t
  misc_feature (459)..(459): n is a, c, g, or t
  misc_feature (475)..(475): n is a, c, g, or t
  misc_feature (556)..(556): n is a, c, g, or t
  misc_feature (588)..(588): n is a, c, g, or t
  misc_feature (609)..(609): n is a, c, g, or t
  misc_feature (637)..(637): n is a, c, g, or t
  misc_feature (760)..(760): n is a, c, g, or t
  misc_feature (977)..(977): n is a, c, g, or t
  misc_feature (991)..(991): n is a, c, g, or t
  misc_feature (1014)..(1014): n is a, c, g, or t
  misc_feature (1021)..(1021): n is a, c, g, or t
  misc_feature (1113)..(1114): n is a, c, g, or t
  misc_feature (1119)..(1119): n is a, c, g, or t
  misc_feature (1142)..(1142): n is a, c, g, or t
  misc_feature (1256)..(1256): n is a, c, g, or t
  misc_feature (1388)..(1388): n is a, c, g, or t
  misc_feature (1530)..(1530): n is a, c, g, or t
  misc_feature (1560)..(1560): n is a, c, g, or t
  misc_feature (1562)..(1562): n is a, c, g, or t
  misc_feature (1595)..(1595): n is a, c, g, or t
  misc_feature (1617)..(1617): n is a, c, g, or t
  misc_feature (1650)..(1650): n is a, c, g, or t
  misc_feature (1678)..(1678): n is a, c, g, or t
  misc_feature (1709)..(1709): n is a, c, g, or t
  misc_feature (1738)..(1738): n is a, c, g, or t
  misc_feature (1770)..(1770): n is a, c, g, or t
  Probeset Number=SeqID_12201
ggagggggnaggggggnnngnnnnnanccccggcgcnccgccnggcgcggcgctgcgcaatatatanaccannacacaaccncnccnnctacctcncntnntacactacangcgcgcgttgccgtccctcctcactttctcccgcngcgtctctcctctcttacatcttatatgcgtgatctgtgtagctctcgctctctcttatattatgatactattttttttgcatgctcttatgttatcggcgtgtctgtatctctttgtctngagggggagtaggtgggggggggagtgtagattgtgagacgagtggcgactgcaagacgcgacgtgatatacgacgcgagctacgaatatatatggctgtgtgcgatgctctggtgttatgagaatctctatcatatcattcnacagggtgtgagagtgctngtgtatatgtgtggggtgttaagttgaatncgtagtctatagcaancgttacgatatcatgtgtgtctcgcttacccggtacctaaaattgtgtgcggcgaccgcgcgcggctggcgcgcgtatcgntgtctgcgccgtctactcatctctagccatcnttctactctgtatattataantatgctggcatagtcgatggtcgcagangacaccaagggggcggagagagagtaggccgccgagtgcgcggcgagaaaagataaatggggggtcagatgagatgtagtctaagataactatatatggtgcgtgatacacaacgtattgtcncagcggcggtgtggcgctctgtgtacgttagaatggtgaccgatgtgagtatctcaatagacgacaacgagtctgtgctcgctcatcatcctagctacatagagtgtgatgtatgatatattacgattatatatgtgtattgtgatagagctggtgtctgtgatctgtgtctgtctgtgtgtgcgtgtctattctctgcatgatgagatactataantcacactgtgctangtgcgctgctctgcgtctctacnatacctngtcagtgtccgtcgtcgcaccacatctagtcctgcgcgattcacactcatacagacacacacagatcgatgagacagttgtggtgagtggannatgtntactcgtcacatctctgagtcangatacacgatctagatgtgagcgtgtcacttatagcttcggtcttgggtgtatactatgtagctgtgtgcgtatgctgtactgagacaactatgatgcgtatagtcttctacantatgttatgtcgtcgtcgatgtgtgtgatcgctatatgtctgctcacgctcgcgacgttgcagcaactggtatcctctacttcgtgttgcatattctacacttttatcggacttatgagttatgtctatgtngtgcgcggtgacttataactatatctcggtgatatcgcgctcatggtcttgtctgctcgcttcatgcattcctactctgctaccttcgcgccacgcacatacaatcctcgtcgggccagcgcatatcagctcgcattatatncatcagaatcacactacatcactacgatantncagcaagacgactcgtatgtctatatacagctncggtgttgtcgctgtgtcgctnatgactgtatcgtactcatctgtatgtgctcgntcagtcgctcatgatatgtatcattatntgctatcaacatgatattacatgactatttnggattgactggacggatgtgacacttcgntatatatcgtcgtctgactctcgttattatcncaa

SEQ ID NO: 2423 - DNA, 2649 bp, Glycine max
  misc_feature (1)..(1): n is a, c, g, or t
  Peptide Sequence Number=SeqID_6116
  Probeset Number=SeqID_12202
ncccacgtttttgttttctgtgtgtattttttttatatacaatttctgtattaattcaaagttaatgtttttctgagcatgggactttttatgggggatcaaggcaaagaaaaaattcggcttctgcatcttcagatagggagggggaacttctctatttttcacggcatattgtggtttgtaaagactgttactaggtggagattccttagtttacactaaggggcaagagaaaagtgagtctaaagatgggctatatatgtgatttctgtggagaccagagatccatggtgtactgccgctctgatgctgcatgcttatgtttgtcttgtgatcggaatgttcattctgctaatgccctttctaagcgtcattcacgcacccttttatgtgagagatgcaattcacaacctgcctttgtaaggtgtgttgaagagaaaatttcactttgtcagaattgtgattggttgggtcatggcacctctacatcttcttcaacacacaagagacaggcaatcaattgctactctggctgcccttctcatcgatttcttatacacaatgcacaatgttcttcagtaatagggtttctttttcgtagaagtaactcacaattacaattgaagtaaatatgccatgcaattgaagtgtatccatggcaatcaaatcaaataaaatacaaacaaaacttttatggatacatgtccaaaaatatagaatgttgtgtcatcaaaataaatagcaatagcagcatcctattctatacataaataaccttcaaatttacaatttgtcatacctaaggaactgttgggtcattacacctctaactgcatttatgtatattctgcactatacatggcaaaagagagagggacaaaatattcctacaacagtgtagaagattgtctagaacttatcaaattgagccacttatcatgccatcataggcacacttgtacatgtgactcgggatcagtgaggagttgacataaaatatgacaaactatgagcaagatcaaggccaaagggcttaaaaaagaattttgcattagattagtattaagaagcaggattttgccaagttaaacagaagggcaaccaaaattcatgacacattgcctgaaggggggcagtttttcttttactcatcgatttcttatacacaatgcacaatgttcttcagtaatagggtttctttttcttagaagtgactcacaattacaattgaagtaaatatgccatgcaattgaagtgtatccatggcaatcaaatcaaataaaatacaaacaaaacttttatggatacatgtccaaaaatatagaatgttgtgtcatcaaaataaatagcaatagcagcatcctattctatacataaataaccttcaaatttacaatttgtcatacctaaggaactgttgggtcattacacctctaactgcatttatgtatattctgcactatacatggcaaaagagagagggacaaaatattcctacaacagtgtagaagattgtctagaacttatcaaattgagccacttatcatgccatcataggcacacttgtacatgtgactcgggatcagtgaggagttgacataaaatatgacaaactatgagcaagatcaaggccaaagggcttaaaaaagaattttgcattagattagtattaagaagcaggattttgccaagttaaacagaagggcaaccaaaattcatgacacattgcctgaaggggggcagtttgtgatgatgctgtcatgtcggctgaaattgcaactgagaatgtccattgcagtgaaggacacacaatctttgctcctgagcttttacactgtcaatttcattggacaagggcctgcttacaaccttcttccccgtgaagaaaatttatgcccactcagtagcttctggtttggttcaaagggtcatagtcatagacatcaccagctttgacaaatcggcccttcacacgctttctgacatcagccctagccttgcgagaggcatatcttactttcttctcgaacttccgggtcttctttttttccttgtagcgcatgacagcattgcttcggttagcagaatgcagagaactctcagggcaaggaggacaccagggaggttctcccatgagaagcattgaagaagcaccacagtcttgatagtcaccagcactatctttggtaacacgagaaaattatgggatttattgggatggcatagacgcacagggaactgacggttcggtgctgggtgtcatcactgaagctgcgaatgctgcattgattcatgctggtcggatacaatgggccaacgtagaacacgggaacgcaagagtgacagtgcgctgcctgcggtagtgaaagggagtagttgagtttgtcttcacttcgattggtctgttaatggtaccttgctgcatgctgggttgagagcgagggagagccccgccgacgagtccggcggagctcccgcggccgagatcacctccatccgggccgaaatcatcaactaaagcttcctttatcatattggccaacagcttattcaggagcaaaagtagaggcagtttaaagatgggttacttatgagatttttgcggagaccagtgtccctggtgtactgccgatctgatgctgcctgctt

SEQ ID NO: 2424 - DNA, 1502 bp, Glycine max
  misc_feature (1)..(1): n is a, c, g, or t
  misc_feature (6)..(6): n is a, c, g, or t
  misc_feature (15)..(15): n is a, c, g, or t
  misc_feature (87)..(87): n is a, c, g, or t
  misc_feature (158)..(158): n is a, c, g, or t
  misc_feature (278)..(278): n is a, c, g, or t
  misc_feature (286)..(286): n is a, c, g, or t
  misc_feature (288)..(288): n is a, c, g, or t
  misc_feature (290)..(290): n is a, c, g, or t
  misc_feature (714)..(714): n is a, c, g, or t
  misc_feature (1257)..(1257): n is a, c, g, or t
  misc_feature (1313)..(1313): n is a, c, g, or t
  misc_feature (1433)..(1433): n is a, c, g, or t
  misc_feature (1445)..(1445): n is a, c, g, or t
  Peptide Sequence Number=SeqID_6117
  Probeset Number=SeqID_12203
ngctgngcgcgatgngatcgtcgctatacgcgcgtcgcatcaccatctctataccagtgtacattggatgcctacaatgacacaggncaggagtcagtacttacacactacagatctaactatgtacatcagatctcagatttcgtctgaaggactgncgctgccatgcgacggctcgtatcgcgaacatcgtatataagattctcgctcacagcgaagactcgcgcgtagcagtatacacgctaccacatcatcgccgatccggccagacatcgatnatattcantntngtagtatgggataaatcaagcgcgcggcgcacaacaatggagccgcctcgcggacactcgcctcgatatgttgcgaggaagaaaatatttcgtttaggaggagcaggtgtcgcgccaccacagctgacgtgtcggtctgacacagtatagtcagcgacaccaaccacctatagtgagtacacacgggctagacagtggtatacagcatgaagcggatataatgtatgtgtggcgacacagcactccacggctcgatcaaataggctggtgccacgatgggctgtatctctacaacctcaatcccacctggtactcctatacgatcttcttatcatattaattcggaatgagcacacacagacgtagcaccggcgcgctacaacatacatcataatcacgaaacatggagaccgcgtatacaagngggataccgcatcacaaacgtcgactcacgtgtagtgtaacgtgacatagtgccgcgattagacaggcgcacacatataaatactccgccgcgagcacaatacgaggaacgagacgtacgccctgtagacactcatgactcacgcaaggctcgagtttgtgatatatataataatataaggtatgagagcgttcatactgacagcaggcacagacactacactgctgcgacgacggtgtcaagtgtacactcctcgttattatttactcggtgtgatgcacgaacacaacattcaacctacacaccacacgcctatcttccatctcgagtagacggcgatcggacgaacataaacgagtggagcgacagcgagctataaatagatagataaaattaataacgcagcgcacacagtcacgtggctcacggccgtggtcgtcgtgtataatattacgaatagatacaagcagcgctgtgtggtgagcgcagggcggcgtgatattacaagtgcatacgagctactatcatatttatcgtaaccgnctgcgcgccggagaaactcagaatgccctccagcatgacgatccaagacctcaccnatgtgtttcccgcgctgtgggcgcatactgccttcgaatgtcatatcaggagaagatagaggggagacctatggtcgcgaagcatatcgctcagggaaggtgttagttaatagagagatnatagatataggngttgtcgtgcaccgccgcgccagagcaggggcgataggttagagcacaccataacac

SEQ ID NO: 2425 - DNA, 484 bp, Glycine max
  misc_feature (475)..(475): n is a, c, g, or t
  Peptide Sequence Number=SeqID_6118
  Probeset Number=SeqID_12204
ccttcccctttctcctcaccttccgacagccgagcgtgggcagcggagagatccagtgagtcagtcggcgccgttcccgtcccagaggtcgtccctctcctgccgcaaggcagcctccgcctcatggtacgttcttgcgccgaagatcgggtcttggggttgcctgtgatggggacggagatggtggagctcggggcggggataatggaggtggtgatagtggaggtcgtggccgcggcggcggcggcggcggaggccgcggcgagcgacgagggtgtcccccttctagcggctattccaggcttgtggcgccgtcttcggtgccggtggcaccattcccgtgcctgccgaggatgaggccagaagacggttcagtgaagtgaacaaattactcctttcatcgatgcatgcaaagtcatatttttgggttgatagttcatactgatctgcgtgacagtggcacttcattaccgcngtgatcgac

SEQ ID NO: 2426 - DNA, 1808 bp, Glycine max
  misc_feature (1)..(20): n is a, c, g, or t
  misc_feature (25)..(31): n is a, c, g, or t
  misc_feature (53)..(53): n is a, c, g, or t
  misc_feature (57)..(57): n is a, c, g, or t
  misc_feature (64)..(64): n is a, c, g, or t
  misc_feature (91)..(91): n is a, c, g, or t
  misc_feature (153)..(153): n is a, c, g, or t
  misc_feature (235)..(235): n is a, c, g, or t
  misc_feature (322)..(322): n is a, c, g, or t
  misc_feature (364)..(364): n is a, c, g, or t
  misc_feature (372)..(372): n is a, c, g, or t
  misc_feature (395)..(395): n is a, c, g, or t
  misc_feature (470)..(470): n is a, c, g, or t
  misc_feature (597)..(597): n is a, c, g, or t
  misc_feature (725)..(725): n is a, c, g, or t
  misc_feature (1062)..(1062): n is a, c, g, or t
  misc_feature (1073)..(1073): n is a, c, g, or t
  misc_feature (1094)..(1094): n is a, c, g, or t
  misc_feature (1147)..(1147): n is a, c, g, or t
  misc_feature (1153)..(1153): n is a, c, g, or t
  misc_feature (1200)..(1200): n is a, c, g, or t
  misc_feature (1206)..(1206): n is a, c, g, or t
  misc_feature (1223)..(1223): n is a, c, g, or t
  misc_feature (1241)..(1241): n is a, c, g, or t
  misc_feature (1391)..(1391): n is a, c, g, or t
  misc_feature (1398)..(1398): n is a, c, g, or t
  misc_feature (1428)..(1428): n is a, c, g, or t
  misc_feature (1480)..(1480): n is a, c, g, or t
  misc_feature (1579)..(1579): n is a, c, g, or t
  misc_feature (1588)..(1588): n is a, c, g, or t
  misc_feature (1616)..(1616): n is a, c, g, or t
  misc_feature (1623)..(1623): n is a, c, g, or t
  misc_feature (1660)..(1660): n is a, c, g, or t
  misc_feature (1673)..(1673): n is a, c, g, or t
  misc_feature (1677)..(1677): n is a, c, g, or t
  misc_feature (1727)..(1727): n is a, c, g, or t
  misc_feature (1808)..(1808): n is a, c, g, or t
  Probeset Number=SeqID_12205
nnnnnnnnnnnnnnnnnnnnggggnnnnnnngggaatggccgtgagcgcaganaggngtagaancagatgacgcgtaatagagtagtagantgactgtctgacaccaggagacagacgagcgatggcgtactattcttcatgcaaagctgagngtgtacacgcgacgcgcgagtgcacttctcatcatcgtagtgagaccggacactgtatgttatcgaatacatacaagatgtnagtgctagatatatttagtttgtacactgatgtgttatcaccaccccgacgtacgactcatgtagtctatcatcgctagtagctgtnacgatactagtatgtcatagtgatattagtgtctgttgttangtacaganactattatttgtatatacatgtntgtgtagtatatgtatctcgatctcttgaacagtcgactacgccactgacgtcattagcgtattactacttatgncgctatgatactccgctcatcactggtgcgctcctccctggattcatgtgtacgtcacatgtctacttgctgatatattcattctatatatgtcattacattattcactcatgctataatttaattntaatgtatctagctcgtagcctcctgcctctcacatgacgtgcccaatccacgtgtagtgcgtgtagtcgccgctcgccattatccgcgtcacgtgagtcgcgtgtagatgcgtcgttgcgtcggtangactcacactggcacgaccgcgcacgcgcatatactatccgcccagcccgctaacttctactacgataccccatcagcgtgcatcgtctaatgatctatctacgcgatagtggtgctgattgatgatgcagcgcgcacacctgcgatccacacgcctcccacacgcgcacgtcgtcgtctagtctcgattactaccacacagacctactctcacactgcaatctgtcttctataatataatatcatattagctatacgctctctactgagtatagtatctgatgtgagcacatgcatgagctgacgtgcacgagcacaggcactgcgtctcacgctngtgtgatattnagatatactgctaatagacancatcgcgacgaacacgcgcatatataacgatcatcatccatctacctgctganctctangtacatcatcatcacactactgcacatcacatcgtctgagaacttgnagtctnagtcgtatagctcatgnatgcgtatcatcgtctcnacacgctgcgccctctccacgcacctacttagcgcatacgatcattcgatatctcgagcgcgccgccatcctggacgtacgattgtattcattgtcttgatctctgcgcgacggctgtcactctctatctgtaagcgatgtactctgtanctgctgnactgcctggcatgcgtactctacatcgcgntactaatatagtaagatatctaatatcacatataaacgatcactctcacacnaatacacgcgtctacactctacccactgctctttaatctcactctctatcaagtgctgctatggataaatgacacatcatacctaccacgtcgtaatcnacaaccagngactatattactaccacatctgcacgcngaatgtnacatagcagaaagacgagatgcagcatacatataacngtatgaactagtnatancagcacatcgcgcaccacatatagagtctgtgactccaacgtcaccgcanatactgaatcatggatggatagttgatatacacgacgtgaccactatcagctatccactataacgaagcagtacacacacn

SEQ ID NO: 2427 - DNA, 574 bp, Glycine max
  misc_feature (156)..(156): n is a, c, g, or t
  misc_feature (202)..(202): n is a, c, g, or t
  misc_feature (216)..(216): n is a, c, g, or t
  misc_feature (259)..(260): n is a, c, g, or t
  misc_feature (298)..(298): n is a, c, g, or t
  misc_feature (318)..(319): n is a, c, g, or t
  misc_feature (328)..(329): n is a, c, g, or t
  Peptide Sequence Number=SeqID_6119
  Probeset Number=SeqID_12206
cttaaaatattattattccttgtttttttttttcctcctcctcctccctactactaccactctccaccaccaccatccccatcaccgccgtctccatattattacaaatcccctccacctccatctccatctccaccacctccttactactatcanagtcctcctccaccatctcccacttctcatcctccctattactacnaatcccctccaccnaccacgtcatatcctccacctccttacactacgtgagccctcnnacactttctcatctcctcccccaccatacatacacatncacacctcctccttcccagnntctgctccnnagtacattacaattccactccactccggtttatatcttgcttcccacttccacttatctacagtaagcctcaatggtgaagcaccatccggaagaccaggttcaagttccatcgagaataaggcagtttattttggaccaagggaacctttttccccgccaaagttttagaaaaaagccgaaggggcctccctagccaaggtttaagtccaaaccgggttgttcattgggtgggcgccttggcac

SEQ ID NO: 2428 - DNA, 696 bp, Glycine max
  misc_feature (1)..(95): n is a, c, g, or t
  misc_feature (696)..(696): n is a, c, g, or t
  Probeset Number=SeqID_12207
nnnnnnnnnnnnnnnnnnnnnnnnnnnnnnnnnnnnnnnnnnnnnnnnnnnnnnnnnnnnnnnnnnnnnnnnnnnnnnnnnnnnnnnnnnnnnnncatatgacaatgaccactgagataaacccaagccttggggggccactttcagtttcagaaacctaaagttcctagacttctctggatttgtccagaactacacgttttgcaatgtcatcagcaataccaatggttggcgtgctaattgtgcccagaataaattaaaactgcgaaaagaagaggaaaaaaaccagcgattcagttaaagaaagttatgggcaactgatggtgcttgcttagtggaaagaaccatgacacggccttttgaccctgttggaggtggaatatccctgcacccctcttcaagaatatactaacgaattcctataatgtcccactgaattcctttagttaaaaaaacaccttccaccttctaccctccacccccctaaaaatcacattaatgaaaaaggagcttggcgtgacctagaaatactatgactctgagtgtggccaagaccctaccacttgtttgttgtataaaacttgtttactttttttttttctaacagttttgtatagcgtgtttggttctgtgtcaaaatgtatgagacatacacttagtgtgtttggtataacgtgtacttcttacgttttcaan

SEQ ID NO: 2429 - DNA, 412 bp, Glycine max
  Peptide Sequence Number=SeqID_6120
  Probeset Number=SeqID_12208
aaacttcagtcgagatcagcttggcaatattgcttggtcatatgctgttcttgggcaactggaccgacaattcttctcccatatctggaacactctgagccaacacgaagagcagagagtctctgatcagtacagggaagacataatgtttgcatcacaggtatatcttgcaaatcagtctctgaagcttgaatacccacatctcaatatgggcttaagagatgatctggaagagaaaataacaaaagcggtgaagagcaaacggttcaatcagaagacgacctccttgtttcagaaggatgttggacgtcttttatatagtaccggacatgaatgggttagagaatacacggtggatggttacactgtcgatgcggtgttagttgatgagaagctcgcatctgagatagac

SEQ ID NO: 2430 - DNA, 419 bp, Glycine max
  misc_feature (355)..(355): n is a, c, g, or t
  Peptide Sequence Number=SeqID_6121
  Probeset Number=SeqID_12209
tcgagtcagctacgtaggcccccccccccatgaactcggaaacgctcacttgagatcgaaccaatacggacccggtttgagacaattcaaattcattgaaaaacacttccaagatttctacgaagatcaatttgatttccacacctattgtcttagaaagtacgatcttagagcttatgttgctctcctcagaaaagaagatgatatctacaacaataaaatggtatatcaagtccgctattagcatgatcaagggacttcaagcctatgataaatatcttcctgagcttcaaagacaagaggaagaagaaaagaaaatgttggaaggaatggacgctcatgaaagaaagagatntaagaaagaaaaggaaggcaaagacaaggatagtgatgctgccaaagaaaagcttgacctcagc

SEQ ID NO: 2431 - DNA, 570 bp, Glycine max
  misc_feature (501)..(503): n is a, c, g, or t
  misc_feature (519)..(519): n is a, c, g, or t
  Peptide Sequence Number=SeqID_6122
  Probeset Number=SeqID_12210
cccccttttggacccccagggtttcacttttattctccccgctcatttttgtttgggaatttttaagggaaaccatttttccccaggaaagcctttgtcccctttttttcccaagctttttaacccccccctaaatgaaaaaaggttacccctcagggccccggttccgaatatttttccgggggcccaaccccacaaaaggggggcccccccccaatttttttttttttattttattttttttttttttttttttttttttttttttccacccttttttttttttttttttttttttttttttttttttttttttttttttttttttttttttttttttttatatttaaacacactcattgcacatagaagcttaaagggctgtacttaagggcgtaaagaatgaaattctgagttctaacgccactaaccctatgctgacgcgacttcttgagaactgtaagagtcccaaacatccggttacaaagacgccccacagcnnncgacaaaaggaaggcnatgctttattcacttaaataaagcgcacaactatggccaatgagtgtgttt

SEQ ID NO: 2432 - DNA, 1076 bp, Glycine max
  Peptide Sequence Number=SeqID_6123
  Probeset Number=SeqID_12211
agtccttctcatgactgaaattgatcgtctcagagaggaactttccaaagctagcatcagaagttatgaagtctcacccgataaacttcatggagacactgattattcagaaagaacaaaaagagctggcgctgctaaagtggataatacacagattactcaagaaaaggcgagattggaaggagtcgtctttgaacttcaaaacaaggttgctgaattagagaataaaaacatcttgtttatgattgaaattgaaagacttggtatcattgtcggagaattgcaagttgaaaatgagctttggaggcaacaagttgttgaggctgaagaaaactcttctcaacagattgctgagttcaagaggcaatatgaattaatcattagacctcaaatcgaatcagaaatcagaaatgccacaggaaaacttgaaagtgaaaagacttccatggatattcaaatccaatctcataagtcgaagcaaactgactacgaaaatagaataaattatctccaagctgatctcgctaaactgcaagatagaaatcttgagttatctagacaactcgaagaatggaaactcaagtacagccaacttgaaagaggcaatgaaagcctcaaatattccctcgaaaatgatytcagattaaaatgggaaagagaaaagagtgatttgaattcgagatgggcacaagatagagctcaatatgaagctgatctcgcacgatgcaaaragagaatttcggaaatcgaaacaaaggctatccttttaggcacagaaaatgaacacctcaacattgttattagagacaaagactctgaaatcgaagttcttcgaaacagattgttagaagctggmcaagaacaaagaaagcaactcgatcagcttagagaacaacttgaaatcaccttcaatcaaagactsgaaatcgaaattagatccagagcaagtcaattggaagctgcaagagattcacttgaaagtgaactcagaaacgctcaaaatagaatcaattatcttgaagatcaattgacctcattaaataacgagaaccaaaggctcagacaagatatcctcc

SEQ ID NO: 2433 - DNA, 1841 bp, Glycine max
  misc_feature (34)..(36): n is a, c, g, or t
  misc_feature (39)..(39): n is a, c, g, or t
  misc_feature (42)..(42): n is a, c, g, or t
  misc_feature (48)..(50): n is a, c, g, or t
  misc_feature (52)..(55): n is a, c, g, or t
  misc_feature (57)..(57): n is a, c, g, or t
  misc_feature (59)..(61): n is a, c, g, or t
  misc_feature (65)..(65): n is a, c, g, or t
  misc_feature (67)..(69): n is a, c, g, or t
  misc_feature (71)..(76): n is a, c, g, or t
  misc_feature (78)..(81): n is a, c, g, or t
  misc_feature (84)..(92): n is a, c, g, or t
  misc_feature (96)..(96): n is a, c, g, or t
  misc_feature (101)..(102): n is a, c, g, or t
  misc_feature (115)..(115): n is a, c, g, or t
  misc_feature (125)..(126): n is a, c, g, or t
  misc_feature (158)..(158): n is a, c, g, or t
  misc_feature (175)..(175): n is a, c, g, or t
  misc_feature (186)..(186): n is a, c, g, or t
  misc_feature (190)..(190): n is a, c, g, or t
  misc_feature (192)..(192): n is a, c, g, or t
  misc_feature (222)..(222): n is a, c, g, or t
  misc_feature (230)..(230): n is a, c, g, or t
  misc_feature (264)..(266): n is a, c, g, or t
  misc_feature (271)..(271): n is a, c, g, or t
  misc_feature (318)..(318): n is a, c, g, or t
  misc_feature (366)..(366): n is a, c, g, or t
  misc_feature (372)..(372): n is a, c, g, or t
  misc_feature (478)..(478): n is a, c, g, or t
  misc_feature (565)..(565): n is a, c, g, or t
  misc_feature (620)..(620): n is a, c, g, or t
  misc_feature (676)..(676): n is a, c, g, or t
  misc_feature (701)..(702): n is a, c, g, or t
  misc_feature (755)..(755): n is a, c, g, or t
  misc_feature (796)..(796): n is a, c, g, or t
  misc_feature (832)..(832): n is a, c, g, or t
  misc_feature (853)..(853): n is a, c, g, or t
  misc_feature (893)..(893): n is a, c, g, or t
  misc_feature (951)..(951): n is a, c, g, or t
  misc_feature (987)..(987): n is a, c, g, or t
  misc_feature (994)..(994): n is a, c, g, or t
  misc_feature (1119)..(1119): n is a, c, g, or t
  misc_feature (1133)..(1133): n is a, c, g, or t
  misc_feature (1363)..(1363): n is a, c, g, or t
  misc_feature (1418)..(1418): n is a, c, g, or t
  misc_feature (1433)..(1433): n is a, c, g, or t
  misc_feature (1506)..(1506): n is a, c, g, or t
  misc_feature (1545)..(1545): n is a, c, g, or t
  misc_feature (1577)..(1577): n is a, c, g, or t
  misc_feature (1580)..(1580): n is a, c, g, or t
  misc_feature (1586)..(1586): n is a, c, g, or t
  misc_feature (1605)..(1605): n is a, c, g, or t
  misc_feature (1618)..(1618): n is a, c, g, or t
  misc_feature (1640)..(1640): n is a, c, g, or t
  misc_feature (1670)..(1670): n is a, c, g, or t
  misc_feature (1686)..(1686): n is a, c, g, or t
  misc_feature (1767)..(1767): n is a, c, g, or t
  misc_feature (1773)..(1773): n is a, c, g, or t
  Peptide Sequence Number=SeqID_6124
  Probeset Number=SeqID_12212
atattctttaataacaacaacaatcttcataatnnnccnccncccccnnntnnnngngnnngagngnnngnnnnnnannnncgnnnnnnnnnagtngtacnntgcgcttgttttngaggctgggnntgtttgtccgtagatgtcgtgcgccggagatngaccgtgggtgtttganatgtcatctgntagnancaagccagtacgagcgaggtaaatgcagangatcgctntagtgcgactcgcagcgagcacgcgaatataaannnaaggnaggaataggaacgtgtgttgtgtcttaacgttgatctgtgtcttaangtggcgtgtccggtggccttttctttagggtgagtatgtggttgatcntgcgcngacgtcgcccctcgtatcacgcgacacaaatagcccacagcgctctacacatacaagacgtaggcatgagtcgctagctaccgaaggcactgtctacacactctgntgtgtacacttacgcaccgcatctcacaccatgcctaggtccggctcaagagcggaagcgatgcaatctatcaatgagatttgtatnatgctaattattatattattttcgagtattgtgcatccttgctcccaccaccgcnatcatacaacctatcgtctcgcacacacccgagacgagtgcgtcgcggttgctctncgtcagcgtcatgtcgtactctcanntttccgctcacttgctgttcgcggtcgggtctgcgtggtcgcctctggcgtgnggtcgcgcgtatgtgatggtgtacgatccgcggcgcgatcntactgccatctctgcgtcatcggaagcgagaggctncgagtgatcagtgatgagagngcggatgtagaagtgtaagcgcccgcgccgcagacacagncacaaggccagcaacgctacgctatgtagacatcgcgccgcgaacgcagacacacgantggctcgacatccacgccagcgacgcgccgcactancgacaanactactacacgctcgccacatcaccgacgacccgactcacaccatcaacattccacgctcacttaacactattaatctcaacagcaacaataatcacgacacttctgctcagcctgacatccacnacatctcgcgattnaccgccagctatctatcatgcataccacacacccaacaatactatagccacgcactcgtacatgtactcagcaacacatcatctacataagacagcacaagcagatcagagtactgctgctatcacatgcaaatactatcaccgtccatgcacatctcactacatcaccgccatccaacatctgatacgctattcgtcagcgctcaatcgactaacatccatatagtacncgcacgacacgtacatacgtacacgactgacgcgctcgcgcatacactcgacatnatattatatactatnacttatacactgatgcactaatatagactcaagaactacatagaatacacacgtctctatcgacccatgctcnatcagcaccgccgcactcaccgccagtcgcactatccancagcaagtcatataacacaaacaagcgacaancanatgcgnagagatatgctaaaacaangatagtgtctgtnaatattatatatcatagagctngtagcagcgatatgcacaaggaaccatctnatacatatacgacgcnttgcggtcctctccatctgacacctatcgtctcgccgagatttgtatctgcgtaattgtattgagtgtgctcgctcactcnatgccngctgttgttacgcgactatcagactaacaacatcccactaacccgcttcatctacgctcgacaccacc

SEQ ID NO: 2434 - DNA, 1557 bp, Glycine max
  Probeset Number=SeqID_12213
aataataaaaataactttaattcaaattaggacacatcttaatgaacaaagtttccattgttttatgtcttttactggccttcgccactttgggttcagccttttacgactctaactccaatgtcgtaaaacttaccgctgccaactttaaagaaaaggttcttcaaggcaatggtctctggtttatcgaattctatgctccttggtgtggtcactgtcaaagactcactcccgaatgggagaagcttgctggtgctttgaagggtgttataaatgtcggtgctgtcgatatgactaccgatcaagctgccggagcccaatatggtatcagaggcttcccaactattaaattcttcggtgctaacaagaatgctcctgaagactatcaaggtgaaagaagtgttaatgaaatgatcaacttcgcctttgatcaagctaagagggctgctaacagcagaattggaggcggaagtggaggaagttataacggtggatataactccaatgccaacgctggaggccaaggtggctgtggtaacccaaatgccggaggttctggaaataatggaggcaatggaggtagtgctggtggaaatccaggagataaagatgttgttgtcttaactgatgccaacttcgaagacttggttatgaacagtgaagacctttggctcattgaattctatgctccttggtgtggacattgcaagaaccttgagcctgaatggaatcgtgccgcatccgaccttaagggagaagttaaggttggtaagcttgatgctactaaagaacacacaattgctggcagatatggtgtcaatgcttatcctcaaataaagttattcccaagtggcccaaagagtgataatttaatcgaagattacaatggaggtcgtgatgcttcttccattgttgaatgggctcaagaaaagaagatccaatataaacccgtccaaaaagtcgaacaacttgttgaccaacaagtctttgataagtattgtactggtgttagaggaatttgcttcatcgctttcttacctcatatctatgactcatctgtcgaagaaagaaacaactacattcaaattttacaagagctagcaaaatctaacagagctaaccccgttacatttatttgggcccaaggaggtgactactacccaattgaagagtctttgggcttagcctctggttacccatctctggtcgcaatcagtgtcaacaagatgaagtatgctcaattggctggttcatttgagaagaagaatgttgactactttgttaagtcattgattgcaggcaaacaaggatcgtttgaattaagagaagtaccmaaaatatcaaaagttaccaagtgggacggaaaggacagccagcctactcaatatgagtccgttgatytttaaagcmaaacatgaaagtygkataaattttttatcaagatgkatgsgaatcattacatacaaagaattgttattattatgatccaagkactattgkatgagcgataattttatataaacatacataccctttgatcaaaaaraaccmctccct

SEQ ID NO: 2435 - DNA, 586 bp, Glycine max
  misc_feature (27)..(27): n is a, c, g, or t
  misc_feature (129)..(129): n is a, c, g, or t
  misc_feature (271)..(271): n is a, c, g, or t
  misc_feature (357)..(357): n is a, c, g, or t
  misc_feature (450)..(450): n is a, c, g, or t
  misc_feature (531)..(531): n is a, c, g, or t
  misc_feature (538)..(538): n is a, c, g, or t
  misc_feature (540)..(540): n is a, c, g, or t
  misc_feature (556)..(556): n is a, c, g, or t
  misc_feature (576)..(576): n is a, c, g, or t
  Peptide Sequence Number=SeqID_6125
  Probeset Number=SeqID_12214
ttttttttttttttttttgttttaaanaacggaggggtattattatactctatatacgcactctacaaatcagcaaggtagagatatacaatcaagctaacaataaacataaagatgaaattataccanagagtcggtataattcatcaaaatttctattatatatttaaaatttttctcaaacttataataatatattaacactgaataataaacgatgaaaagtaaaatatcatttaataatgtaaggataggtcaaaatttcaacagnggcgcagcattcaaaaagtcaaaatttgaattaagcaacagagtttcttctcttttttcttttattcaactgattttccaaatcantctttctttcttggaggatcctattttggatcttttcccattttaattcgatttccatctcacttggcaaatcatgagctaaaagctcttganccgatggtctttcaaatggattcttgctcaacatttttctgatgagcatctttaatcgttgagacacaccaggaatcgctnctaaaananctaatctgccatttcnaagctgatgccattcatccncatttgctgg

SEQ ID NO: 2436 - DNA, 528 bp, Glycine max
  misc_feature (18)..(18): n is a, c, g, or t
  misc_feature (52)..(52): n is a, c, g, or t
  misc_feature (169)..(169): n is a, c, g, or t
  misc_feature (204)..(204): n is a, c, g, or t
  misc_feature (323)..(323): n is a, c, g, or t
  misc_feature (339)..(339): n is a, c, g, or t
  misc_feature (368)..(368): n is a, c, g, or t
  misc_feature (415)..(415): n is a, c, g, or t
  misc_feature (426)..(426): n is a, c, g, or t
  misc_feature (431)..(431): n is a, c, g, or t
  misc_feature (439)..(439): n is a, c, g, or t
  misc_feature (458)..(458): n is a, c, g, or t
  misc_feature (491)..(491): n is a, c, g, or t
  Probeset Number=SeqID_12215
ttttttttttttttttgngagcaaacgcactgcaaatgttaatgtactcganacagacgacgcacttcatacagaggtctaatgagctgccacacaaaataagcgatgggggtgtacagcacacatacacacaccgcattgtaagcatatacaaaaggaactgcatgcncatgatgcttgcggattgttgtctcctcggcaagnggggttttaattctgttccctttccgacccacttaatttccttccttttctgtcatcatggctcgcccgaacttcactacacacgaagtccaaacggactgcagctgcacgcaaaaaanactgcgagtgccctancactgaaccggatcatgtgtgcgcacganctgtgcacgccgggctggagccctgcaggatctgcatgaccactcancgcggcagtanaaggnggggaggnggcaaacttcaccgatggnctccatcgacagccaaaactgggtgatggaggngtcgacagccaaaaagcaagtgcctcacccctaaagg

SEQ ID NO: 2437 - DNA, 1803 bp, Glycine max
  misc_feature (1)..(1): n is a, c, g, or t
  misc_feature (49)..(49): n is a, c, g, or t
  misc_feature (188)..(188): n is a, c, g, or t
  misc_feature (202)..(202): n is a, c, g, or t
  misc_feature (217)..(217): n is a, c, g, or t
  misc_feature (224)..(224): n is a, c, g, or t
  misc_feature (229)..(229): n is a, c, g, or t
  misc_feature (266)..(266): n is a, c, g, or t
  misc_feature (291)..(291): n is a, c, g, or t
  misc_feature (295)..(295): n is a, c, g, or t
  misc_feature (321)..(321): n is a, c, g, or t
  misc_feature (324)..(324): n is a, c, g, or t
  misc_feature (364)..(364): n is a, c, g, or t
  misc_feature (399)..(399): n is a, c, g, or t
  misc_feature (413)..(413): n is a, c, g, or t
  misc_feature (416)..(416): n is a, c, g, or t
  misc_feature (425)..(425): n is a, c, g, or t
  misc_feature (442)..(442): n is a, c, g, or t
  misc_feature (460)..(460): n is a, c, g, or t
  misc_feature (510)..(510): n is a, c, g, or t
  misc_feature (594)..(594): n is a, c, g, or t
  misc_feature (603)..(603): n is a, c, g, or t
  misc_feature (631)..(631): n is a, c, g, or t
  misc_feature (645)..(645): n is a, c, g, or t
  misc_feature (652)..(652): n is a, c, g, or t
  misc_feature (735)..(735): n is a, c, g, or t
  misc_feature (741)..(741): n is a, c, g, or t
  misc_feature (809)..(809): n is a, c, g, or t
  misc_feature (815)..(815): n is a, c, g, or t
  misc_feature (856)..(856): n is a, c, g, or t
  misc_feature (864)..(864): n is a, c, g, or t
  misc_feature (878)..(878): n is a, c, g, or t
  misc_feature (905)..(905): n is a, c, g, or t
  misc_feature (916)..(916): n is a, c, g, or t
  misc_feature (954)..(954): n is a, c, g, or t
  misc_feature (966)..(966): n is a, c, g, or t
  misc_feature (971)..(971): n is a, c, g, or t
  misc_feature (974)..(974): n is a, c, g, or t
  misc_feature (984)..(984): n is a, c, g, or t
  misc_feature (1016)..(1016): n is a, c, g, or t
  misc_feature (1043)..(1043): n is a, c, g, or t
  misc_feature (1260)..(1260): n is a, c, g, or t
  misc_feature (1688)..(1688): n is a, c, g, or t
  misc_feature (1726)..(1726): n is a, c, g, or t
  misc_feature (1744)..(1744): n is a, c, g, or t
  Peptide Sequence Number=SeqID_6126
  Probeset Number=SeqID_12216
nacgtcgtacgtgtacgatagctcaggttatatatacatatctctcaangctgtctctcacttatatgaggtgtgactactacacggtggtctgatactacagctgatgtatcagtaacatgttgtatctacaatgactgacggtgatcatgtacaatttcgacatgctgtcgcgcgtatagcgtatnacatagcgctccgntctgcgtcatcttanatccgtngtatnggctataagaataaccgagtgtggctgctcgctgcgnagagatctgtataggagatatcgtnggcnccaattaacagtatatatgattactnctngacttcacgtgctcacgtactgctgctgatcacgtcctcntataagtatgagatctggcaagcactcgcactacngcatacagcgatangtntgtactcanatctcctggtctcatantgattgcgtatcgatgangtctatatccgcgctcggcgcgcgtgagatgtatctacattagatcagtncgtctattaattcttagcatacttagagtatcgagcatagtcatcgttcgtcgtatatagcgtactttatgagcatgcattatntcgcgtgtncggccacatcgatgcgtcgagtatcgtnctgtcttcgcgcangagcgcncctttggctagttatcgacattcgtgtgctgacgtactaagaggtcggacacctgattacgagatattcacagactatacatnctcgtnacactatgagagatcgcagttcatggatatagagacgatggcggcatcacatttttttcaaacatagnctgcgncctcggctagatatgtaatcgtccatgattagttgacgacntttgagcngggcgtcgttgctngatatattataagcgactatagcctgntcgcagcgctnctcgtcaatcaagatattagactaggatatgatactcnttagtggtgatnaatantangttgttagancgacgcatacaacagaaagcatagtagccgcngggcacagatgggcgcgtagaccgtantaattattaacattgtgctcgtacattggcgcgaggagagagagctcaatatatgtgaatatttcagttcagtatacgagcatcgatcagccgtacggcgcgaaacaagagaagtaatccgcgcgtgggttgaggcggaagaatggatgtggtgcgcagctgtgaatatgaggtactgaagtcatagcattcgtgcttgtgcggtacagtatcatgngcgcattcttctgagtatcatagtctacagtcactcacgatgcaacgcctccgggcagtccatatattcactaggttgacatgtgtgcgagacagacgcagatcaagatagcgctgcagcgatcgatcgtgcggtccaggtgtgaagatatactagtaattatatgcagcgttgtaaagtattatatagtagctgacacatctagatgcgtgtagagcgctagatataattacataatttagctccctatattagggtgtggggcacatactgaattagtcagatctcatgatattctgtcgcgctggcacatccgtacttattagcattatggtgtatcgcctgcttacatcatatgttatagcctgctatgggtgagggtgaggtagtagtataattagtatggtaagtgctgcgcgaacaatctntcgtagtgctctccatacatccctgaacagagagacgngcctgttcgtttagtatntgttattgcttctactctctattattacgcggttggtggctattactgagcaacactcg

SEQ ID NO: 2438 - DNA, 1933 bp, Glycine max
  misc_feature (198)..(198): n is a, c, g, or t
  misc_feature (377)..(377): n is a, c, g, or t
  misc_feature (406)..(406): n is a, c, g, or t
  misc_feature (619)..(619): n is a, c, g, or t
  misc_feature (817)..(817): n is a, c, g, or t
  misc_feature (973)..(973): n is a, c, g, or t
  misc_feature (1241)..(1241): n is a, c, g, or t
  misc_feature (1290)..(1290): n is a, c, g, or t
  misc_feature (1361)..(1361): n is a, c, g, or t
  misc_feature (1368)..(1368): n is a, c, g, or t
  misc_feature (1372)..(1372): n is a, c, g, or t
  misc_feature (1396)..(1396): n is a, c, g, or t
  misc_feature (1405)..(1405): n is a, c, g, or t
  misc_feature (1434)..(1434): n is a, c, g, or t
  misc_feature (1478)..(1478): n is a, c, g, or t
  misc_feature (1536)..(1536): n is a, c, g, or t
  misc_feature (1609)..(1609): n is a, c, g, or t
  misc_feature (1654)..(1654): n is a, c, g, or t
  misc_feature (1661)..(1661): n is a, c, g, or t
  misc_feature (1675)..(1675): n is a, c, g, or t
  misc_feature (1698)..(1698): n is a, c, g, or t
  misc_feature (1811)..(1811): n is a, c, g, or t
  misc_feature (1813)..(1813): n is a, c, g, or t
  misc_feature (1841)..(1841): n is a, c, g, or t
  misc_feature (1856)..(1856): n is a, c, g, or t
  misc_feature (1859)..(1859): n is a, c, g, or t
  misc_feature (1873)..(1873): n is a, c, g, or t
  misc_feature (1876)..(1876): n is a, c, g, or t
  misc_feature (1878)..(1878): n is a, c, g, or t
  misc_feature (1900)..(1900): n is a, c, g, or t
  misc_feature (1903)..(1903): n is a, c, g, or t
  misc_feature (1933)..(1933): n is a, c, g, or t
  Probeset Number=SeqID_12217
ccccgcacgcgctcattatcgtccacacctacctactctcgagtactagcatgcgatgacagcgtgaggcagcgcctcggcacggtgtcaatacgcggctgccgaccgacataattgacgagattgtgcccctatcacgtatggtgtatattgggattagcacatattactttgtatgccactagtagcgactcatcnactataacaacctacgcaagagaagaagatctatatgagagatgcttaatagcaagaaatatcacatagcgtgtctactccacagcgctagctgcaggtcgctgcacgagctgcgacggattacatatcatgtagatgagacacaaccgactcatacagctcatgctacggcatatgancgtcgagctgcgacacacctcacgactangcacacagctagcgaactaagagcaactatccgcttagtcattatctagcactcacacgtattgagcgattaggcgtactgtgttgctctatagcttcgtatacgtgccctataactctctgataacctgtctcagcgtatcccatcgatatgtcgtccctccacacgtacgtgccggcgacccgttgatactgccgctgtgtatctcatgcntgcggctgctcttccgcgtcggtctgaccacggtcagtcgatatcgcgctcacgcatctaatcatgaaaacgcggagacgtcatcatatatagaattatcagtacataggacacgtcgtacatctctattatgaacctgcgagttaccattacctgcacgcgtccagttcacgtatgaactgagctgatactacgctngtgcgtagcgtgtatgcggtcggcgctgctacgctgtctgtactacgagtcgcgcatgtagagccatcctgagcgctcatatactcacccactgcacacgtcgtgcgaaatcattcgctccatccgactaacctctcgcagagtgagcaggacgtnacgcgtcgtacgtgtacagctcgagacgtcacgaacgtgatgatctacattctcatcgctgacatgatgagacgtgcgcggcacgcatctcatctctagactaagtcacgcgagtccagatatcgtcacagtacactcgatacgatctgtcgcggcactagttcacgtgcggccgctacacgcttacgcgctcgagacgcatacgctgcactacatctaagcagcggacgctagttgatgtctatcaggataggcgctcgacgtacancgtgctgagcgccagctgatgtcactcgacgacgcacgcgcgtactagntgcgcgtatcgttgctccgtcctctctatgtgcgcacgctgatgtgtacttatgcgctctctactcactantgtgttngtancgtgctcgatatacgaatgtcgangagctgcgntacatgtctcgagtctgcagtgactgacntacactaatgtgtagatgtgcagtggatgagtgactcgttacangtcaggagagaacctgtgcatcgctgatcaatctcgactggcgtacatacgaaagtgnacgaactatcactgcataactcgactggctcgtcagtgtacagattctcgtcgcacgcgtatactatcacgcnagtcgatcgtgacatatgcattaatcgtgacatatcgtcgtgttngagatangagagcagcggtgntgtcgactatgcgtgacgattcngagggtctgacgctctacacgacacgcacgagctctcgatacagctactaccagatgattatgatagcggactcatgacaacttagtgagactgtatcgtcgctcgtgatcancntgctatgaacgatatcgtacgcatctcntatcgcgcacgcagngcncgccgcatgatcantgnanactacgtcatatgtagtacgtntantgttcgtgatcgcgtgagcagtctgcgacn

SEQ ID NO: 2439 - DNA, 513 bp, Glycine max
  Peptide Sequence Number=SeqID_6127
  Probeset Number=SeqID_12218
atgatcaaagtaaaagacattttggaagttgtggcagcacttgagcctctaaacgtggctttgatcttaggctatggctcagtccattggtggaagatattcaccccagacacagtgcaatgacatacacagttatgtgtcagttttagcagtacccttccattccatttcatatcatcccacaacccttacaccatgaacttcaggttattagagtcggactcacttcaaaagtttgtgatattggtcgcacttttcatatgcatcactatatctataagtggggtagcatatgatatggtccatcagtctattatgcgactctccactatgcatcagtcattattcagaggggtcctccttcagaaaccatgataagtggagaattcaaccacgccctcataatccaagtaggcgtatggcatggtgtcatatggatccctcatttgttgttccctagttaagatataggcagctagcctttcaccactcatccattccctaagtctgcag

SEQ ID NO: 2440 - DNA, 1347 bp, Glycine max
  misc_feature (36)..(36): n is a, c, g, or t
  misc_feature (43)..(43): n is a, c, g, or t
  misc_feature (60)..(60): n is a, c, g, or t
  misc_feature (93)..(93): n is a, c, g, or t
  misc_feature (108)..(108): n is a, c, g, or t
  misc_feature (112)..(112): n is a, c, g, or t
  misc_feature (153)..(153): n is a, c, g, or t
  misc_feature (256)..(256): n is a, c, g, or t
  misc_feature (387)..(387): n is a, c, g, or t
  misc_feature (399)..(399): n is a, c, g, or t
  misc_feature (1275)..(1275): n is a, c, g, or t
  misc_feature (1311)..(1311): n is a, c, g, or t
  Peptide Sequence Number=SeqID_6128
  Probeset Number=SeqID_12219
ccatgctagtgccagtagcgtccgctatctgagcgnatgcgcnacatgcgtcgacgattntgtctatatatctgtctatcggtcggagcaatncgacttagcggcgcngcanaggcagagcgtagatggtcagtatacagtactttgctgcgnatcgttgcgtcgtgagcacgtgtcacacccaaccaatacagtagtatacttagtgtagtcgtggcgctcgacggtcgcggctgcgaacatatataaaacagangggcgcacgctatactggagtggatcgaacaatgtatattcatgcgtatcaccaataatatgatctacactacgggcgcgcggatataatatgtattacattataagccgcgtggtctctgaccaatgcgnggaagacgtatnagacgcctcatattcgcgaccagacgtagctggagcgcgcgcgcatatggatcagctatatatagacgatcgctgtgagatcaatgataacgcgtcgtaatgaagctgacgataacacacaagaaggagcgcattacatagtgatggttaatttatgtcgtggcggggcgaatgagtgttagccgccgggcgagatgataacctactaaatgtgtacctaaatcgcgatcgtaggcgagtgcgcggattcagtacgtaaatcacatcacacgaacatccgacgccgtataatgcacgccgacccgaatgtacgatacgattcgtagcgccgtacgtaagccgatatccattcggtggagcgaggcggcgtgtgggtgatagcgtaagtaaagagcgcctccccacggcacgacataagcacaccgcacgcacggcgcaataacgctacacagcgacccgacgcgtgtatgacgaatatctaatatccgacaatacaacacatggtgcacgtatggtacgcgtatcgatatgcgaagactgcctatgcgccgagtatatgcgactatcgtaagcgccgagccaacaatatatccgcgactggcgcacgatgcgaccactaccatagctattattgcgcgctatttgaggtcccggtacgtaaaacaaagagggagtctataacgagctggttcattggtatgatcatatatattaagcgccgcacggtagcatggcgtcgggcgcggcatcatatacgcatcacctcgcgtcggcgcgcggcgcgcaagggagcgccgttcatcgatacttacatacgttatatatcgtataaataacttctcgtcctctccgcgctcgacgctgacgatattagtnggtggcgcgtacggcgacagggaaaagtatagattntgtagacgagaacacacaaggatggaggcgcgcaca

SEQ ID NO: 2441 - DNA, 673 bp, Glycine max
  misc_feature (601)..(673): n is a, c, g, or t
  Probeset Number=SeqID_12220
ttttttttttttttttttgtttttgaaattctgttattaaattgactatttccatttttcatttcatctaaatattccgcaaaagagcttcgaaaacttttgaggatttcttaaaagtattttttttccgttgtattaaaattaagaacattaaggtaatattaaatatgttacaaatgtaatttttttttccgagcattttaaaaagaaatccattgtttgtttgttgtttctatcatcaattagttaattttgtagtatagttgtttttaaaacacgttttgttcatagagaagagaaggcatcactcatttcaaacaaatcgaccgattgcttgtatgcttagaattttactcgtttctttcaatggctcaattatcattattttttgtttcattctctctttttagcgttttattttgagaactcatataaatatcgctcaatatttcttttgaaaaactgcaaatatttcagccgatggtcatgtgaatccgatgttctaaaaatagtgaattggttttcgaattggattttagaggacgtgtggcgacgaaagagcgcatttagttttcctcggatattgatttagaatgtgtcnnnnnnnnnnnnnnnnnnnnnnnnnnnnnnnnnnnnnnnnnnnnnnnnnnnnnnnnnnnnnnnnnnnnnnnnn

SEQ ID NO: 2442 - DNA, 1654 bp, Glycine max
  misc_feature (69)..(69): n is a, c, g, or t
  misc_feature (72)..(74): n is a, c, g, or t
  misc_feature (87)..(87): n is a, c, g, or t
  misc_feature (104)..(105): n is a, c, g, or t
  misc_feature (108)..(108): n is a, c, g, or t
  misc_feature (112)..(112): n is a, c, g, or t
  misc_feature (156)..(156): n is a, c, g, or t
  misc_feature (169)..(169): n is a, c, g, or t
  misc_feature (529)..(529): n is a, c, g, or t
  misc_feature (792)..(792): n is a, c, g, or t
  misc_feature (794)..(794): n is a, c, g, or t
  misc_feature (1064)..(1064): n is a, c, g, or t
  misc_feature (1074)..(1074): n is a, c, g, or t
  misc_feature (1192)..(1192): n is a, c, g, or t
  misc_feature (1227)..(1227): n is a, c, g, or t
  misc_feature (1248)..(1248): n is a, c, g, or t
  misc_feature (1277)..(1277): n is a, c, g, or t
  misc_feature (1283)..(1284): n is a, c, g, or t
  misc_feature (1331)..(1331): n is a, c, g, or t
  misc_feature (1364)..(1364): n is a, c, g, or t
  misc_feature (1430)..(1430): n is a, c, g, or t
  misc_feature (1432)..(1433): n is a, c, g, or t
  misc_feature (1435)..(1435): n is a, c, g, or t
  misc_feature (1470)..(1470): n is a, c, g, or t
  misc_feature (1499)..(1499): n is a, c, g, or t
  misc_feature (1526)..(1527): n is a, c, g, or t
  misc_feature (1532)..(1532): n is a, c, g, or t
  misc_feature (1564)..(1565): n is a, c, g, or t
  misc_feature (1567)..(1567): n is a, c, g, or t
  misc_feature (1629)..(1629): n is a, c, g, or t
  misc_feature (1632)..(1632): n is a, c, g, or t
  misc_feature (1634)..(1638): n is a, c, g, or t
  misc_feature (1643)..(1643): n is a, c, g, or t
  misc_feature (1649)..(1650): n is a, c, g, or t
  misc_feature (1654)..(1654): n is a, c, g, or t
  Peptide Sequence Number=SeqID_6129
  Probeset Number=SeqID_12221
aaatactacaccatcacacaacacatatttctatacataaactatcttcttaacctatattaacttccntgnnntagagagaccaantaacaccacacactatnngcncccnccctcaccactcctctctgtttctactctaaacgtatactatantcaacacacactnccatatccctatcccctcctctgatctacatcaggccagagacctccaactacccaccacattctgtccatctctcaccactacaacacgcgcactcgcatcctttcctccctcgtcatcattcattctatattatctcttactcatcttcacctactgctacaatcacatctcacttttctctttcctatctctctcctcatacctctctcctcatcaatattacattatactctacctatatgcggtagtccttcctactaccccctctctcctctatctcccacttcctcccgctcacaccctctcttacctctcctcactgctccccactccttctatacttctgcttgtccacanatatcttatcttcctctccctctgcgatcatcatcccaacacatatacataaacatatataccacactactctcctctgctctactatgcttccctctcactctccgcagacagcacacacattacattcacacattctacaagacacaaactatataatgtacaatcagacattataatactcatcatcagactaactacagatacgacctccacaccactcatgtcgttaacttcactactcttactcatgctgttctagntntgtctcactactcataccccactagccacacccacccacatcacactacataatctcctactatatctttagggactattattctcgctaacacatctattaatatctcttctcacatatcatacataataggggatcatcactacactctatcatatgaccacaactctcacgatatcatcgatgtagaatatatatctatacaataatatgcctcatgatgtgtcatatctattacactcatattatctagatgagactatacaactnctacctcacntctgatcatcgcgaccatatactatatactctactttactcaactatatcttcgtataacctcgatcatctcagctagtcatctattactattgactaaacacgactacttgtatatntcaccaaacacacacaccacacggccgcacatatnacacactattgaatgacacantgtatacgatgtacatgttctactgcttntgggannttacacactctatctctcatcgtgatatatctatactcacaacaaanatcgatcacacattcatacaatacactataccnatcacataatacacaacacatacaactaatcttcaggcacacatcagacacacttcaacatatatntnntntcacactagtatacatatatactatcagctgttantgctatgtccgtccacactcacgcactcnctgcaccgcatctacttactacgggtnnactcnactcccgattcctcactcctcacgcacacatnncnagatagacgcgtcatcacacacacaatatacgaatactatacacgtgagtaccacgtcatanctncnnnnntggtnaattgnntgtn

SEQ ID NO: 2443 - DNA, 637 bp, Glycine max
  Probeset Number=SeqID_12222
taacttgcgccgctgtttgttgtttcccttcgtctattttttcttccccccctttgccgtttctttttttggttgtgtgctctttcttctcgctcgtcgcttggtgatctctctctgctaccctgtccgccgagattgagagagagacccacttttacttgctccagcttgccgagcaggccgagagatactaggacttggttgagtgtatgcagactgtatgacaactggatcttgatctagctgtgtaagaaaggaacctcctctcagtgtgatacaaaactgtacttggtgcacgacggtcctcttgacgcatcatgtcctcttttgagccgaaggaatagtctaagggaaatgagcacagtgttacactgatcaagcagtactgccctatagttgaggaggcactctccgaaattttgtggggacttcctgcctattagtagaccggcctttgatttccttctttccccctcagcaaaaagcttttggtttcctacttatcggaatgaaaggtggattatttttccccgtatccttgcctgccctccatttactggcccttggaaattggaaaggcgggccgcttggaccggtccccttggggaggggttccgagggcttgcctttcgccccc

SEQ ID NO: 2444 - DNA, 1499 bp, Glycine max
  misc_feature (9)..(10): n is a, c, g, or t
  misc_feature (22)..(23): n is a, c, g, or t
  misc_feature (25)..(25): n is a, c, g, or t
  misc_feature (29)..(29): n is a, c, g, or t
  misc_feature (33)..(33): n is a, c, g, or t
  misc_feature (54)..(54): n is a, c, g, or t
  misc_feature (58)..(58): n is a, c, g, or t
  misc_feature (71)..(71): n is a, c, g, or t
  misc_feature (73)..(78): n is a, c, g, or t
  misc_feature (85)..(86): n is a, c, g, or t
  misc_feature (136)..(136): n is a, c, g, or t
  misc_feature (243)..(243): n is a, c, g, or t
  misc_feature (468)..(468): n is a, c, g, or t
  misc_feature (689)..(689): n is a, c, g, or t
  misc_feature (725)..(725): n is a, c, g, or t
  misc_feature (908)..(908): n is a, c, g, or t
  misc_feature (1122)..(1122): n is a, c, g, or t
  misc_feature (1250)..(1250): n is a, c, g, or t
  misc_feature (1315)..(1315): n is a, c, g, or t
  misc_feature (1395)..(1395): n is a, c, g, or t
  misc_feature (1455)..(1455): n is a, c, g, or t
  Peptide Sequence Number=SeqID_6130
  Probeset Number=SeqID_12223
ttgtttggnnggttgtgggggnngngggngggngggggtgtggagggggggagnaagnggggtggggggtngnnnnnnttttttnnttattttttttgtttttatatatatagttatgaatgttatgacttgcagnggatgttaaaggagtcaccacatgagtagcgacgcgcgacaccaacaaacgacgagcacgaacgcgccacaccaaaccaccccccctccaaaacaccaccaccgccntacacaccaaaccaccacccgacccctcccccgggtccacccccccgccgtcccctctcccgcgctctccactcctctcctccgccccgcgcgcgcctctcctcgctccctctttctctgtctttcttctgttatgttttttgttttcttatctttctctgttctctacttctctccgtcccaacacctaacgtgacaaaaaattaaagaaaaataaaaagtcanacgcaaataaccacaaataacaacatacatcaccataacatatactaacttatctaaactcataacaattataaggcagattaaaagcttatgatcaattaaaaatacaagacgatgaatgagaaaataccccgacacgcccacacacgctacaccggcaccgcaccaccagaaccccgcgatcgatatctatctcggaagtatttgcttataattacatntagaaacacaacaactctcacatatctcagcacagnagatgactacgtacatccaactactacgatgtatgtccctccaacccaccctaccctcccaccacatctcacactaattacaatgtgtaaggatgacgcacaatcctgctcatacgtacaacgccacacttgcaccgcacccacgacatacacaatcgtggtctcaactactctcccagacancacacctctcgtcacactcacctacactctctctcgtcctgcacctccatatatctgctccactacgcccgacaacacacaccataccgatcacaacgactcatcaactacaccacaacacacgctactccgactaacgctcactcccaccactaccatcatcctcatctcaacatcctacatcatatcctctcgcggtcatcatcacacacanctcttaccatctatcgaatcctcacaacacacacacacaccaagatacactatatactcaacacatactgaatagacatttcttatgagtgtcgctgtagtcgcagaccctacttatcgacctacacncacatacagcatcatgacaataagataaccaaaaactcaatatacatctctctcacccctcttcntccgcactctgactctccctctgtcactcttccactcgagttctcaactctcttactctacacgtcctacactctcctcncgatcaaattcgtaaatacacaccacatacatacacctctgtcactacattatctcatcnacacaacgtacgcacacaagtcaggatatcacacacacacaccg

SEQ ID NO: 2445 - DNA, 2464 bp, Glycine max
  misc_feature (1)..(1): n is a, c, g, or t
  misc_feature (9)..(9): n is a, c, g, or t
  misc_feature (37)..(37): n is a, c, g, or t
  misc_feature (67)..(67): n is a, c, g, or t
  misc_feature (89)..(89): n is a, c, g, or t
  misc_feature (131)..(131): n is a, c, g, or t
  misc_feature (140)..(140): n is a, c, g, or t
  misc_feature (147)..(147): n is a, c, g, or t
  misc_feature (151)..(151): n is a, c, g, or t
  misc_feature (163)..(163): n is a, c, g, or t
  misc_feature (189)..(190): n is a, c, g, or t
  misc_feature (200)..(200): n is a, c, g, or t
  misc_feature (211)..(211): n is a, c, g, or t
  misc_feature (214)..(214): n is a, c, g, or t
  misc_feature (244)..(244): n is a, c, g, or t
  misc_feature (255)..(255): n is a, c, g, or t
  misc_feature (276)..(276): n is a, c, g, or t
  misc_feature (307)..(307): n is a, c, g, or t
  misc_feature (336)..(336): n is a, c, g, or t
  misc_feature (353)..(353): n is a, c, g, or t
  misc_feature (370)..(370): n is a, c, g, or t
  misc_feature (380)..(380): n is a, c, g, or t
  misc_feature (404)..(404): n is a, c, g, or t
  misc_feature (416)..(416): n is a, c, g, or t
  misc_feature (436)..(436): n is a, c, g, or t
  misc_feature (450)..(450): n is a, c, g, or t
  misc_feature (470)..(470): n is a, c, g, or t
  misc_feature (480)..(480): n is a, c, g, or t
  misc_feature (487)..(487): n is a, c, g, or t
  misc_feature (490)..(490): n is a, c, g, or t
  misc_feature (493)..(493): n is a, c, g, or t
  misc_feature (500)..(500): n is a, c, g, or t
  misc_feature (519)..(519): n is a, c, g, or t
  misc_feature (523)..(524): n is a, c, g, or t
  misc_feature (557)..(557): n is a, c, g, or t
  misc_feature (589)..(589): n is a, c, g, or t
  misc_feature (609)..(609): n is a, c, g, or t
  misc_feature (611)..(611): n is a, c, g, or t
  misc_feature (622)..(622): n is a, c, g, or t
  misc_feature (643)..(643): n is a, c, g, or t
  misc_feature (730)..(730): n is a, c, g, or t
  misc_feature (737)..(737): n is a, c, g, or t
  misc_feature (744)..(744): n is a, c, g, or t
  misc_feature (750)..(750): n is a, c, g, or t
  misc_feature (756)..(756): n is a, c, g, or t
  misc_feature (766)..(766): n is a, c, g, or t
  misc_feature (771)..(771): n is a, c, g, or t
  misc_feature (779)..(779): n is a, c, g, or t
  misc_feature (782)..(782): n is a, c, g, or t
  misc_feature (794)..(794): n is a, c, g, or t
  misc_feature (799)..(799): n is a, c, g, or t
  misc_feature (815)..(815): n is a, c, g, or t
  misc_feature (823)..(823): n is a, c, g, or t
  misc_feature (835)..(835): n is a, c, g, or t
  misc_feature (850)..(850): n is a, c, g, or t
  misc_feature (859)..(859): n is a, c, g, or t
  misc_feature (862)..(862): n is a, c, g, or t
  misc_feature (865)..(865): n is a, c, g, or t
  misc_feature (892)..(892): n is a, c, g, or t
  misc_feature (901)..(901): n is a, c, g, or t
  misc_feature (917)..(917): n is a, c, g, or t
  misc_feature (964)..(964): n is a, c, g, or t
  misc_feature (988)..(988): n is a, c, g, or t
  misc_feature (1019)..(1019): n is a, c, g, or t
  misc_feature (1026)..(1026): n is a, c, g, or t
  misc_feature (1030)..(1030): n is a, c, g, or t
  misc_feature (1065)..(1065): n is a, c, g, or t
  misc_feature (1136)..(1136): n is a, c, g, or t
  misc_feature (1140)..(1140): n is a, c, g, or t
  misc_feature (1175)..(1175): n is a, c, g, or t
  misc_feature (1206)..(1206): n is a, c, g, or t
  misc_feature (1234)..(1234): n is a, c, g, or t
  misc_feature (1246)..(1246): n is a, c, g, or t
  misc_feature (1249)..(1249): n is a, c, g, or t
  misc_feature (1321)..(1321): n is a, c, g, or t
  misc_feature (1487)..(1487): n is a, c, g, or t
  misc_feature (1626)..(1626): n is a, c, g, or t
  misc_feature (1882)..(1882): n is a, c, g, or t
  misc_feature (1919)..(1919): n is a, c, g, or t
  misc_feature (1981)..(1981): n is a, c, g, or t
  misc_feature (2130)..(2130): n is a, c, g, or t
  misc_feature (2226)..(2226): n is a, c, g, or t
  misc_feature (2285)..(2285): n is a, c, g, or t
  misc_feature (2290)..(2290): n is a, c, g, or t
  misc_feature (2321)..(2321): n is a, c, g, or t
  misc_feature (2348)..(2348): n is a, c, g, or t
  misc_feature (2391)..(2391): n is a, c, g, or t
  misc_feature (2403)..(2403): n is a, c, g, or t
  Probeset Number=SeqID_12224
ngacgcatnatacgtcgacgtctcgatgcagagcatnatgattcatcgtctgctcgcatgcacacantctcatcagtccacttgatgcntgaacgtgcaagctggtgggattcgtcacgtacaatatgatngctgcacgncttcagntcangagcagtgtacnactccatgcatcgatctcatcgtcannacgtcgtctncggactgcatnctnctttgtttctcgtcgtattctcgtgacgcntcctcgccatnactaatcacgacgactacagntactatcagtacagtatcgctcagtacctancgctggacatcgatacagtcacatcactncgatcactatcattagntcgtatcagcatgctgnccgacatgangtagtagtcaaagcaacactacgntgtgtcagtcgntgagtagtcagtagctcgangcaatcatacgacnactatcagattatactgacntccgtctcancgtcgtncgnatntgtccgntatacatgcttcgcgcacngctnnccctcgcatgccgctcaaccgctgatgacgacnactactgacgggcactcaatctgcctacgcantcagttcagctcggctatgnantcgaatcggcnctgctcgagcacacagacgantatatgtaaaacgttgacgaggatacgatcagctatcatcgacgcggtatacgacgatcgcagtcggcagctgacagcgcgtgacgncgcatcnatcgtantcatancttcgnatcatcatgntcgancacttcanganctgtagtatagnagtantagtcgtatactacancgaccgcnatagtacgcgcncctacgtacagtcgnctaagatcncgnacngcacagtagattattcagatcatgagncgctgagtngaccagatcgtacgtngccgatagatagcgtagagtatcagcagtgccgacgacagatatcgntcgtgcacgacagcagtacagtgnacatcacatcaacgcggtcactgcgtcgacnctactancgcntcgatgctcaccacgagcgtgcgctgcacggtgcncaactgctgctcacgtgacgtcggcagtcgcagcatcacgttactgctatactgtcgcagtactactatantggnacatacgctagtctatcattcgtcacgtgatcccntctgctgactcgtctcctccatgccattcgntactgcgtgatctgccacgacgtcgtcntgtctgatccgncgntccccgatgtgcgacctcatcatcctacagatgagtgacagtcgtagctcgtctgtctgcgacgtaaaccancacgtctgctctgtcaatcacatatattcatctctatcaagcagcatcgacgagcgctatatatcgctcatatcatgtctccagtccatattctgcatcacagatatacgcactcctactgacgactgtgtcgagcgtagtatattgcataccgtatatgtgcacngttccttatgactccgcagatctcgcgtcacgacgtggtacaaattgcatctcgtcacgctgtatcaattacgtcacgcatcactgtgcagcgcttctcatacttgcggcaattggatatgaccatggtgctgagctanttatgtgcacacgccgcatactgttgctatgtatatcacttcacttgcactgtgcgtcgcaccgttcacggcctctcccgcgtgatcacatgaataatgtgataggaggagtgatgtacgacgctgtaaagggcgtaagacgtcgccgacggacggtcaccataatagtatacagaattcgctgtacgcgctcacgctatcacatcactctcaggctctgctcgtgacgtcagataatattatatagacactctcnagattgcgttcggcgtctcggtccgcctcttgtatgnatgtgcttctcgacgaatacgtacagtacattcgcacgacatacgcattcacttctcattgngagttcacgtgagatctctatatgagccatcggacaacaactgcacaccagcacgctgtcgtgtatcaggctctcaaagccataatatcagacgcaagtcagctagagcgtggaagagtgacgccagcccatgcgatgccgcgatccanacaatatatgctcattgctcagcacactactcgtatcgtatcatgaatatatatatccgcgcggcggcgccgtcctgtccaccacaccttcgcgtntgtcctgtgcatttgagtaatataaatatgcgcggtccgacgccctcactgtcctctcntctcntcttggttagagaaaaaacatcgtcctctcnctcgcgtcgcgccctgccggccgcacntcgaggcgctgcgcgctgccgcgtacgctctacatgtgtgtanatttgtactgtnactatacttctgtgtcgcgatgtggttaacccacactatagttatgaacacctaccggtac

SEQ ID NO: 2446 - DNA, 1465 bp, Glycine max
  misc_feature (46)..(46): n is a, c, g, or t
  misc_feature (471)..(471): n is a, c, g, or t
  misc_feature (542)..(542): n is a, c, g, or t
  misc_feature (599)..(599): n is a, c, g, or t
  misc_feature (778)..(778): n is a, c, g, or t
  misc_feature (781)..(781): n is a, c, g, or t
  misc_feature (1039)..(1039): n is a, c, g, or t
  misc_feature (1275)..(1275): n is a, c, g, or t
  misc_feature (1285)..(1285): n is a, c, g, or t
  misc_feature (1300)..(1300): n is a, c, g, or t
  misc_feature (1405)..(1407): n is a, c, g, or t
  misc_feature (1414)..(1414): n is a, c, g, or t
  misc_feature (1434)..(1434): n is a, c, g, or t
  misc_feature (1456)..(1459): n is a, c, g, or t
  Peptide Sequence Number=SeqID_6131
  Probeset Number=SeqID_12225
agtacgactgactgcactcagaggtatagtgagagagacacgcganttattgttcgggcatgtagctcctcagccgctcgtctgtcatacctcgacacgcgtgtttgtgtgtgtgagggttgtagttgtcggcgctggatgacgagagacacaacacagaagtatgacagaagagaggtaggcaggatgatagtcgactcacacacaagcgacgtgtcatcagtgcacagacgcactacacctacacagcgagtcagagtgagagttgaatctcacagaccaatgatgtcgcacaagacacacacaccgcgcggaagagttattgtgcgaccagtgcatgcgccatctctacagacgctgcggcggcgacaatgacacacgatatcagccgaagagagaagaacgaaggatagacacagacgaagaggctgagacacacataggaagtcaagggaaatgtggatctgagantgtgattgtgagtagtggagggtaggaggtgtagtaggtgctggtggcgatgtcaatactcaggcatcagncgcagcgtggagggggcggagcgtgtgttggagaccagaaagacggcgaaagagtgngggcggaggtggggaacacaaagacaggtgccgcacacacagccagacgagaagagtatgagttgggacgatgcacggcatgatgtaatagtagaagacggaggaacgtggtgaaacggcagcagaagagagggagtagaaggaaagagaccacacgcagcaggtgtgtgtctttttcntanctcacgtattctcaccgtccacttattatctttatttacacagacctagggcacaaaagtgagtaacaaatagaaatgcaattctcgatgatttgtgtttataacacgtatcagccgccagaacatactatttcaatcatacccattaattgttaggagtgaagcacgataaatgtgagaagtcatagataggtgtttgagagacagcgggagccgtagcgcacgaaagcctcacattataacgaccttcatctgcgnctttctcaccccactttatttgtgcacaaagacacgcccaccggcgcggagatatttcaagcacacaccccccacttggtattatttcacaccccgccccggccccccacgcggataagatagacgcagtatttgatatcagaatataatttcactacccccgctatcacaccgaaaagagccacccaatatgtttattgcgcgcaaccgcgcgctgggtggggtgggaaaggcgntagggttggntgtggaattgagagnaaagaagtaatgaagggagaagaaggacaggagggtctgtctcaccccccggtgttgatgttgtggcaaggaccaagaggcgcacgcgagagaccgcgcgtgtgnnnccggggntaggagcaagaaagagaaanaaaaacaagcaacacacccgcnnnntttccc

SEQ ID NO: 2447 - DNA, 633 bp, Glycine max
  misc_feature (601)..(633): n is a, c, g, or t
  Probeset Number=SeqID_12226
cagaacaagctgtttgaaaaagcacttgcaaaatatgacaaggatacccctgaccgatggcagaatgtagccaaagcagtaggtggaaaatctgcagatgaagttaagagacactatgaaatcctcttggaggatctgagacacattgagtctggtcatgttcctcttcccaagtacaagtccacaggaagcagcaccaatgttgaggaagaagagaggtaattaatgcatccaaacaataactctacttccatcttttttaatacaacaaatcatatacttaccattaactaactatttttcacagtcccttctaaattctaatccttctcacgcatgcattattccattctttgtcacttcttaatagctattctctatacataatgtgagacaaaggggtcccctaactttgaactcaaccaaataagattcttttattttggaaaacctattttgaaaaaaaacatttcttccaaataaaaaaaggggcgattgaaaatcttggaaaattcccctgaaatggggacacaaaaaaaaggggaaaaaaaaaaccccaacctaaaccttggcccccctttttcaattttggagggtttcnnnnnnnnnnnnnnnnnnnnnnnnnnnnnnnnn

SEQ ID NO: 2448 - DNA, 601 bp, Glycine max
  misc_feature (9)..(9): n is a, c, g, or t
  misc_feature (601)..(601): n is a, c, g, or t
  Peptide Sequence Number=SeqID_6132
  Probeset Number=SeqID_12227
tcagctacntaggcccccccccccatttattttcagataacttttatctgtaatcaacttaatctttcattcacttccaaggcacccacaaaccacaatgaatatacaaatcgacgatgctgaaagagatgagattttccaaagattgagagctactcctgaaaataataaatgttttgattgtgataagaagaatccaaaatggtcttcagtgagtcttggtctttatctttgtttggactgtgctggtaaacatagagaatatggccctcaagtttcttttgttcgttctttgaacttggatacttggaataaaaaatatattacctcaatggaacttggtggcaatgttaaagctcttgattatttcaagaagcaaggtctcaagactccctatgattataaaggcgctcaaatccagaaatataaacaagatctcgccaagaaggttgatgctgctcttgctggttccaagacagaagctgaagccaataaaccagtttttactaaaccagctgaagaagaaaaaactcaacctgaacaaagccatcatttgagtggaaagagtcattcagataaacctactcatggagaaaagccn

SEQ ID NO: 2449 - DNA, 1457 bp, Glycine max
  misc_feature (1)..(1): n is a, c, g, or t
  misc_feature (70)..(70): n is a, c, g, or t
  misc_feature (114)..(114): n is a, c, g, or t
  misc_feature (142)..(142): n is a, c, g, or t
  misc_feature (300)..(300): n is a, c, g, or t
  misc_feature (346)..(346): n is a, c, g, or t
  misc_feature (859)..(859): n is a, c, g, or t
  misc_feature (981)..(981): n is a, c, g, or t
  misc_feature (1063)..(1063): n is a, c, g, or t
  misc_feature (1295)..(1297): n is a, c, g, or t
  misc_feature (1300)..(1300): n is a, c, g, or t
  misc_feature (1302)..(1303): n is a, c, g, or t
  misc_feature (1305)..(1306): n is a, c, g, or t
  misc_feature (1308)..(1308): n is a, c, g, or t
  misc_feature (1312)..(1322): n is a, c, g, or t
  misc_feature (1324)..(1328): n is a, c, g, or t
  misc_feature (1396)..(1396): n is a, c, g, or t
  misc_feature (1404)..(1404): n is a, c, g, or t
  misc_feature (1413)..(1413): n is a, c, g, or t
  misc_feature (1430)..(1430): n is a, c, g, or t
  misc_feature (1444)..(1446): n is a, c, g, or t
  Peptide Sequence Number=SeqID_6133
  Probeset Number=SeqID_12228
ntagagtacgatcggatgctcgagacacagacgtagcgagtgcgaagaagacatagatagtagcaccgcnggaatcggtgaacgagcgacaacgacgacgcgtcgatatgagancaagatacgagagtgatctagtagtcgntatcgcagcggactgagatacgtaacgttgtgtcgtcggagatgcggcgcgagagaacgaggacgaggagaagcgcgcgtgagagacaaggacgatctgaggacagtacatacagacgagcgcagctctatgagatactatattgagcacagcagtgncgcggtgtcaccaagatcagagcagcagagagcctcacaccgtagnactgagaggcatcgcggcgggagtaggcgagagactttgagcggagtcctgtcgatacatatcgatagcgccgtggaggagggaagtggcggctacgatcgtcacgagcatccgcccgggcgcgtgctatatgtggcagtgtaggagatgaaatagcacacgatgcatatccaggacactcccctagacctagaaaggagaaggaaagtacatgaagcgcgtcggacagaacaccagacgcgcgcgggtacatcttcggatagagaggcgggacgcacggctaggctcgatacgtggctcttgagttctaaggccgaccgctgcatacgaaagcagcggactcgtcctctaaaacagaggaggaagccccgcaaacaccgggcgggctccagcactgaagaggccgaatagcgcagtgagccacacgcgctgtgcggagtggagctggtcagcaagcgagcgtcgtgcgcaacgtagggactgttacataacatgtcctccgttgtgccgtanatggtctgtttctgagagatgccagagggcgcagcaacactaccgatagctatagcacataataaggtacaccacacgtctaacgcgcactgagactctcaagtctagagagacactaggtncccagtctggtgtgtatctctgaagaaattgataggaggggcgccctagtggcgcacgtgggtgtggggcgagtgatatcgnacttgagaggtgcctgtgtcactgtctactagcaccctagtatattatcttccttatccttgagggaatcttctagctaatctacctatagtgatgaactgggtgtagcataactccttcccataacacaccccaccacgggacggaacagcatatatatgtcttagtcgataataagaagagcagcgacacagccgcgcccgcggaagaggtgaagagcgccaccacagcnnntanannannanacannnnnnnnnnntnnnnnggggaggtggagtgagagtgcgcgaagtatcgattattgggggtatttgtgttccaacattatcactntacacctnaaacaatgnggagcacggaagaaacnaccaaaaaacaaannnaaaaaaaaaga

SEQ ID NO: 2450 - DNA, 1510 bp, Glycine max
  misc_feature (89)..(91): n is a, c, g, or t
  misc_feature (94)..(94): n is a, c, g, or t
  misc_feature (515)..(515): n is a, c, g, or t
  misc_feature (750)..(750): n is a, c, g, or t
  misc_feature (941)..(941): n is a, c, g, or t
  misc_feature (1120)..(1120): n is a, c, g, or t
  misc_feature (1144)..(1144): n is a, c, g, or t
  misc_feature (1259)..(1259): n is a, c, g, or t
  misc_feature (1454)..(1454): n is a, c, g, or t
  misc_feature (1487)..(1487): n is a, c, g, or t
  misc_feature (1510)..(1510): n is a, c, g, or t
  Probeset Number=SeqID_12229
cctcccccccacccccccacccgcacacctccctcctgcattatgaaatacatcacagcccgctctggatatcattttatatgaacgcnnnccnctcgcagcgcctgaatgtttactctacacatccacactatatatcttaattcttttgggaggggtactgctagagtcagctcgtcgacacccgacctctcggctcatctatgtggcagatcgctatgcgaacacacgcctctgccgcatcgcacagccacctacgagatagataagattatagacgaataagtataagagcatataagtctcagtttattcttagctgtgtgctttcagccacgcctgtgcgtgtcgattggctcatacataggagtgtgtttcttgtgtccaggtcacgcttatctactcttcacaccctctctcgcttgtgtgttcacgcacgccttttcgcacatacccggggcgggaatagagagcgtatccaatatccgtctaggcaccacaaggtcagtatattnattttttcgaccgtccgtctttctataattggatatttcgcgtgctcgcccgcctacatctgatgctctctctccaactccgcgtggttgcctgtcgatctgctgcgctttacgcgccagcgccgcgtcctcgctctcgtgtgcgcgcgcgggactggttattcgatgtcagccgcgcctgtgacgtctgtatcgtcgtatctcacacgcttagcgctcagcgcgcggaccaccnccacactcattactgcgacgtagatctgatgcggcatatatctctgcccgtatagctcgcatcagtgatgagtgctctaccacgcggacgagcgatgtgcaccgctagcggaggcagcgagatgcctggtatccctctccgatctcatgtcagtcgtctagtgaggtcgccgcacctcctgctatccgtcnacagtcactgctctgaagcttgatattcgtctgcatgaatatcgtgcgatgcactcgctagatcatcactggcgcgctactcacatcgacgctctcgtactgtatgaggagttgtgtgtatgacacgtataccatctcacacagagtacgatactcgttgagtcatcgcacgcttcccntgacacgatctaatatattacatncacatgtagacacgcataccgttcactgactgccgtcagtgtgcgcatgtcacatgtcacctcagcacacagtctcgtctcatatcgttactcgcctgcgcgctcactgctctcncgccgtgtctcctgatccgacacttctcgcctctctacttctgcgcactcgctctactctgacactggtccagaatcatctactcatctcccgcagactgcgtgcgtcgcgatcccacattgcagatagcgaggtgtgcgtgcgacgcacgtcacgaggctcgatataactatagcgcgacgactgtcgtgagtnacgagagtgctgtcagacctcgagctatgcganactcacgagttatgctcgtcggn

SEQ ID NO: 2451 - DNA, 469 bp, Glycine max
  Peptide Sequence Number=SeqID_6134
  Probeset Number=SeqID_12230
ctctctctcttctccacactccactatctccatccccttccactcgcgctctctccctctctctctccaccagggggaaaggaaaggaaaaggaaggcgcgggaggcgagccggtggtggggaatggccggcgcgtcctcgccgcccccgacgcccaagtcgcccaagctgcagccgccgctcctggagcgcgccaagggcccctctggcctcgacaagatcgtgctccgcgacccccgcgggttcaccgccgaggtacgcggccgcctctcccctcccgctcccggcagattcggggcgcattcaccgcggatccgctgcggtgttcaccgacgcgcgcgcgttcagggcgccggtttcagaatcacaaggattcggggcgcgcgattttcgggcggatttcgtggttcggctggcccgtcaaatcgaggcgcattatgtcgtaccgcgctccgatagggtttaattc

SEQ ID NO: 2452 - DNA, 557 bp, Glycine max
  misc_feature (469)..(469): n is a, c, g, or t
  misc_feature (518)..(518): n is a, c, g, or t
  misc_feature (547)..(547): n is a, c, g, or t
  Probeset Number=SeqID_12231
tgcaaattctacacatataatagagcaaattttaaaatatgttaggtgtaagggggttgattttgcccttaaaaaagttgttctttttttgttttttatatgatatccttcttcctgtccccaggcggaggttatccattatctcttatatactactactatataaccccccctacagtatacatatatctaccccttaaaatacctaccctataccccattaaaaataccttgctatagtgccttgtgcagaatagacagaattgctgagttattgattttaaaagagaaaaacagtctgcacgtgcagaccattctgcaaatatttttattgctgttcattttttgatcaatttccggtgcctttctggcataaaaaaagaccccctcaggggtctttgtaagtgttacattataacattcgttttcgtattttcttgccttccatctcaatgacacccttcatggntaaatttattattgcgttattgaacgcatcctgaccactttccgctaanctgccgcgcaatctccttgtatgccttgntgcgtgatac

SEQ ID NO: 2453 - DNA, 805 bp, Glycine max
  misc_feature (210)..(210): n is a, c, g, or t
  misc_feature (247)..(247): n is a, c, g, or t
  misc_feature (285)..(285): n is a, c, g, or t
  misc_feature (322)..(322): n is a, c, g, or t
  misc_feature (327)..(327): n is a, c, g, or t
  misc_feature (341)..(341): n is a, c, g, or t
  misc_feature (411)..(411): n is a, c, g, or t
  misc_feature (474)..(474): n is a, c, g, or t
  misc_feature (540)..(540): n is a, c, g, or t
  misc_feature (548)..(548): n is a, c, g, or t
  misc_feature (601)..(805): n is a, c, g, or t
  Peptide Sequence Number=SeqID_6135
  Probeset Number=SeqID_12232
aaagtggactccccgcggtggcgccgctcagaatagtggacccccgggctgaggattcgcacgagacattacctagaaatcctaatcgaaatccctcaacacttcctctaactctcactcccaaacccaactcaataacagtaaccgtttttcgttcttcacttcctcactctctctctcttccacacactcatggccactgctcacaangtcctcgttcccatcgccgaacgcaccgagcccatgnaggccgtcatcatcatcgacgtcctccgccgctccggngccgatgtcaccgtcgtttcctcctccgccaactcgncgtcnaagctctccacggngtcaagatcatcgccgacgcctccgtctccgacgtcgccgccaccgcttttgactcgtcgctctccccgnagttttacaggtgatgagaatctgagagactgtaaagttcttgaaggtttgtaaagaacatgntgaggaccgacggctttatgcgggcgtgtgtgctgctcctgcggaaggcttgggccctttgggttnctgaatgnaaaaaagcgacttgtatcctgcattggatgaaaaatgggccgttacgtaccgnnnnnnnnnnnnnnnnnnnnnnnnnnnnnnnnnnnnnnnnnnnnnnnnnnnnnnnnnnnnnnnnnnnnnnnnnnnnnnnnnnnnnnnnnnnnnnnnnnnnnnnnnnnnnnnnnnnnnnnnnnnnnnnnnnnnnnnnnnnnnnnnnnnnnnnnnnnnnnnnnnnnnnnnnnnnnnnnnnnnnnnnnnnnnnnnnnnnnnnnnnnnn

SEQ ID NO: 2454 - DNA, 1655 bp, Glycine max
  misc_feature (18)..(18): n is a, c, g, or t
  misc_feature (23)..(26): n is a, c, g, or t
  misc_feature (28)..(28): n is a, c, g, or t
  misc_feature (71)..(71): n is a, c, g, or t
  misc_feature (93)..(93): n is a, c, g, or t
  misc_feature (100)..(100): n is a, c, g, or t
  misc_feature (102)..(105): n is a, c, g, or t
  misc_feature (125)..(125): n is a, c, g, or t
  misc_feature (139)..(140): n is a, c, g, or t
  misc_feature (165)..(165): n is a, c, g, or t
  misc_feature (178)..(178): n is a, c, g, or t
  misc_feature (191)..(191): n is a, c, g, or t
  misc_feature (235)..(235): n is a, c, g, or t
  misc_feature (243)..(243): n is a, c, g, or t
  misc_feature (246)..(248): n is a, c, g, or t
  misc_feature (251)..(253): n is a, c, g, or t
  misc_feature (415)..(415): n is a, c, g, or t
  misc_feature (425)..(425): n is a, c, g, or t
  misc_feature (467)..(467): n is a, c, g, or t
  misc_feature (476)..(476): n is a, c, g, or t
  misc_feature (482)..(482): n is a, c, g, or t
  misc_feature (493)..(493): n is a, c, g, or t
  misc_feature (503)..(503): n is a, c, g, or t
  misc_feature (550)..(550): n is a, c, g, or t
  misc_feature (571)..(571): n is a, c, g, or t
  misc_feature (578)..(578): n is a, c, g, or t
  misc_feature (626)..(626): n is a, c, g, or t
  misc_feature (670)..(670): n is a, c, g, or t
  misc_feature (678)..(678): n is a, c, g, or t
  misc_feature (681)..(681): n is a, c, g, or t
  misc_feature (744)..(744): n is a, c, g, or t
  misc_feature (817)..(817): n is a, c, g, or t
  misc_feature (852)..(852): n is a, c, g, or t
  misc_feature (1070)..(1070): n is a, c, g, or t
  misc_feature (1147)..(1147): n is a, c, g, or t
  misc_feature (1172)..(1172): n is a, c, g, or t
  misc_feature (1192)..(1192): n is a, c, g, or t
  misc_feature (1284)..(1284): n is a, c, g, or t
  misc_feature (1288)..(1288): n is a, c, g, or t
  misc_feature (1290)..(1290): n is a, c, g, or t
  misc_feature (1331)..(1331): n is a, c, g, or t
  misc_feature (1393)..(1393): n is a, c, g, or t
  misc_feature (1436)..(1436): n is a, c, g, or t
  misc_feature (1457)..(1457): n is a, c, g, or t
  misc_feature (1504)..(1504): n is a, c, g, or t
  misc_feature (1522)..(1522): n is a, c, g, or t
  misc_feature (1574)..(1574): n is a, c, g, or t
  misc_feature (1579)..(1579): n is a, c, g, or t
  misc_feature (1591)..(1591): n is a, c, g, or t
  misc_feature (1655)..(1655): n is a, c, g, or t
  Peptide Sequence Number=SeqID_6136
  Probeset Number=SeqID_12233
ttttttttcctctctctntctcnnnntnttgctccttttctctgtcgcagggcgctctggcctctctcagncgggccgcgcgcgcccgcgcgnagccccnannnnacccttacactcatcttccntcctctcccggccnncggggcgctgtgcccggccctcgcntctcctcgaaganaacatagataagnacatgacgcttcgtctagacatagagtaacaagagtcgatattncttttggngannnagnnntgtcacacgccttgcgccataagaaccacacacaacatcacaatcacagcagcacagaccgcaatatacacatcctattacactatccactatcactcactaatctgatagctacataatacgtgatgacatatagatgacctacttacatcaacagagatnagagacgaanataaacataataacatcatgtttatactcgtaaacatacaantaaacttangtgtanatgttgtagtngttaggtagnggatcgagccgaaggggattatcgttctctctacgcgcctcatcaantatcatctccgttactctctnctcactncccctctcctcttctctacttctgtcgtcggagagcactctacccacntctacgctgtgcatcttcctctcgtctccgacgtcggccgcgcncggcgctngcncgtgaccaatgcaggtggcgagcaactagtctgcgtctcttgtgtcgttgtcgtggtgcgtgnggtgtgttgttctcgtagtattctctgatcttctcatcgctgcgcggagagtcgtcgctgcagaaagagacanaccacaaaagaacgcacatataatatcaatctacntgtgaatatataagtgtcgtgcatagagacagcggaccgccgatcgtctcatgaagacatactataatatcaatatctagatggtgtgaagagttgtcgtggagcgctcacctgccgattcctgtgctcatcatacttactgtgtcactattaatatgaggctctatgacgatcacactattctcactccccaaccaaccacccttccctccatcatntgacacacatcgataattgtgtagtgcgatctgtcagctaatgcactcatctctctgtcgcgtgatcacttcatatncacatctagtcgcgtcttcttaccnagtaatcactcctctacgcnctgctgcactctactctgtactactgtccgcatctcactgtacactagctctactgcatatgcatacgcattcatcaatcactcactctctntccncntcgcgtggatgtgtaatataagacaatagatatctaataanaaagagtacagataataaatatatatgatactatatatcatcacgcgtgctgcggcactcantatgctagcagcttcttcatatacatcgactcgctgcgacgantgacattgactactgtcatanttacgtcttctgatgtgtgacagcggagagcgcgcgccgactccggncaagagatgtatatatgncgtgatcactcgggtgtgtgatcaataggtgcgatgtgacgacacatacgcntccancgcctatcaaanaaacacaccgcaccacacgatactcggttatctcgctcctctgcatcttctctcacttctcaan

SEQ ID NO: 2455 - DNA, 482 bp, Glycine max
  Probeset Number=SeqID_12234
cacatgttaatattgggaattatctatggttcatttggtgttcatatctccatcctagcgaccgctttatccatggcgtttttatcgcatccacccaggttagtatgaaacgagaatgcacatctatgttgtatttgctgccgtatgttgtttgcatcaaaaacgttctttgcatggtgaacacggcagcaattcattccttcgaagaagtgaagcgatgtaaaaaatgtgcatcggcggccgccgagtgatcacccgtcatttttcatagtcctcttagttatgtactagcacagatgttgcgtacgaaagtaggagcaatcaagttgttgtttctctgacatggaggcaagctggccttgttgtgctatgctcatctcaaattttatgctacgtctacttattttagctaaacgtaggttttggcagcaagaaacacttgcaaatgtatgtcttcttgatataagtatctgttctagaag

SEQ ID NO: 2456 - DNA, 510 bp, Glycine max
  misc_feature (119)..(119): n is a, c, g, or t
  misc_feature (290)..(290): n is a, c, g, or t
  Peptide Sequence Number=SeqID_6137
  Probeset Number=SeqID_12235
gagaagggtcatggtgacttaaaagaaaagccttggtggcctaaaatgcagacaactgaagatctcattcaatcatgctctattatcgtttggacagcttcggctctccatgctgctgntaattttggacaatatccttatgggggcgaaatcctgaaccggccaactctagccagaaggtttattccagctgaaagaaccccagagtatgatgagattggtgaagaatcctcaaagggttaattgtgaaccattacacccaagtttgggaaccttattggtctttcagnggtagagatattggcaaggcgtgcttctgatgagatataccttggagagagggagacttcaaattggactactgataagaaagcgttataagctttcaaaagggttggaagccaactgtctgggattgaaagagaaatcaatgcgcaggacatgatcccagtcttgaaacccggctcggccagttacctggcatacactctgctccatcgttcaaatgag

SEQ ID NO: 2457 - DNA, 379 bp, Glycine max
  Peptide Sequence Number=SeqID_6138
  Probeset Number=SeqID_12236
ttttttttttttttttgacaccacaacacaccgagagtattaacaccctattccccatacatccaatcgcatccgtacgaccataccagatcatctacatggagatggagtgcgtacatgtacatctcagtagccttgtatgttagcccgagctacgccgctgaccactactctcgctctactctctgagcttgctgtgctcgaagacgctagtgaagcgtacactcactggtgtagctcacacactcgctctactctctgagcttgctgtgctcgaagacgctagtgaagcgtacactcactggtgtagctcacacacacacacacacacgagtatctagtagtagtacttgtattagttcttgccttggaatggaat

SEQ ID NO: 2458 - DNA, 1417 bp, Glycine max
  misc_feature (23)..(23): n is a, c, g, or t
  misc_feature (105)..(105): n is a, c, g, or t
  misc_feature (346)..(346): n is a, c, g, or t
  misc_feature (477)..(477): n is a, c, g, or t
  misc_feature (608)..(608): n is a, c, g, or t
  misc_feature (930)..(930): n is a, c, g, or t
  misc_feature (1217)..(1218): n is a, c, g, or t
  misc_feature (1266)..(1266): n is a, c, g, or t
  misc_feature (1296)..(1296): n is a, c, g, or t
  misc_feature (1345)..(1347): n is a, c, g, or t
  misc_feature (1356)..(1356): n is a, c, g, or t
  misc_feature (1359)..(1359): n is a, c, g, or t
  misc_feature (1389)..(1389): n is a, c, g, or t
  Probeset Number=SeqID_12237
ggggagccagaggcacacgggtnttagtaagatgcaggggtgaggtgtggcctcgcaaggtacgttatagtgagagcgaagaggacaatcctcaggcgcagcacncgcgttgttagatcggaatggatgtgtgtgggaacagaagacaggcgctcaggcaggggcaggcaatgatacatgaatagacagacagagcgccagaggaatcggcaacaggcgggaggagggcgatgcgtcacacaagggggcatgtatgggtggtacaggcagtgtgcggccgcgtggtgaggcggggcgagtgatgtgtgtgtggtgtattagtgtgaaccagcacatggcgcgacangtggcacaggcacatcagcacaaaagcaacaggacatggcacacagcagagggtagtgagagataagtgacgtacgaacacaaaataaaataacacaccaaatatattgaacagtacgaatgtggtcaganggaggtggcggcgggcggtgatttggtcgagatgtgtagagagcagtgagtggcgcacagacacgacagggatgggggagtggagagcagacgagagacacacgtgcaagcgcacagacaagatggtcggnagggccagctgagtgggcggtgggaggtggacacacaaccgacttgttagtccgtgagaggtgtgggttcctcacacagagtggtgtttgtttgacgcgcaccacatgtggtggcgagctggagaccccacaaggatgggggtgggtgtgggccgcgtgggcgcagcggagcccgagcacacagaggttggggtgggcccgccccgtcccgcagcgcggtgtgttgggtcaggaggtgaagggggtgtcgcacgggcgccggtcgtcgggggtgaacacacacaagggggcggctggagccaaccagtggtaggagagtgcncaggcggggcgccagggtgccgcgtggttgcgccacaccaccctgtggtggagtgggtgccaggcggccccgtagggcagtggcggattacgcagccgcggtgttagtatgatcccatgtgtgaacagtgtggacaatttcccaccattggacacaatgtgtgtcggccgccgtttgtaccccaattgccgccgttttccgtttcgcgcccgccagggtggccgccccagcagtggtcatttttaccatattttagttgtcactattttttgttcacggccgttggnnggcccggcgaagggtaaatctcaggcgggcgaagcggtaaaaaaaatnggagtattagggataggagagagggggtcnggggcgggatgggaaatagagaaggggcagaggaaagagcgcgctcctnnnctttgtttnttngggcgggcccggaggggggggcccgcccgntgtttgtagcccacatctccacccttgt

SEQ ID NO: 2459 - DNA, 1756 bp, Glycine max
  misc_feature (10)..(10): n is a, c, g, or t
  misc_feature (25)..(25): n is a, c, g, or t
  misc_feature (85)..(85): n is a, c, g, or t
  misc_feature (88)..(88): n is a, c, g, or t
  misc_feature (105)..(105): n is a, c, g, or t
  misc_feature (118)..(118): n is a, c, g, or t
  misc_feature (120)..(120): n is a, c, g, or t
  misc_feature (134)..(134): n is a, c, g, or t
  misc_feature (139)..(139): n is a, c, g, or t
  misc_feature (194)..(194): n is a, c, g, or t
  misc_feature (223)..(223): n is a, c, g, or t
  misc_feature (226)..(226): n is a, c, g, or t
  misc_feature (243)..(243): n is a, c, g, or t
  misc_feature (246)..(246): n is a, c, g, or t
  misc_feature (284)..(284): n is a, c, g, or t
  misc_feature (286)..(286): n is a, c, g, or t
  misc_feature (289)..(289): n is a, c, g, or t
  misc_feature (291)..(291): n is a, c, g, or t
  misc_feature (293)..(293): n is a, c, g, or t
  misc_feature (299)..(299): n is a, c, g, or t
  misc_feature (310)..(310): n is a, c, g, or t
  misc_feature (347)..(347): n is a, c, g, or t
  misc_feature (351)..(351): n is a, c, g, or t
  misc_feature (371)..(371): n is a, c, g, or t
  misc_feature (698)..(698): n is a, c, g, or t
  misc_feature (776)..(776): n is a, c, g, or t
  misc_feature (852)..(852): n is a, c, g, or t
  misc_feature (935)..(935): n is a, c, g, or t
  misc_feature (1016)..(1016): n is a, c, g, or t
  misc_feature (1167)..(1167): n is a, c, g, or t
  misc_feature (1201)..(1201): n is a, c, g, or t
  misc_feature (1246)..(1246): n is a, c, g, or t
  misc_feature (1249)..(1249): n is a, c, g, or t
  misc_feature (1257)..(1257): n is a, c, g, or t
  misc_feature (1344)..(1344): n is a, c, g, or t
  misc_feature (1353)..(1353): n is a, c, g, or t
  misc_feature (1355)..(1355): n is a, c, g, or t
  misc_feature (1406)..(1406): n is a, c, g, or t
  misc_feature (1414)..(1414): n is a, c, g, or t
  misc_feature (1423)..(1423): n is a, c, g, or t
  misc_feature (1448)..(1448): n is a, c, g, or t
  misc_feature (1464)..(1464): n is a, c, g, or t
  misc_feature (1478)..(1478): n is a, c, g, or t
  misc_feature (1567)..(1567): n is a, c, g, or t
  misc_feature (1599)..(1601): n is a, c, g, or t
  misc_feature (1605)..(1605): n is a, c, g, or t
  misc_feature (1620)..(1620): n is a, c, g, or t
  misc_feature (1625)..(1625): n is a, c, g, or t
  misc_feature (1664)..(1664): n is a, c, g, or t
  misc_feature (1693)..(1694): n is a, c, g, or t
  misc_feature (1714)..(1714): n is a, c, g, or t
  misc_feature (1717)..(1717): n is a, c, g, or t
  misc_feature (1742)..(1742): n is a, c, g, or t
  Peptide Sequence Number=SeqID_6139
  Probeset Number=SeqID_12238
tgcgcactcntgtactagtactgcntgtggagaggatgagacaggtgatagtgaccgctggtctactgctgcatgtctctattcntcntgtctgagacgtatcantagacatgggatntncactatatgcgccntattnacataatataatatataatatatcttcataatcttgttatctattctatatcttntctctatatactctatatattatatgttnttntctctattatatatctnttntctctcatctctcttctatatcttacatctcctccctntntcntntntctctntattatatagntatcttctatctgtcttgtgtctcattgtgtgtgtgntctntctctctgtagtgtccccgntctgtcgcgcgggcgcgctatgtggtgtcgcgccgtggtggtggtgtgttgtggctgggtcagtgctgtgctgcgcgtccgtctcgcgtgccgctctccctgcgtcgcgtgtacgagccgcctcgccgtcgccgctccgccgccgcgcagcaggcggacccgcggcgccgcggcagcgcgtgcttgcacggcggctcgcgcgactccagccgtgcgcggcgcgcgcgcgcgagcgcccagctcggtccgcggcactggcggcggcgttgtcctcgacggcgcgcgcgcgcagcccgcgtgcgaccgcctctacgacgtacgcgcgangcacgcgacgccgcggctgctctccgtcggtcgatgctaccaccgctgccgcagccggcccgacgccgacacagtccnccgcgctcacactgtcacgcgcgacgtctacacgcgcgcccgctcatctgtacgcgcgtgccgctcccgcctcgcncgtctcaccgcacgccgcccacgcgccgcgcgacccgccgccctgccgcaacgcggccgcgcatctcacgacgcgtccgctcncgttggtgtaggtcggctgctgctgtctgtccgagcgcgcgcgcgtcgcgcgcgcgcgccctgcgcgcacctgaagcgcgnccgacgcactgacgtacacggcgtgcgcgcggcgcgcacacggcgcgcgcgcgcctgtgctgtgctcgcgccgcgatgctgatagaggacgtgcgcgcagtgctgcgtggtgcgcgcgacgtgtcgggcggcgccgagcgcgtctgcgggngtcgcgtgcgcgcgcacccgacggtgccgcgcgnactgctcgacggctagcgcacgctcgacgcactgcctcgcgctcntcncatcgtcngcgcgcgtgcgcggtcgtctgcgacgaggcgtcggccggcccggacgtaccgcgcgcgccgcgcccgtcgtcgtgcgcgcgagtgcncgcgacgancngcagcgcgacacgcgcgccggacgcgggtcgcgcgcgacatgcgcactcancgcgcccntcatcgtantcatatatcctacaggcacgcgctnccgcacgctctatcgncccgcgctgcctcncgtcacgtcgcgatcatcctcgcgccgctcgggccgcgcgccatgcgcatgatgctcacgcacagccggctgcggcgcactcacctcgncacgacgacccggcggcacgcgcgacgatccnnnctgntcgccatccctgcancgccntggcgattcgtgccacgcgcgcccggataggacgcaccntgacaaaccctacacacgtaccggactgnnacatcgatctagttctttgntcnttacgccgacgtctcagctgctcangcgcccagcgccgg

SEQ ID NO: 2460 - DNA, 1954 bp, Glycine max
  misc_feature (1)..(1): n is a, c, g, or t
  misc_feature (69)..(69): n is a, c, g, or t
  misc_feature (164)..(164): n is a, c, g, or t
  misc_feature (166)..(166): n is a, c, g, or t
  misc_feature (186)..(187): n is a, c, g, or t
  misc_feature (196)..(196): n is a, c, g, or t
  misc_feature (231)..(231): n is a, c, g, or t
  misc_feature (244)..(244): n is a, c, g, or t
  misc_feature (250)..(250): n is a, c, g, or t
  misc_feature (339)..(339): n is a, c, g, or t
  misc_feature (374)..(374): n is a, c, g, or t
  misc_feature (382)..(383): n is a, c, g, or t
  misc_feature (386)..(386): n is a, c, g, or t
  misc_feature (400)..(400): n is a, c, g, or t
  misc_feature (557)..(557): n is a, c, g, or t
  misc_feature (578)..(578): n is a, c, g, or t
  misc_feature (581)..(581): n is a, c, g, or t
  misc_feature (588)..(588): n is a, c, g, or t
  misc_feature (596)..(596): n is a, c, g, or t
  misc_feature (600)..(600): n is a, c, g, or t
  misc_feature (611)..(611): n is a, c, g, or t
  misc_feature (654)..(654): n is a, c, g, or t
  misc_feature (683)..(683): n is a, c, g, or t
  misc_feature (686)..(686): n is a, c, g, or t
  misc_feature (693)..(693): n is a, c, g, or t
  misc_feature (777)..(777): n is a, c, g, or t
  misc_feature (783)..(783): n is a, c, g, or t
  misc_feature (806)..(808): n is a, c, g, or t
  misc_feature (810)..(810): n is a, c, g, or t
  misc_feature (814)..(814): n is a, c, g, or t
  misc_feature (860)..(860): n is a, c, g, or t
  misc_feature (862)..(863): n is a, c, g, or t
  misc_feature (866)..(866): n is a, c, g, or t
  misc_feature (921)..(921): n is a, c, g, or t
  misc_feature (1008)..(1008): n is a, c, g, or t
  misc_feature (1011)..(1011): n is a, c, g, or t
  misc_feature (1054)..(1054): n is a, c, g, or t
  misc_feature (1083)..(1083): n is a, c, g, or t
  misc_feature (1105)..(1105): n is a, c, g, or t
  misc_feature (1168)..(1168): n is a, c, g, or t
  misc_feature (1170)..(1170): n is a, c, g, or t
  misc_feature (1188)..(1188): n is a, c, g, or t
  misc_feature (1270)..(1270): n is a, c, g, or t
  misc_feature (1297)..(1297): n is a, c, g, or t
  misc_feature (1300)..(1301): n is a, c, g, or t
  misc_feature (1303)..(1303): n is a, c, g, or t
  misc_feature (1398)..(1398): n is a, c, g, or t
  misc_feature (1470)..(1470): n is a, c, g, or t
  misc_feature (1478)..(1478): n is a, c, g, or t
  misc_feature (1484)..(1484): n is a, c, g, or t
  misc_feature (1537)..(1538): n is a, c, g, or t
  misc_feature (1565)..(1565): n is a, c, g, or t
  misc_feature (1571)..(1572): n is a, c, g, or t
  misc_feature (1576)..(1576): n is a, c, g, or t
  misc_feature (1590)..(1590): n is a, c, g, or t
  misc_feature (1603)..(1605): n is a, c, g, or t
  misc_feature (1631)..(1632): n is a, c, g, or t
  misc_feature (1648)..(1648): n is a, c, g, or t
  misc_feature (1727)..(1727): n is a, c, g, or t
  misc_feature (1813)..(1813): n is a, c, g, or t
  misc_feature (1848)..(1848): n is a, c, g, or t
  misc_feature (1852)..(1853): n is a, c, g, or t
  misc_feature (1856)..(1861): n is a, c, g, or t
  misc_feature (1863)..(1865): n is a, c, g, or t
  misc_feature (1868)..(1868): n is a, c, g, or t
  misc_feature (1873)..(1873): n is a, c, g, or t
  misc_feature (1882)..(1882): n is a, c, g, or t
  misc_feature (1900)..(1900): n is a, c, g, or t
  misc_feature (1902)..(1907): n is a, c, g, or t
  misc_feature (1911)..(1912): n is a, c, g, or t
  misc_feature (1916)..(1917): n is a, c, g, or t
  misc_feature (1920)..(1920): n is a, c, g, or t
  misc_feature (1924)..(1925): n is a, c, g, or t
  Probeset Number=SeqID_12239
nagcgttcgtcgcgtgtggtgacggtggtgcagaccaatatcagacatataaagacaagaggtataatncggaggccgacacgagaagaaattgtagtagagagaagcaatgctgacaatcagtagacagtcaggtgcacgtgatgataccacagaaaatagtngncaacaactgtactccatatnnacatgaganagatgccgagataactagtacgattgtatgagcgnggatcagatgganagcggncgtgcgtggccgtacgacgccggcatgctagcatgaatctacggtacactatgagatattgggacccatgggcgagtcgtatattgtgngcgctgcacgcacgagtatagagaagagtgtgacncttgcacnnatnacttaattctttantggtagagaggagacagtaagagtagtacaaattacaccgggtacatatctcgacgtacattgtgtcgtctagcgcagagtatcatagaacatatgataggagggatggtgttatcgcgtgactgtgagcaatagcatgatggatatgtacatcatntgcagttctcatattttatantcntttggtnttttgganaggnggttgtgtgtntgtggggtgggggatgggtgtggcagtagagggaggtgagccncggctggctcgcgaggctaatacgtatcntgntctcagnatatagagatcgcgcatgaaggctgatcacagcagataataggtcgcgagaagtatgaggggtgtggattctctcgtggtgtgngttatntggtgtatttacatatctctatnnntncctncatactgtatcaagcatcattctctagtgtctgtgtctactgtcantnnccnacccactgggtgttcttactaactaaacactcatacagattagagggggcgtgtncacacactcggcgtagcaagcatcgtctgccatcggtcgaggttcgagcatatgagatatgagataagagagatggtcgcagcgtgnagngtacacgacatctcagtgtgtgttggttgttgtgtctaacccnctatgtgtacgttttattatcttttccancttacgccactcgacacactanctctctcacagctcctgtgtgtccgttatagtgagagatatcacataattatgctagcatttnanatgtatatatattcgtgnatgagtgttcgatgggcgagagagagcacaagtacgaaacacatataatcatcaacatacagtgtagagtatatatatcatngactacagttcgcagggcgcgtcgcgntcnngnttggaaatgtcgatctgctctgtctgatatgtgtattggtgtagtttgtatgtgatactgtagttatatattgtagctgcggcgctagacaatantcgagacgtcgaggtggggccgcgcgatgcgagaagacgacacacgagtgagcgaatggggggtcagtacanacatctgncatgcntgagcaacggctcggagacagtggtacagttatgtattttgtagtactatccnnttgacgtgagttgtagagttgtagatngaattnnatantattggccggctgntcctcgctgttgnnnggagtggggtgaggagggcggcgttnnggtaggagaaattagntgtggttagttgggtgcgcgtagtgagccgcgccctcgcgtcccacacccaccaggacaatgcgaggtctctccattancgatgtgtgttgtgttgcgcggtgggaacaagtacacatctctgtcatgtagtgttttgtatttcctcctatctgatgtgcggcgnccgtgcctctcagtgttatatttggtagtgggtgngggnngtnnnnnncnnnaanaaaanagagaagangggcggcgcgcgcttggngnnnnnngggnnaccnnacngggnnggagggggggccacccacccacaccaaac

SEQ ID NO: 2461 - DNA, 522 bp, Glycine max
  Peptide Sequence Number=SeqID_6140
  Probeset Number=SeqID_12240
cacacttaacatttgttgccttccaatctacctctgaaattttctttctcactctcaaaatgaagctttcgatgcgtttgatctcagctgttctcctcttgttcatgatattcgttgctacagggatgggtccagtatcagtggaggcacgcacatgtgagtcacagagccataggttcaagggtccatgcgtgagcgacaataactgcgcaaacgtgtgccacaacgaaggttttggcggaggcaaatgccgtggacttcgtcgtcggtgcttctgcaccagacattgctgattcattgaacctcataaatcatcaaaatcatcgatccattgtcttgtgttttcttctttcttatctaaatcttcagtaaagtaccatgtcgtacggtacgcgtgtgtttgtctttaggttgttctcgaataagtcttttgtgtctttacagttttaaggtaatgttatattctaaatgatggtaactggggatttgataatataaacatgactaaagttaaaatgtggt

SEQ ID NO: 2462 - DNA, 513 bp, Glycine max
  Peptide Sequence Number=SeqID_6141
  Probeset Number=SeqID_12241
accagtaccttcttgtttgggaaaagagagaaaaaagaaattaaagcaaaagttgttttgttggtacggtgagaaaaatggggcctcttgtgatttcttcaagttttctttggtatcttagctttgttctaagtgctgcagttagagtagtccacgtccaagctaattacggttggcttaacgctcatgcaacgttctatggggccaatcaaaatcccaccacccttggtaagtcatttttaatgtgtaagaataatatatataacttgtacgtataactttcttgcatagatccacatgttaattagtctgaaatataacatgtatataaccaatatgattacgttaaacattatgttcaccctcattattcttgataggaaattaaacttactcaaaaatattgcacttgagcgtaaaatgttcttccctcttcataatattttctttttttcttaaaacaaaaacgattctatcacaccctttaattatgaggtgtkarawgcgtatggg

SEQ ID NO: 2463 - DNA, 1587 bp, Glycine max
  misc_feature (12)..(14): n is a, c, g, or t
  misc_feature (21)..(24): n is a, c, g, or t
  misc_feature (26)..(26): n is a, c, g, or t
  misc_feature (30)..(30): n is a, c, g, or t
  misc_feature (32)..(32): n is a, c, g, or t
  misc_feature (34)..(37): n is a, c, g, or t
  misc_feature (41)..(41): n is a, c, g, or t
  misc_feature (43)..(44): n is a, c, g, or t
  misc_feature (68)..(68): n is a, c, g, or t
  misc_feature (143)..(143): n is a, c, g, or t
  misc_feature (147)..(147): n is a, c, g, or t
  misc_feature (169)..(169): n is a, c, g, or t
  misc_feature (176)..(176): n is a, c, g, or t
  misc_feature (179)..(179): n is a, c, g, or t
  misc_feature (183)..(184): n is a, c, g, or t
  misc_feature (187)..(187): n is a, c, g, or t
  misc_feature (211)..(211): n is a, c, g, or t
  misc_feature (214)..(214): n is a, c, g, or t
  misc_feature (219)..(220): n is a, c, g, or t
  misc_feature (222)..(222): n is a, c, g, or t
  misc_feature (284)..(287): n is a, c, g, or t
  misc_feature (289)..(289): n is a, c, g, or t
  misc_feature (329)..(329): n is a, c, g, or t
  misc_feature (337)..(337): n is a, c, g, or t
  misc_feature (389)..(390): n is a, c, g, or t
  misc_feature (582)..(582): n is a, c, g, or t
  misc_feature (627)..(627): n is a, c, g, or t
  misc_feature (706)..(706): n is a, c, g, or t
  misc_feature (871)..(871): n is a, c, g, or t
  misc_feature (939)..(939): n is a, c, g, or t
  misc_feature (1002)..(1002): n is a, c, g, or t
  misc_feature (1011)..(1011): n is a, c, g, or t
  misc_feature (1280)..(1280): n is a, c, g, or t
  misc_feature (1305)..(1305): n is a, c, g, or t
  misc_feature (1321)..(1321): n is a, c, g, or t
  misc_feature (1328)..(1328): n is a, c, g, or t
  misc_feature (1332)..(1332): n is a, c, g, or t
  misc_feature (1481)..(1481): n is a, c, g, or t
  misc_feature (1508)..(1508): n is a, c, g, or t
  misc_feature (1539)..(1539): n is a, c, g, or t
  misc_feature (1541)..(1541): n is a, c, g, or t
  misc_feature (1587)..(1587): n is a, c, g, or t
  Probeset Number=SeqID_12242
aaaccggttttnnntcccgcnnnncncctncncnnnnaccncnngcgcctccactctctcctcttctnccctcgcttctgctcataccttccgctctcttatacactattctatatcttctcgtcctgtgcatcgtattattnttcnctttatttactttcttttgttngattttnagngtannttntggataatatattatatatgttgngtngagtnnantgggagaaaagggagacgtctgaaggagggtaggaaggaaaaagaggaaaatgagagaaaannnntncttacactcactcgctctcacatctatctctaactatganacttcccnctgggatcggcgttgcttcctggcgccacatacgcacaaatgtgccagacannaacatatgttcttctgcgcgaccaggttaacgtggctgggatcaagtctagatacactattctcggcaaatatattatttaatactgacaacagactaatcattcataatttatatcaacacacttctttttcatattcgtgggttttatgtataattgcgcgcggccaaacggtgaatgaaagcgtcgccnccacactactcagcgcccgcctacacacacacatacgcaccgcgngggagacacgtgcgtgacaatatattcatcagcaatacactatatccaactctctttctctctcttctcttacacttanctcttatatcttaacacttttctactttgcttgttttgcttccctacttttgtggagattctctcctcacacatatcgtttggtgtggtggtacctatgtcttgtcgttgcgagagaatatttgttgtagtgttgtggtaacaacagatctcgtatagcgtcttnatcaattgtatcctctcgtatgtcgcactgtgaggcatagttcttggaaaggtagcggctgggctccncctcggctcctccacacaactcctgctcgctcttatttactataagactgttcatttctcctnctgtggcgnaacaaccaagactaacaccgggcacacaacaataccatgcgctcgccactatcaatcactcctcgcgctacacctggcgctctcactacatcactcttcactacaccgcacaatcacatgctccagcctacgtcgtactggcggtgacctgcacggcttctctgcgaaacctcatatgttatgtatgtattgtgggatcacacagcgcgcgtgtggttgtatacatcacgtgtgcggtggcgaatgatacaacattttcgtcgtcgggntgcaacgagtgtgctggcgacaaanacacgagggaatgatngatcctnatcnctgcacttcgccgcacagctatctaccacacaaaagggaggtggataatacataatatttgtatgtattggtggtgtgtgatgatacatatttgtatctggtgtagaagattagagggtataactgttctctctgtgcctaaagacgtnatcaccgttgtcatctctgtgcgcatncacgccgcagccgcgggtgtggcgcgactancnacgcgacaacaatctgctatctgcgctcacgatattcggccgacan

SEQ ID NO: 2464 - DNA, 1589 bp, Glycine max
  misc_feature (1)..(2): n is a, c, g, or t
  misc_feature (85)..(85): n is a, c, g, or t
  misc_feature (122)..(122): n is a, c, g, or t
  misc_feature (128)..(128): n is a, c, g, or t
  misc_feature (178)..(178): n is a, c, g, or t
  misc_feature (183)..(183): n is a, c, g, or t
  misc_feature (209)..(209): n is a, c, g, or t
  misc_feature (216)..(216): n is a, c, g, or t
  misc_feature (266)..(266): n is a, c, g, or t
  misc_feature (269)..(269): n is a, c, g, or t
  misc_feature (285)..(285): n is a, c, g, or t
  misc_feature (287)..(287): n is a, c, g, or t
  misc_feature (335)..(335): n is a, c, g, or t
  misc_feature (350)..(350): n is a, c, g, or t
  misc_feature (400)..(400): n is a, c, g, or t
  misc_feature (414)..(414): n is a, c, g, or t
  misc_feature (472)..(472): n is a, c, g, or t
  misc_feature (489)..(489): n is a, c, g, or t
  misc_feature (536)..(536): n is a, c, g, or t
  misc_feature (787)..(787): n is a, c, g, or t
  misc_feature (874)..(874): n is a, c, g, or t
  misc_feature (912)..(912): n is a, c, g, or t
  misc_feature (999)..(999): n is a, c, g, or t
  misc_feature (1002)..(1002): n is a, c, g, or t
  misc_feature (1357)..(1357): n is a, c, g, or t
  Peptide Sequence Number=SeqID_6142
  Probeset Number=SeqID_12243
nngcgctcgagagcactcgtcgtacttcatatatcacgaggatagatggaacccgagcgtcgcgcctcattgacgtagtatcgtncgagatacgtctgtgagtatgtagcgtgttgcgcganctgtantgtagtgtagtagatgtataggatgtcggcagggtgtgtatattaggacnaaccnacgagtgcgattgtgacgtcgagcancgcatcntgacgcgcccccatgtacatactatatgctgacaacacacagtacaaagnagngcgtgacgaacgccgngngagagaagacgcagcgttcgtgagaggaagacgtcgtctcgattctcncgtaagaatagcggngtgacatagtagtgaggcgatcgagtgtgagtgaagctatccgagagatnggacagtactcganagagtaacagaactctccgagcagagatgtcgcgctcggagcctcgctatagttaacncgcggctattacatcangcgggcgccatggcgttagacacgctcagacagctgctagtatctcngaactatagtgatattctctattattaatcagtgcgctagagagtcgatgagcacacatagcgtgtctaatcgtattgtagttccacaatcgagatctcgcgcgtagtgaggagcgaggaggtctatgcgtcaggaggtgcgacgcgatatcctgcgagaatgtgtaatactgagtgcgatgatgtagcgtcgtgccatacgttcgcactgtgagtgcacgtgccgacggctgagggggtggtgtgaccanaccatatataactaaacgtgctcccgcgcgcgatgacgttagttacgtatcagaagatcgcgagacgtggctacgtcaccacggganaatatattctagagtatgactacactgcggagggtcgnactgcagagagtgtgatagtatctcaatagtagtgtatgcttacccgagaagcgtgcggaccagagtatgatgcacgcgtgcgacgntanagagatgcgtatacaacatatacgctcgacgatgcactcactagcgcgccagcgtatgagcgagtacagtgtgcgtgagtacagcataagtagcgcatatacaccacgagaatgctagacaagtgcagatatacagtcatcagcaggagtccgaattaggctagtgatgagcgcgatgctcctatgatcggaggatcgagccatccggacgctacgggtgtgcgctacgtgtatgtgagttcgtagaactatcagcagtatgatgtagtgatgcagcatgcacgactcacgtcggtgtatcgagtggtgtcagcacatgctttcacgtagcgcgggcgtgttgtggcgtgagtgnacagtgcatagatacatagaagatgcgatggaggctagagagtcttggtgtgtgtcgaacacaagagaagagagaagaaagagagatggctttagtccgagtagacacgtacgatcacttcgtaggggagggaggccatcgctcacactcagattgcggaagcgatgacgctcatgaggatactgacatgtcggttaggcgtctgctcgacgcagcggtgaggggtgtctgg

SEQ ID NO: 2465 - DNA, 1496 bp, Glycine max
  misc_feature (21)..(21): n is a, c, g, or t
  misc_feature (32)..(32): n is a, c, g, or t
  misc_feature (116)..(116): n is a, c, g, or t
  misc_feature (122)..(122): n is a, c, g, or t
  misc_feature (230)..(230): n is a, c, g, or t
  misc_feature (392)..(392): n is a, c, g, or t
  misc_feature (429)..(429): n is a, c, g, or t
  misc_feature (683)..(683): n is a, c, g, or t
  misc_feature (952)..(952): n is a, c, g, or t
  misc_feature (1002)..(1002): n is a, c, g, or t
  misc_feature (1111)..(1111): n is a, c, g, or t
  misc_feature (1178)..(1178): n is a, c, g, or t
  misc_feature (1311)..(1311): n is a, c, g, or t
  misc_feature (1319)..(1319): n is a, c, g, or t
  misc_feature (1347)..(1347): n is a, c, g, or t
  misc_feature (1354)..(1354): n is a, c, g, or t
  Probeset Number=SeqID_12244
aaaagacgcagcggtgggacntctcctacatntatcctcttctatactactatcttatagatgctagggaggagatgttgatagatgtggagttgatatagttttattataattanatatcnatggtgtgcctacatatgtatcatcacactttttcttgtattgatcaatcgatgtatgaactgtactgctgtgggtgttgttacaccaagaggaacccccgtcgtcgntagagtaggatggatagagagtgagtacgccacacatctacaccaataaacaagtggtcggaagacccacgttacatctacttatatgtagcacgccacacaccaactcactacgctcaccatcatatcaaacacaacaaaacaaaaaaacaactatatacnaacacaacataccacccaaataaatattctctattcntctctcgacgacaatgctactcatctctctcatgcttcgcgtatgtacgagacacggcactacatcgcgaggccgcccgcgcgtggtgtcgacggggatggtgtctgcactactccgatatcctatcacgacctccatctctttgtgctgtgattatcatggtgttgtcgttgatgttgtgtgatctcgtgcggaatagaagttagagcggcaccaccccgcaggctacacagagataagaaattagagaaaanatcatatcacacctatcgcgtcatcgggagtgtgtgatggttatgtgtggatctatatgcaacgctagctatacgaacaatccttattagtaaatggatatcataccacactcatctgctagtaggtaatttggtgactctcactcctccgctcgttatagaattgagaaatgaccttgctttatcacgatcagatatgcttctgtgcttgactcgtgtctgatgtcgtattagagtgatgagttcgtgggaagagtagtcgagtatangcatgcatgaggcaatagccacgatcgcgactacatgtcagatattagtntatgatactccctctccactcacaaccgcattcctagaccacttgattacatagtaattagatacgtgtgtgatcgaggccgccactcgcgactcatgatgaggaacantacgagcgtggctagacgggtatatagtagtgacagtattagtgtatttgtgcatcatcacttactngcctcggcgatgcgtagcgactgtcgtacgtcgctgtctgtatgagtatatgtgtgagcgctattgagttgatctgcgagctgggcatgagtgagagagtagtggtgtgcgtggtgtgcgtgagggatgatcngcacccanaacaatagtacagagcagtcgcgatgtngtgcgcncgtccgcgtctgtgagagagcgccgcgtgatcactatcgcatcgcgccgcgacacacctctgtggatcatgaacgaggtggagagtatagagggatcgacgcgggcgcagcggtgtagtccatatgatgaggagagtagtgg

SEQ ID NO: 2466 - DNA, 1467 bp, Glycine max
  misc_feature (74)..(74): n is a, c, g, or t
  misc_feature (268)..(268): n is a, c, g, or t
  misc_feature (270)..(270): n is a, c, g, or t
  misc_feature (332)..(332): n is a, c, g, or t
  misc_feature (349)..(349): n is a, c, g, or t
  misc_feature (417)..(417): n is a, c, g, or t
  misc_feature (424)..(424): n is a, c, g, or t
  misc_feature (436)..(436): n is a, c, g, or t
  misc_feature (879)..(879): n is a, c, g, or t
  misc_feature (919)..(919): n is a, c, g, or t
  misc_feature (1112)..(1112): n is a, c, g, or t
  misc_feature (1263)..(1263): n is a, c, g, or t
  misc_feature (1396)..(1396): n is a, c, g, or t
  Peptide Sequence Number=SeqID_6143
  Probeset Number=SeqID_12245
tttttaatttttttaattattattttttctttttatattttataaatatgtatatttatttattatataaaagnaaaagaattataggagtataatgagtttggttttttattataattataatggtgtttattttgttatacaggttatggtattggttggcgaactatcttgtggtaagtgtgctgcttacgtgcgtggcgacccggtgtggggtgtgctctgcgctgcgccggcgcgcgaggcgctaggcgtcgcccgccagagngnttctgttctgtttgtttcactactatgtagtgcgtgccgctgcgacgacaccgcgcgccgtncgtcgcggtcgcccgcntgccgggcccgtctgctgcgccgccgggcgcgagctactctaccgctggtcggagcccgggtggcctnacgtgcncacacgctcacncgcgcgagcgcgccggctaggctcctccgtatgcatgtgttctgcgcgttagtgtccggactagacggacgtgagtctcgtgtcgcgtggctgtggccgttgtagggtttgttgcgtttctattgctcgtggacctggtcgtctctcatcttgtatttgttctgtatactcctctatgcgcgtcctgataatctcgattatgtatcggtttgtatgcgtgatcttctcgtatcttgttttgtatgtccggtcgctctcactctaggagacgctatgactagtagagtggtgaatacgcacatgcacttataataccagctacgccggcgtatattgtagaactgtgtgcacttcatcgtattctctattgtttctctctatattcttgtctactatccgctcaccattaaatacttctgatgagtgcgattacgcacagctcnttcgtgctagtaggtatatagtctattatcacatatcgcngtctgtgatctgatgtcgtatctattcttatcttctctctcgtgtgtccgcgtaccagtccgctacgctgtctcataattattgtgtcgcagctccgcacgaaccctcgagctctctacgccgtcctcgcacatcatgactcgctacgagcttgcgcgatagaacagctacctatagtacccgtcatattcantacgacacgacagtcacactatcacgacgtgacagcacgcctccatatgacgatagacagagtgcagtggatggcgatactgctggctctcgtaagatcacttcgacacgtccgcgcggaggacaccgataccgcctgcacagaaacaagntcgaatagcagagcacgacataccgaccggcaccacgacagcgctcgccacgtacccgccaccgcgtccggctcacccactccacgcccacacacgcgacactgagtgcgtcgctgtatcgggtaggcgatgnattagagtgatcatgtaagtgtgactggatgtgactgcgtgacgtagtatcgcgtctgtgtctcatctacg

SEQ ID NO: 2467 - DNA, 1381 bp, Glycine max
  misc_feature (1)..(1): n is a, c, g, or t
  misc_feature (15)..(15): n is a, c, g, or t
  misc_feature (162)..(162): n is a, c, g, or t
  misc_feature (170)..(170): n is a, c, g, or t
  misc_feature (189)..(189): n is a, c, g, or t
  misc_feature (191)..(191): n is a, c, g, or t
  misc_feature (225)..(226): n is a, c, g, or t
  misc_feature (228)..(228): n is a, c, g, or t
  misc_feature (343)..(345): n is a, c, g, or t
  misc_feature (347)..(347): n is a, c, g, or t
  misc_feature (349)..(349): n is a, c, g, or t
  misc_feature (351)..(351): n is a, c, g, or t
  misc_feature (414)..(414): n is a, c, g, or t
  misc_feature (460)..(460): n is a, c, g, or t
  misc_feature (478)..(478): n is a, c, g, or t
  misc_feature (577)..(577): n is a, c, g, or t
  misc_feature (715)..(715): n is a, c, g, or t
  misc_feature (956)..(956): n is a, c, g, or t
  misc_feature (958)..(958): n is a, c, g, or t
  misc_feature (961)..(961): n is a, c, g, or t
  misc_feature (1201)..(1201): n is a, c, g, or t
  Probeset Number=SeqID_12246
ngtgctgctgtcgcnggctgctacagccgcgacgtctcagttggttcatgaggtagcgcgcgcgtgaggtgagacaatgttacatcacagaacagagacggccacctcgcatcgcacgaccgcgctctatcacgttcgtaactctctcctagagtacctgancgagatcntgcctcatgttgtactcantnctgtcattcttatccatatcgtcatatagtgagnngnaaatgacgatcgagtgagtgcacggtcgacagcgacgtaagatgacatagtcgagggcgcgccagatcgacacggacatcagcgcccagccggctcgcgtgtcagacaagccagnnnananantcgtgtcatctgagatcctatcagcatcaagtccgcgcgatacgtatatcgtgaagagtaatnatgcgaggcgtggtgtgatacgcgtgccactccatcgtaaaaggtngatcaccagagatcgcanagatattaagcgccgcattgcgtcactttgccacctgcactctctaggcatgatgtaacatcgcgtctgtgtctcagcttacacccgacacgagtatancactacacgccatctattgtacgctccctcatcacgtcagtatgcagaggacggataagacgcagcatggcgaacacatccctcagcagggggcgcggtacgtgcgcagaacaactactgttatatacgacgcatccnaacgcacaatcactgtgatgtctcgaggtcatattctgtactctacactagcgtcgcacggctagaagatagttagtgggtgctagagtgatacgttggcgtcgtgtggtcatgttaatattcatcgccactctcacggagtggagcggtctagaacatgtgagggcacgcacacgaacttaactagaacagtcgtacatgattttagtgtgtgttatccatcaatcccgcctacgattantntgncgggacgagctataatacgccgtgtagataagaaaccagagtgtcgtgcgttccgctggaagaatatccagtcaatacgagacgcgcgatccacacgtgcgacgctcgtcaatctggcgtaaagaatatcgtatgcggtgcatcagcggccacactctcttgaagagcgctacggaatgaagtgtaggagtgtggatatgatcgatatatctgtacgcgggagtagacaagagagagaancagtacctaaggagttatctctcgctagtcccctgagagtggatctcacgctagttgcggtcgtgagactccgccaccaccacgcagcgggggcagacactcccacgagatcatcaacgaatatgcagagacgagagatcgtacgaggggcataaaggagatcgagagcgcgagagaaaa

SEQ ID NO: 2468 - DNA, 1668 bp, Glycine max
  misc_feature (1)..(1): n is a, c, g, or t
  misc_feature (16)..(16): n is a, c, g, or t
  misc_feature (67)..(67): n is a, c, g, or t
  misc_feature (159)..(159): n is a, c, g, or t
  misc_feature (186)..(186): n is a, c, g, or t
  misc_feature (220)..(220): n is a, c, g, or t
  misc_feature (281)..(281): n is a, c, g, or t
  misc_feature (321)..(321): n is a, c, g, or t
  misc_feature (358)..(358): n is a, c, g, or t
  misc_feature (374)..(374): n is a, c, g, or t
  misc_feature (424)..(424): n is a, c, g, or t
  misc_feature (1011)..(1011): n is a, c, g, or t
  misc_feature (1094)..(1094): n is a, c, g, or t
  misc_feature (1096)..(1096): n is a, c, g, or t
  misc_feature (1253)..(1253): n is a, c, g, or t
  misc_feature (1302)..(1302): n is a, c, g, or t
  misc_feature (1309)..(1309): n is a, c, g, or t
  misc_feature (1338)..(1338): n is a, c, g, or t
  misc_feature (1447)..(1447): n is a, c, g, or t
  misc_feature (1533)..(1533): n is a, c, g, or t
  misc_feature (1549)..(1549): n is a, c, g, or t
  misc_feature (1554)..(1554): n is a, c, g, or t
  misc_feature (1556)..(1556): n is a, c, g, or t
  misc_feature (1558)..(1559): n is a, c, g, or t
  misc_feature (1561)..(1562): n is a, c, g, or t
  misc_feature (1575)..(1575): n is a, c, g, or t
  misc_feature (1582)..(1582): n is a, c, g, or t
  misc_feature (1587)..(1588): n is a, c, g, or t
  misc_feature (1602)..(1602): n is a, c, g, or t
  misc_feature (1606)..(1606): n is a, c, g, or t
  misc_feature (1642)..(1642): n is a, c, g, or t
  misc_feature (1645)..(1647): n is a, c, g, or t
  Peptide Sequence Number=SeqID_6144
  Probeset Number=SeqID_12247
ntgttcgcctcattanttaccgcaaccacacaccacgccaccatggtcacgcacccgacatcaattnagcctctcagccacgcactcacgcagtgcatagactcatgtctatctgtactcgctgactcccacgcacgcgctatccactaattgtgcgcnccacccacctcatatatactcagtgtntaccacaccacgcccatatcgtttatatgatganttatatacctcagcacgatgtcttatttaatagatgatagtcgagtcagctatcataatgntcatcttgtgttatttcttactcagcgcccccaccacgtngcgtcgtcctcggtatttctctcacccgaccgcgtcncatatagtcgtctcgnccgccgcacgagtctatcacacagcgcgttgtgtcacgcgttgtgtgacnccgaccgagctatagcattccagtctccaactagattcgcacgcgcgtagtgcgcgtccgagagagatatcagcacaccattcgtcatccacccaacttatccgtcgtcgctcatatagttactcgacgtctctacagtcacgtcatgtttagcgcacatccgcctccacaccgtcacagtgacaggtgtcgcccgaacggagtcacaccacaatgtacctcgccaccacctcttcctcgtatccgtctccactctactcgcgtgtttgtagtgagtcgtccgcgcgcgcgcaatggtgttcccaccatgacgcgtattatgttaacgcgcaccgccaacacgcatcgcgacacgcctgaagctgatagagcaatatgtgatcagcgtcacacgtgatgtgtcaggcgcgacggtaatacgcgcacgcatacgtgcgacggaggcgagtattcgacactcgcctgctccgaacggtcgacggcgcgcgagtattcacaccgagcctcgcgaaaccacatacacgaccacacatcacacacatctcactatatatattatcacaattacaacgaattacgacataaangacacaacagtattcatcgtgttctccacgatatctgccgctttagcgcggaggcgtgcgagtgtataggcaagtatgtatcntnccgccgcgcaccgcggaccattcacgtatattctatagatcacgcccaccacgagagcactgcacactcaccacctctccgcagcgtgcttccgcaccacatactctgcgttagaatcggagcactccacaggtcctcgcgcgccgatcgccgagcnccacagacgacaatacaggttaacagtgtaattgtgagaagaccactcncacgcgnccacgcagcagtcacatcgccctctctcnccgcgctcgcaccgcgcacgtcgtcttctacgctcgctgtgtacactacgatgagcagagaggagatcatgacgcgaacagcgatgagagacatgagaatagaggtaanagtatagatcacaacagcagacgaggcagtaggagtacacataacacgatacaagacaccagacgcgcgtctctctctattatcantcacaacagatatatntcgantnannannaaactccacaccnacactgncgcgnntcagcgcccctctnctcngtcggccctgcctgccttgccgggcggggcgtcggnggnnnggggtaggtggggcggggttg

SEQ ID NO: 2469 - DNA, 1338 bp, Glycine max
  misc_feature (163)..(163): n is a, c, g, or t
  misc_feature (441)..(441): n is a, c, g, or t
  misc_feature (1193)..(1194): n is a, c, g, or t
  misc_feature (1210)..(1210): n is a, c, g, or t
  misc_feature (1239)..(1239): n is a, c, g, or t
  misc_feature (1246)..(1246): n is a, c, g, or t
  misc_feature (1279)..(1279): n is a, c, g, or t
  misc_feature (1288)..(1289): n is a, c, g, or t
  misc_feature (1320)..(1321): n is a, c, g, or t
  misc_feature (1327)..(1327): n is a, c, g, or t
  Probeset Number=SeqID_12248
ggagggtgtgtgacgaaggaacagacatagatgtggtgagtgagtatgggcagaaagagggcgtgacacaagtaaatttcttgatgtcgtttctagactttatcaataagttaaggtagtagtagttagatggtgtagagaggtaattagagaggagtatatngagtgtgcacgagtatattccatcatgtaaacacttagagagtagtgacgggaggagggtgagaaaaataatgaagagagctggagagtttgtattagatatcagaaagacacgaccgacttcacaccgcatagccacccacagcgtggaaatggcaagggaggttatggttttgtaatggccgtttgctggtattgtactacattaatctactgtgcaggccccgacacacgagcgagcgtaagataagataagaaagacggtagtgtacttgtttngtctgcttagagcgcctgcacgtgagccgtggcgtatcgtcatcatttaccttttcatatgctcttgttctatatttaccttcaattcgactttcttaccgactctataatctcaaaaggtaattaacgacaagtctagacgcacgctgacgtcctctgtgagtggcacttgccttgcgtgtctgcgttcctgctcgctctagttatactagtatgattgttataatattaagtagtcaatattttattttaaaatagagttagataaggaatcataggggttgtgatcgtgttcatttctctaatcaactacaattattatttacgtcgtaaggtggaaatatgaatatacggagcttctgtgtaggattatagcaatagtgccgcagactaggaggctttttgtttcgctttttgtttgtcttattttatctttttctctatatgtttgggtgggttttttttagttttgttatatgtaaaaatcgaagacagctgggattctagaatttaatatattttaattaggtactagctgatattagaataaatagtttctacaatgattatatatattacttttgtctacttatttattctatctgaactttaacgcgtgtgtgtgcgtagagtttgaggacgattaggaatgaagaagaaaagggatatcgttggtggtaattttttggttgttgaggagtgatgttgtcttaaagagattatattgatacattatggaataatatgaatgnntaattagataaaagtnttagattagaatatttatgatttttacantttgatnaatctcatatatggaataattataaatttattntttaaaatnntatataataaatatataaataaataatttannataaanaaaaattaaaa

SEQ ID NO: 2470 - DNA, 1610 bp, Glycine max
  misc_feature (30)..(30): n is a, c, g, or t
  misc_feature (72)..(72): n is a, c, g, or t
  misc_feature (101)..(101): n is a, c, g, or t
  misc_feature (105)..(105): n is a, c, g, or t
  misc_feature (110)..(110): n is a, c, g, or t
  misc_feature (117)..(117): n is a, c, g, or t
  misc_feature (165)..(165): n is a, c, g, or t
  misc_feature (172)..(172): n is a, c, g, or t
  misc_feature (174)..(174): n is a, c, g, or t
  misc_feature (176)..(176): n is a, c, g, or t
  misc_feature (178)..(178): n is a, c, g, or t
  misc_feature (183)..(183): n is a, c, g, or t
  misc_feature (187)..(187): n is a, c, g, or t
  misc_feature (189)..(189): n is a, c, g, or t
  misc_feature (191)..(191): n is a, c, g, or t
  misc_feature (197)..(197): n is a, c, g, or t
  misc_feature (218)..(218): n is a, c, g, or t
  misc_feature (255)..(255): n is a, c, g, or t
  misc_feature (259)..(259): n is a, c, g, or t
  misc_feature (286)..(286): n is a, c, g, or t
  misc_feature (371)..(371): n is a, c, g, or t
  misc_feature (426)..(426): n is a, c, g, or t
  misc_feature (499)..(499): n is a, c, g, or t
  misc_feature (581)..(581): n is a, c, g, or t
  misc_feature (598)..(598): n is a, c, g, or t
  misc_feature (636)..(636): n is a, c, g, or t
  misc_feature (653)..(653): n is a, c, g, or t
  misc_feature (655)..(656): n is a, c, g, or t
  misc_feature (658)..(658): n is a, c, g, or t
  misc_feature (683)..(683): n is a, c, g, or t
  misc_feature (700)..(700): n is a, c, g, or t
  misc_feature (801)..(801): n is a, c, g, or t
  misc_feature (806)..(806): n is a, c, g, or t
  misc_feature (905)..(905): n is a, c, g, or t
  misc_feature (1050)..(1050): n is a, c, g, or t
  misc_feature (1066)..(1066): n is a, c, g, or t
  misc_feature (1349)..(1350): n is a, c, g, or t
  misc_feature (1433)..(1433): n is a, c, g, or t
  misc_feature (1524)..(1524): n is a, c, g, or t
  misc_feature (1535)..(1535): n is a, c, g, or t
  misc_feature (1538)..(1538): n is a, c, g, or t
  misc_feature (1543)..(1548): n is a, c, g, or t
  misc_feature (1551)..(1552): n is a, c, g, or t
  misc_feature (1580)..(1581): n is a, c, g, or t
  misc_feature (1583)..(1586): n is a, c, g, or t
  misc_feature (1588)..(1593): n is a, c, g, or t
  Peptide Sequence Number=SeqID_6145
  Probeset Number=SeqID_12249
ctcatgatacagcgactccactatagacangatctagcgtggttatcatgtatctattatatatatctcctnttcaattatgattatgatacattgaggtnagtnaggcnctcatcnttcgttatagtataggactcacaaatatcattctcacctcatccttcnctccctntngntnctttntgtngntngtagtntatatatattaattgtcatangcagaggagtagtggggtgtgagtgactacaaccacncttntcactctatatacacacatctccgtanctcatacgcaacgacataaggctggatcacacaagtatagagcagtaagtaatagtatcagtataatatcgagtgtgatgagtgnagtacacgagatgtagacgcgacgcacacgacgcggcatccattgacacatagancataagacgcatgttgtgtgaggatgagtgtgaggagtgtgggagacagcaccactcgatatcgcgcctccanctctctctgctacgcgtgtgagtcgtctcttgcgattcatagctacatatcgggacacacatacgatgtatatactaaatangctgtgagagagtcgangactagcaacaagacactcaatagatgaatgtacagantacatagcataagcatnannanatctacattacacgagagagccacnagtaggcaataggcatntatagtcgacatggtcagatctcgcgagtactagaggcgtcaggccagcgtgcacacgtgaggacagacgcagctgcgtaggtggcgttagtgcgcgccgnggctnttccgtctcgccgctgtttcgtcctcatacggcgctgcgcctcgtgttaagatgtgtttattgttgtttcattgacatctttgatgttcactctcattntcgcttatactcgtacccgaagttataatatagactcagtggcgtaattatggttctgtgttagtgttgggtgtcgttaggcgccacggcaccaacatgacgcgacagaggcgccacatgcataacaaacagaagaagttctctnaccctcttaccgccanctacgtaaacacacaagagtgagagtacaacgcaccagcaagtatgaaacatgcgcacatccatctcgggcatatagtctgcgcaatttatgataccgaccctgcgtcattccgcagtgtctactcatactactccctctatctccgctactctacatgtaccagagatcgagctgtagtgtgataacactatcccgtacacagacactaaagtgagaaatcagcttatagtcgggcgagagcgccacatgtccgagccgccgaagtaggactaagaggaggnngaggcgcgctcatcgcgaggttgagctatcccgtgtctccttcgtgtttgagcctatgagcccaactagtaagaacgtagagntctgacgccctgtgaggttcgtgttgcggttcttgcgattaagggtttgtgttcatagaacacatccactacaacatagacctcttaccanttatttacttnctncgtcnnnnnnttnntattctccacactatatgcatcatctanncnnnncnnnnnnacccacactcacaacac

SEQ ID NO: 2471 - DNA, 337 bp, Glycine max
  Probeset Number=SeqID_12250
cattaagaaactcgtttctcgttcttctaaagctgggcttcactttgctgttggacgaattcaccgtcttttgaagataagggtgagtgccaatgtaagagttggtgacacagctgatgtggattctgctgatatactgaaatatctagctgcagaggcgttggaggtgactggtaatgcaaataaggatctgaaggtgaagcgtattacccctatacatttacttcttgctatacgtggagatgaagagcttgactccctcattaaaggaacaattgccggaggcggcgttattcctcatatccacaagtgtctaatcgacaaatcctcaaaggag

SEQ ID NO: 2472 - DNA, 2062 bp, Glycine max
  misc_feature (1)..(3): n is a, c, g, or t
  misc_feature (14)..(21): n is a, c, g, or t
  misc_feature (25)..(26): n is a, c, g, or t
  misc_feature (31)..(38): n is a, c, g, or t
  misc_feature (50)..(50): n is a, c, g, or t
  misc_feature (54)..(54): n is a, c, g, or t
  misc_feature (58)..(58): n is a, c, g, or t
  misc_feature (77)..(77): n is a, c, g, or t
  misc_feature (91)..(91): n is a, c, g, or t
  misc_feature (93)..(95): n is a, c, g, or t
  misc_feature (97)..(101): n is a, c, g, or t
  misc_feature (103)..(103): n is a, c, g, or t
  misc_feature (149)..(149): n is a, c, g, or t
  misc_feature (171)..(171): n is a, c, g, or t
  misc_feature (173)..(173): n is a, c, g, or t
  misc_feature (203)..(203): n is a, c, g, or t
  misc_feature (214)..(214): n is a, c, g, or t
  misc_feature (248)..(248): n is a, c, g, or t
  misc_feature (255)..(255): n is a, c, g, or t
  misc_feature (258)..(258): n is a, c, g, or t
  misc_feature (260)..(261): n is a, c, g, or t
  misc_feature (266)..(266): n is a, c, g, or t
  misc_feature (271)..(271): n is a, c, g, or t
  misc_feature (279)..(279): n is a, c, g, or t
  misc_feature (287)..(288): n is a, c, g, or t
  misc_feature (320)..(320): n is a, c, g, or t
  misc_feature (358)..(358): n is a, c, g, or t
  misc_feature (401)..(401): n is a, c, g, or t
  misc_feature (409)..(409): n is a, c, g, or t
  misc_feature (418)..(418): n is a, c, g, or t
  misc_feature (510)..(510): n is a, c, g, or t
  misc_feature (521)..(521): n is a, c, g, or t
  misc_feature (556)..(556): n is a, c, g, or t
  misc_feature (618)..(618): n is a, c, g, or t
  misc_feature (633)..(633): n is a, c, g, or t
  misc_feature (752)..(752): n is a, c, g, or t
  misc_feature (774)..(774): n is a, c, g, or t
  misc_feature (868)..(868): n is a, c, g, or t
  misc_feature (900)..(900): n is a, c, g, or t
  misc_feature (942)..(942): n is a, c, g, or t
  misc_feature (1049)..(1049): n is a, c, g, or t
  misc_feature (1069)..(1069): n is a, c, g, or t
  misc_feature (1231)..(1231): n is a, c, g, or t
  misc_feature (1322)..(1322): n is a, c, g, or t
  misc_feature (1451)..(1451): n is a, c, g, or t
  misc_feature (1454)..(1454): n is a, c, g, or t
  misc_feature (1468)..(1468): n is a, c, g, or t
  misc_feature (1487)..(1487): n is a, c, g, or t
  misc_feature (1505)..(1505): n is a, c, g, or t
  misc_feature (1507)..(1507): n is a, c, g, or t
  misc_feature (1526)..(1526): n is a, c, g, or t
  misc_feature (1528)..(1528): n is a, c, g, or t
  misc_feature (1556)..(1556): n is a, c, g, or t
  misc_feature (1595)..(1595): n is a, c, g, or t
  misc_feature (1600)..(1600): n is a, c, g, or t
  misc_feature (1628)..(1628): n is a, c, g, or t
  misc_feature (1639)..(1639): n is a, c, g, or t
  misc_feature (1644)..(1644): n is a, c, g, or t
  misc_feature (1650)..(1650): n is a, c, g, or t
  misc_feature (1715)..(1715): n is a, c, g, or t
  misc_feature (1747)..(1747): n is a, c, g, or t
  misc_feature (1754)..(1754): n is a, c, g, or t
  misc_feature (1765)..(1765): n is a, c, g, or t
  misc_feature (1776)..(1776): n is a, c, g, or t
  misc_feature (1781)..(1781): n is a, c, g, or t
  misc_feature (1795)..(1795): n is a, c, g, or t
  misc_feature (1801)..(1801): n is a, c, g, or t
  misc_feature (1811)..(1811): n is a, c, g, or t
  misc_feature (1813)..(1813): n is a, c, g, or t
  misc_feature (1821)..(1821): n is a, c, g, or t
  misc_feature (1827)..(1827): n is a, c, g, or t
  misc_feature (1835)..(1835): n is a, c, g, or t
  misc_feature (1851)..(1851): n is a, c, g, or t
  misc_feature (1853)..(1853): n is a, c, g, or t
  misc_feature (1858)..(1858): n is a, c, g, or t
  misc_feature (1905)..(1905): n is a, c, g, or t
  misc_feature (1932)..(1932): n is a, c, g, or t
  misc_feature (1954)..(1954): n is a, c, g, or t
  misc_feature (1987)..(1987): n is a, c, g, or t
  misc_feature (1999)..(1999): n is a, c, g, or t
  misc_feature (2009)..(2009): n is a, c, g, or t
  misc_feature (2026)..(2026): n is a, c, g, or t
  misc_feature (2037)..(2037): n is a, c, g, or t
  misc_feature (2045)..(2045): n is a, c, g, or t
  misc_feature (2049)..(2049): n is a, c, g, or t
  Peptide Sequence Number=SeqID_6146
  Probeset Number=SeqID_12251
nnnttttccccccnnnnnnnnaaannggggnnnnnnnnggttgccgtcantgtntggnagtgtcggtgtatattctnatctatctctcccncnnncnnnnncncgcctcgctcgtgcgtctgctcgagttcgtttgagatgcatctccncgcgaagcgcggtgcaggcgtnangctgctcagggcactctctgacacaggggnacagacacacnacccggtctatccatagactagctggacgtgtgncatgcantantnntcttntgttntctcatgnattcgtcnntctctcatgtctcgctcgtggcatgtcggtcnagcgctactacgagcgcagcacgtagagcacgagtctnaaactactagtatagactcttacgtcagagcgaccacagcccngcgcaccncatctagcnacctacatcagacatacacgtcgtcatgcagcactatgtagacatactatgagcgtcggcgcgcgatatcgtagggcgtcctagccgggtgnattcgtacgcntctaatctctaaggtgcgctctgtctatgcatggncgctcagagcgagcggcgtacactgtaggctgagacttcatcattctgagccacgtgtcatnagtagcagaacactncagcgacctctctcacgaataagtcatcactatacgacgtactatgtcttgcgtagcgcgttctgtgctatatctacatctctgtgtgctgggagtctgtgtcgtatgagtatagtgcngctcgcgatctagttcgtcgtncgatgccgtcgtgagcgacagtgtgtgccgtcgtccgtcgcgcgcgtgtgtagccgtggcgactggcggtgtgagccgtgtgctgcagcagcanctgacggcagctatgagagttgtgaaagcgcnagtgaagaggagactaagagacatataatattatatactttntgaaccgctatatctatatacgacatactcagctctggttcggcgctcagcatagcgacgcttctgcgtctaggcgtatacctacctaattgtagcgttcgcgactntgagatgtcggcacactacncgtacctctcatgcatgcgcatcattttgctcgtgtccgtctctgttctgctatgtgcgtcgtctctatgctggtgcactgtgtcatctatatagcagccgatgcttcgctatcagtcgtgtgtacgatgagtaggtcactcacagctacgtcgcgcagccncattgtatgctgcacatcgtgtgatgactcagtgtccactgtgatagctgagatggtgtgagcagcccatagttgtcgacggtagtgatangtctgatcgaggccgcttatgtacgagtctatcctgataatggctatcgagagctcatgacgtcacctatgtcgcgcatctgctcaatatagagtgtcagtgcactctctcatcctagggttgattgtnagncagtgcagcgctgnacagcatcacgagtgagancgcagctatagatcgctncnctgtcgacactcgcgtcancntcgaggtgttgtgtgtagagacgggacngaagacgtgagctatgcagcgtgcttcacgcatacgcgngacgntgtcatgacggtcgcacgtatatcacgntaatgttccgntaatngacgcntcgatccagacggtacatgaggctacactccagctacgtcactgctgtttacgctgcagtgctcncgtaaacggcgcatcgctagagatctgaacgnactgctncagcagtcgantagatgtcatngagtnatgcgctgtatgcngaacangttgcgcgtngncatcgatncacgtnatgtgctntttgaccgatgtcgantngatgngtgctactgcgtgacacgcatgcgaacgtcgatcgttcgcgtatctntcatcagcgtcgagacatgcagacgtntgtgctgtgctctggatagggncgacgctgctgctgacgtgtcggtgttgcgtantgagtatgtgancatcatcgantcgtactacgacgcacngtatcgctgcntgcatgcntcgntcgtgagacgtcg

SEQ ID NO: 2473 - DNA, 1443 bp, Glycine max
  misc_feature (8)..(9): n is a, c, g, or t
  misc_feature (29)..(32): n is a, c, g, or t
  misc_feature (48)..(48): n is a, c, g, or t
  misc_feature (179)..(179): n is a, c, g, or t
  misc_feature (254)..(254): n is a, c, g, or t
  misc_feature (337)..(337): n is a, c, g, or t
  misc_feature (476)..(476): n is a, c, g, or t
  misc_feature (493)..(493): n is a, c, g, or t
  misc_feature (777)..(777): n is a, c, g, or t
  misc_feature (870)..(870): n is a, c, g, or t
  misc_feature (904)..(904): n is a, c, g, or t
  misc_feature (972)..(972): n is a, c, g, or t
  misc_feature (1074)..(1074): n is a, c, g, or t
  misc_feature (1248)..(1248): n is a, c, g, or t
  misc_feature (1332)..(1332): n is a, c, g, or t
  misc_feature (1336)..(1336): n is a, c, g, or t
  misc_feature (1414)..(1414): n is a, c, g, or t
  Peptide Sequence Number=SeqID_6147
  Probeset Number=SeqID_12252
ttgacgcnnaacgacgtgcgtgggagggnnnnacggcatgggggtggntctgtgggggtgacccgcgttgatggggagggggctgtgacacccgactacctgattaaggcttctacggactcgctagggccggtctagatgtcggagggaacctacccgtggtctgcgccgccgcgagncctgacggcggggtattgcgtgggcatgtgctgccacctgtacggcatgccgacttgtctcatcagttcatatgnttcacaagacgattgagctgctgtgatcgcctgcgcgaagacagactgttctattatcttaacaacacatcgtcaggaatccntgaacatagggaatagaatcacacagagcgaacacacaccacactggcgctagggccagagcccaccacacacacaagtctaccagcgccgctctcccgcccgcgtacaccgtctcgccccgccagaacaactacacgnctatctggcgtgggcanaaataagtctaattacgacccacctcctcttccccctcgatatcccacactaagcacacccatcgtctccccatacgacttctatcagtaatgtgatcaagctatccaatcaaccgtctcgcctccagtgcgcctctgcccctcaacttatacataaatactatgtgcagagacgcgacacacaatagctatcacataaccagcacgttaaagcatatacacgccttaagctatacctcactaactctactccatgttgctgctgccatcgactccatcagatncgcatggctctgttctcggagcggcgcgggcagccaccgccggcgtgatacatatacatcacacacacacttacatcatatcgcgtgatcganaccacgacgcgtgagtgtcgccgtgatgaagaanacacaacaatccgcgagtggacagacacgtcgtacataccatgcgacgaaagagcaccggagatacgnagagtcgctatgagtagagatagtgaatcgcacggagagcgataatatacgtcagaattcgtagtcgcctccgactcactcacacttgctttggtgattatnaccccaccaccccgcgcacccgacctcacgcgagtcctatagtcgcatgctttcacccgctcccaccatctcgcgcgtcactatactacatcatcatatatgagtacatacacagcaagcagacagcgactgctagtatctgagcagctgacacagcacgcagcaatctgacanagtgcggcagtgttgatgcaccacgacggcgccgcacgcctcgactcacaccacggtgtgacgtcatcgtcgcgtgtctgcgtngtgnatgtgtatcttgtggatgactggcgtcacaccacctatcgtcgatgtgacgccattacagcaatgcatgagactacanctgtcgcgcacatcgactggactatgccg

SEQ ID NO: 2474 - DNA, 1482 bp, Glycine max
  misc_feature (151)..(151): n is a, c, g, or t
  misc_feature (190)..(190): n is a, c, g, or t
  misc_feature (219)..(219): n is a, c, g, or t
  misc_feature (287)..(287): n is a, c, g, or t
  misc_feature (425)..(425): n is a, c, g, or t
  misc_feature (504)..(504): n is a, c, g, or t
  misc_feature (544)..(544): n is a, c, g, or t
  misc_feature (652)..(652): n is a, c, g, or t
  misc_feature (766)..(766): n is a, c, g, or t
  misc_feature (1068)..(1068): n is a, c, g, or t
  misc_feature (1194)..(1194): n is a, c, g, or t
  misc_feature (1234)..(1235): n is a, c, g, or t
  misc_feature (1333)..(1333): n is a, c, g, or t
  misc_feature (1420)..(1420): n is a, c, g, or t
  Probeset Number=SeqID_12253
cagtattgatctagagctcgtctttgtgatgagagttggtagtgtctcgagcatcaaatagagtgtgacgacatctgcgttcatcacgctcgtgtgcgcgcgtctgtcgtctctactacatcatgagtgcacgtacagagcagtagtagancgtagtgtagtgatacgatacacgacgaactctgtcganacgcgcacacaccaacacggacggactgntgtgatggacagtagtgtatcgcgcgtgtgagatagacatcgcagacagtgtagagatacgacagacnacacacatacatctaatagatatgtatcatccacgcgatgcgcggatgcgagggtgcagccgcgcttcgcacgagtgggttacttatgtatatcataatacttgtcatgagtatgtagatgacactcggtgtggttanagctcgtgcatcttgtgtatgcagcagttacgcgacatagagtatgcactgtacgccgtgataatagagagtagtatgnttatgctctatgactcatgtccgtcgcgtgtgtgtgatcncactctgtgtagagagtacgctctacatacacacacatctggtaagtgcatgctacgatccattctgagtgtgatcagtaactcgagggtatgtggtcgagtagaganccacgagacgcaaatataagattcacagagaggataggtagacgtgttactacaaacacacagtagttgtgtgtcgcggagatgttgtaggtgcggcgtgagtgagctacggancaccgaagaggtgtttcatacaatggctgtagtgtgttgctaacgatagtctatgtggcagtgtcgttgtggagctccaagtggtttgtcgtgtgtgaactgtctaacccaattaaacatcgaagtaacagatattgtgcccgattgtcgatagagcctccggttgcgaatttgatggcatgtcgtggtacgtattagttccttatatctcccacggattgcgatcaatgatcacacgagagcgtccctagacgacaacacgggcagggtagtacatttagcgagaactctactcatgctgnccggatcgtggcgggccggagcggtatcataacaccgtgtggattgcgcatctatggcgagtatacccttatctattttaaacctgtatccggttatagtatagacagaacatctatagtactatncacgtaagatatgcgcatttgtaacatcaacaccatccannacagcacagcaagattgtgacgtgtaatatgtgcacgtgcgcaggatggtcgctcgcgacggacggagggtgctgcttttggttcataagtgtagatntttattagtgctgtgtatcagtggtgtatacgacaaataggtgggtaggtaaccagtgcatgaggaggtggcggccgaggggcgcgncggggcgcgcgcgggccgcgggtgcgtggcgcggcaaaactggaggaatagtaagggaaaaa

SEQ ID NO: 2475 - DNA, 1519 bp, Glycine max
  misc_feature (1)..(1): n is a, c, g, or t
  misc_feature (34)..(34): n is a, c, g, or t
  misc_feature (78)..(78): n is a, c, g, or t
  misc_feature (131)..(131): n is a, c, g, or t
  misc_feature (148)..(148): n is a, c, g, or t
  misc_feature (167)..(167): n is a, c, g, or t
  misc_feature (209)..(209): n is a, c, g, or t
  misc_feature (346)..(346): n is a, c, g, or t
  misc_feature (431)..(431): n is a, c, g, or t
  misc_feature (531)..(531): n is a, c, g, or t
  misc_feature (650)..(650): n is a, c, g, or t
  misc_feature (657)..(657): n is a, c, g, or t
  misc_feature (730)..(730): n is a, c, g, or t
  misc_feature (801)..(801): n is a, c, g, or t
  misc_feature (999)..(999): n is a, c, g, or t
  misc_feature (1020)..(1020): n is a, c, g, or t
  misc_feature (1082)..(1082): n is a, c, g, or t
  misc_feature (1095)..(1095): n is a, c, g, or t
  misc_feature (1121)..(1121): n is a, c, g, or t
  misc_feature (1178)..(1178): n is a, c, g, or t
  misc_feature (1259)..(1259): n is a, c, g, or t
  misc_feature (1265)..(1265): n is a, c, g, or t
  misc_feature (1275)..(1275): n is a, c, g, or t
  misc_feature (1284)..(1284): n is a, c, g, or t
  misc_feature (1387)..(1387): n is a, c, g, or t
  misc_feature (1395)..(1395): n is a, c, g, or t
  misc_feature (1416)..(1416): n is a, c, g, or t
  misc_feature (1421)..(1422): n is a, c, g, or t
  misc_feature (1425)..(1425): n is a, c, g, or t
  misc_feature (1432)..(1432): n is a, c, g, or t
  misc_feature (1488)..(1489): n is a, c, g, or t
  misc_feature (1501)..(1501): n is a, c, g, or t
  misc_feature (1510)..(1515): n is a, c, g, or t
  Peptide Sequence Number=SeqID_6148
  Probeset Number=SeqID_12254
ntgtactagtatagtatatgtcatatatctagtntgtattcgtgatgtcttacatgatacgagatagtgtctgtatgntttgatggctgtctactctctcatcttcgatattgtcgatctcactatcacgnctctattcgactgcgancatgtacatatcagtgctntgctagtgtgataagttcacgtgtcgtacactgaaccgatcntcgtattatgtcatgttctacatatctacgatagtagacgcatcgcgcctacacacgcatactatattcagtagcaaagtgcgcgacatgatgatctgacagatgtaacagagcattgagtgagcgatagggacgancatgtagtaggagatatagatggttggtgtcgtgtgtggagatctcagtatatggtgtcgtcatcgtagattcgtcgatagagantagaagtgtagcagatcgacgagtagcgaggatgatgacgagtatcgtgactcatagagagcgacgtctgacaggaagaggcgagtgtgatcatgctcgnatctatagtgccgacgacgaacgctacgagagagactagtgtgctcgaggtctcactcgcaacgcgaagcgcaccacgatattgtcgttatcatctacacttaaccgcgtgagagcatntacaganttgtttatatatgttcgatctgatttagttgatagagtcaatatataatagtatattgaggtgtatgataatnagattcgattatcataaacactacgtagtcagaattatatgtagttatcagtagtatacgtcagtcagacncccatcatacctatctactcacactcacatccacatattgtcactactatcgtagcatacgtgtcagatgacaatctcacgtccactaagttagtggtatgtatatagcacaagataggagctagaggttctagattgtggtgtgcttacattaagacacatcattactatccaccacgtatatctctctattcatanaaaatgtattgtgtattattntgagtgtgtatatgtgtgttgtagcgtataatatgttatgagagtgagatgtgagtaatatncagtcattagtcnccgacacctcacgttgcagactcagntcagagcggagagcggacccgcgcggagcgcgcacgctcgcacgccggggtgacacnggagagaatgagagtgcgcgcagaaggagtatattctaatatatataatactggccgggcggccccgcctcgccgtacatnttttanatgggatcgnaagcggggngaccatcccaagtatatcttgtttttgcccgcgcgtatattagtacatgtatagtctatgtggttgtagcgcacactcgcgactctgtagtaatatgataganaagcaaanagcgcaggaagtaacacgatncctcnnccnttagtanttggggggagtagtgtttacgatacaccaatacgcaaccaacaacaagcactaaannaaaaaaaaaaanaaaaaaaannnnnncccc

SEQ ID NO: 2476 - DNA, 1178 bp, Glycine max
  Probeset Number=SeqID_12255
atttttgtataaaatccttcataaaataaacctttaaatattcatcaatgaacagtgcactccgtactcgtgttttgaagtctcttacttctggtttcttctcccctttctcaaccactggaggcctcttatctgctcgtctcactgaatctcctcttcgtaacgctattagattcgaaaaccaaaataaaacatggacgtacaaggatcttgatctacactccaatgccttcgcctacggcttactcgaattaggttataaaagaggtgacagaattttattctggattgacaaagcttacacatctgaaattactattgctcaaattggtagcgctaaagtcggagtttcaattgtacctttaacatctcacagtggatcagatttccaaaccgctcttaaagacactgaatgcaaaggtgttatcttctccgctaacacaaagaatgctggccaaaaaagatcagaagtcttgtatgaagcttttccagaacttgaaaattcttacgcaggaaacccaaccaacttcgcaaagtatcctaaattaaagcatttaatacacgttggattccacacacttccaggaactttcaagtacagacaacttttggtatatgccaaccctaacttctcaacatacactcttcctcaagatcttcctgacaacaccccattgtattatggtcaacaagatggaaaatataaggaatattctttgagagatatcactgaagttgccgaaaaattcagaggtgaaaataaggttggacaagaagaaactatcattgttgccggaaatccttattctcctggaacattcgccactggtgcttatcaatctttggcttatggcaactacgttgtgctatatggaaacgaaccattcaagagtcttgtagacaaaataaaggtccaacaacctagttacttagttatagatcaagccttcgaaaaagccgatttgacagcagtgaataatgatcaagacagtttggaatacttgaagagagtattggtatctggcaaagacgcaagctcatatcaaaatctctttggaggaagatccgtttttaactataatctttattggtgatgaactagattatgaataaatatataaatgcaattatttataagcagagattttaaaaggttgatttacccttaaagctactat

SEQ ID NO: 2477 - DNA, 533 bp, Glycine max
  Peptide Sequence Number=SeqID_6149
  Probeset Number=SeqID_12256
ggtgtaaatgctaacggtaccagtgatggaaaggagtcgcgtaagttcatgataactgttactcactctggtggacatgcaggccagagttatgaggtgtccaggtccatggcagcttgtcagggtgagcttctggaagtagatcctgttcagggagtccaagcacaaaaggtagctaccctagcctcagcctttgagtttaactaagcaattgatcctgtcataagcaagattgaacagctaattgctgatcctgatgggggtatagcccaagtaggatcaatgtttgatcttgaccccagtgatgtgcctgcttacatctgctaaaacgggagagggtttgcagcaaatcccttcagcagtcatagagggaaaacctgcccatcctggcagtagtgatcctccttgacgcatgattctgctttaataagactacgatgaatacataggggtaatatgtcaggtcgatgctgtcgacggtgtcacgcgcataggagaataagatctcatgtgcaggttgactttagaggatc

SEQ ID NO: 2478 - DNA, 1556 bp, Glycine max
  misc_feature (1)..(1): n is a, c, g, or t
  misc_feature (57)..(57): n is a, c, g, or t
  misc_feature (75)..(75): n is a, c, g, or t
  misc_feature (123)..(123): n is a, c, g, or t
  misc_feature (171)..(171): n is a, c, g, or t
  misc_feature (199)..(199): n is a, c, g, or t
  misc_feature (234)..(234): n is a, c, g, or t
  misc_feature (324)..(324): n is a, c, g, or t
  misc_feature (617)..(617): n is a, c, g, or t
  misc_feature (916)..(916): n is a, c, g, or t
  misc_feature (949)..(949): n is a, c, g, or t
  misc_feature (962)..(962): n is a, c, g, or t
  misc_feature (1220)..(1220): n is a, c, g, or t
  misc_feature (1243)..(1243): n is a, c, g, or t
  misc_feature (1276)..(1276): n is a, c, g, or t
  misc_feature (1294)..(1294): n is a, c, g, or t
  misc_feature (1528)..(1528): n is a, c, g, or t
  misc_feature (1534)..(1535): n is a, c, g, or t
  Peptide Sequence Number=SeqID_6150
  Probeset Number=SeqID_12257
naatcaggacgcactgatgagatcgagtacgcgatagatacagcagcactcgctgcngtgacgcatatagtagcngtagtgtgttagtaggtcgtgctgatcgcgttcatgtacgatcgggantatactaactaatagcagatcagatgccatagaagtacacatatacgnatgttctagttcatgttacactagtgcngcatgcgtaggtgtgtctgaacacgtagatcgacnagagagtgcgttgagtcgagtagaagtagaggactgtgacgatctagtcggttgacgccacgtagtcttagatcggtcgtcctcaagccngcgtcgtgatcgtctagttcagatgatgctgctcaagtatgcgtagagcagtgatagtgaacactgtgcacagacagcggtatcatatggcatgcatagccacgtgtgtgatcttctatatgatacttgacactatatactgaagtcgcgcgtgtagcacagaaagtgataacgcatacaacgtgatgatggcacagcatatgagtagcagcactagtgtgtgcagtatgatacgtcagagacgatcggtcgagcgaagcgtatagatatagaaaataatagagagactcaantgtcatctcatgtcgctcagtctacatatcaggacgcagcgatcttgtcgatgacatctcgtcagtacactgatcatgtcgatcagctattaatacgacttgcgatgtggtgcactatgagaggcgcgttcgcggcgcgcgggcacacacaccgagcggcatacacaatacagcctcacgtcggtcgctcgatgagcgccgatgcgcacggtcgtggtatgatacacgattaacactgtcctgacgtataatgacgtgcctgtcatgatcatatatgctcgatgcatagcaaaaaacgngcgatctagagtctatgagtgtgatcatgtggncggagagagacanactgacagactgccagatgatatattcgtatctcacacacacactacgtggactcgtaacggcgcgcaagatgtacaggacagtagagcatctctatctcatgacatacagcataccgcgtgcacctgagcagagcgtctgacacattagtcgatttgtgctaatttgtgtgtgctagtagtcgatcggtcgagccgtgtagtgtgagtgctagcgtgacagagtatatagtaatagatcagacttatggcaagtcgngatcgcacagtcgtgtccgtgtngggcgacgtcgaatgatagaggcgtggcagcgncaacgacatgcgtcgtgntggtcgtcaactcattatgtaactacatattatagtgagagatgaaagcatgcgtatgtcgtcacgcgatcgcggcgccctctccaatgaatcgagagtaggagacatcactatattacagtatgtctgtatgagtatcggccacatggagggaggacacgccgcgcaagcccgagatagggacgcgcctggcgccgacgatgtcgtatttatatatcatcgacaccgaacgtnaagcannaagatggggggggttgggcgc

SEQ ID NO: 2479 - DNA, 385 bp, Glycine max
  Probeset Number=SeqID_12258
cttgtgctcccccttgaccatatagatcgcacacaaaacaggggcaggctgcacccccaacgggcatcattcgcagggcaatcgcccttgattctatatttacagagaccacttcgtccagatctgctcactaatcgctggccaactgggtaccaatatatatgcatgagagaaagaggggcttgtcgaaaactatgccatcatctccttgattgatggagttgtaataatggagacatatgtacctggcaggaaaaaggtgagtgtttaccctcgagaagtacagcctgaaaaccccaacagctatagagcaacgaagagagagtacttcacggtgaggcgtgatcgcaggaaagttagacaggacggagcaatacttaagtct

SEQ ID NO: 2480 - DNA, 1792 bp, Glycine max
  Peptide Sequence Number=SeqID_6151
  Probeset Number=SeqID_12259
ccgggctccggcgcgccccccgccaacgcagacatcaatagcagcatcaatattaacttgcccgacccaccaggattagaccgaagctccccggcctcgcccttccgcacaaagcaagggacagccgcgagaagcagcaccagcaccttatgctcctttgcggacagaaccaccacatcccactggcgttgccgaaaatctgtttcatgcgcaagtagtcttaaagaaatcacgtggggaagaagagcataaatttaaagtttggtggtgaagtggaggacatatcaggtcttgagcagtttagagcggcaatatctttaccaggtgtttctgttgtccattttgaaactgcgtcaaacttgcaatgtaaacaaatatcgccattggtcaatacactatgtggtcgttatccatctattaacttcctcaaggtgaacattcagccaagcccaacagttgcaactgctgagaatgttagggttgtaccgaccttcaagatatataaaaatggcagtcaggtgaaggaaatcctatgtcctagtctcgaaatgttggaacagtctgtgaggcattacagcttttagaactcctgactttgtaatgcttctgttgtcttctccacttccgtcttgttgcttcagctcgctgcccaaacctccacagctcttccagtcttatgatcccatcataaagtgatcttttgatacctgtgacattcagaaaccacataataatctttttagcagccaatacccttggaacctggacatagtctagttccttttgaagtttttatttattcattcattcctcattactttttggttccatgttcctccaacctcccttttgtcgattttctttaatccactccttttcagttcaagtagatcagcttttcttgtatccccagtttccttatgggtgaaaaaaagcgagatttttatggctgtacatttgattaaattgtcagtttatatttacctttatgatagataggttcttgtaccccccagtttcttcaaggttaaaagtaaaaaaaaaaaaaattgtttttttcttgtctgtacaattgatttaatgatgagtttaaattaccttttaagatagacaaatatagacagatatagaatgaagggagggggagggtgttgtgctagttagaggggggatctgtacaatgtatatatgtggtgatatatacaagacactggaagcctttgaggggggagagataggatgagtggtggggtagctactgagttggcaaaaggaggatgaaaatgttactattatcattgttttttttttatcctatcttagccatttaatcaataaaaagttcccatttttttttaaaaaaaaaaaaaaaaaaaaaaaaataaaaaacaacaaaaaaaaaaaaaaaaaaaaaaaaatcatcctcacttgtaagactaaaacacatataccagcacttactgctgcttcaccaaacctccagagataaactcccttctcttttgatcccaccataaagtgaccccctcatcaatacctgtgacatagtccaaacttgataataatctctttagccaaaattgccattggaaccctagagatagtctagtagttccttttggagtttttatttactcattcatacaatcattgctctttgtttccatgttcctcccaagctcccttttgtcgattttcttttttcttatccactccttttcagttcactaggtcagctgttcttgtaccccccagtttcttcaaggttaaaagcaaaaaaaaaattcttttt

SEQ ID NO: 2481 - DNA, 1454 bp, Glycine max
  misc_feature (20)..(22): n is a, c, g, or t
  misc_feature (27)..(27): n is a, c, g, or t
  misc_feature (33)..(34): n is a, c, g, or t
  misc_feature (52)..(52): n is a, c, g, or t
  misc_feature (65)..(65): n is a, c, g, or t
  misc_feature (69)..(69): n is a, c, g, or t
  misc_feature (188)..(188): n is a, c, g, or t
  misc_feature (222)..(222): n is a, c, g, or t
  misc_feature (397)..(397): n is a, c, g, or t
  misc_feature (603)..(603): n is a, c, g, or t
  misc_feature (966)..(966): n is a, c, g, or t
  misc_feature (1032)..(1032): n is a, c, g, or t
  misc_feature (1077)..(1077): n is a, c, g, or t
  misc_feature (1134)..(1134): n is a, c, g, or t
  misc_feature (1309)..(1309): n is a, c, g, or t
  misc_feature (1319)..(1319): n is a, c, g, or t
  misc_feature (1377)..(1377): n is a, c, g, or t
  misc_feature (1381)..(1381): n is a, c, g, or t
  Peptide Sequence Number=SeqID_6152
  Probeset Number=SeqID_12260
gggggggggtgggtggggtnnnttctntttgtnngtgtggcgtggttccttncctctcttcagtngcantcgacataaggtatatggtatacattatatatataaaaaaaaacacatgttaaacacacgcgctattgagaggagaattagaccgcccccactacactgccttacactctcacacctcngtagaggcactgttgcttttatcttcgcccagcnatgttacggagatatgacgccgagctacacatgagtgtttcgcgcaagttattgtactcagcctctcacttttcccatcatgtacctacgcttgcagcggagatgtgaagctatctagaagatagaaacgaacagtatacaatacaccacaccgacgcaacgtgtatacaaaacncgacgacctctctctggtcggccactcgcagtaatacacgcgcataccgctacatgtaggctcgcgcgctaccaatactacccacactataagaatcacgagatactcttcacttatcgacatgagtgtaattagagctaggcgttattgttgtttggttgtattggttgttgaggcgtatactatctcatagtattctccactantatattgccactccccgtgtcttgttcgagagttgccgggcgcgcggcctccgcgagccgactcgcgcggtgcggccgacccgacacgtcggctctcgcgacacggccagccgggaacacgttgtgcgagtagatcagctgctcacatcctgatagttgcacgctcactagtagagagacgaccgcgactaacctacgccagatgtgagaggagaatctagagttatagcgtcacagagagcatggtcgtaggtatatgatgaagcagatcggctgcgtccgcacgcaaacgcatcctccgcatcgctcgcacccgtctataacagtagcgatatcctacctctcacatcagagcacttacanactcccatgttctctcggtcctctcatctcgccggatgcgcgcgactgctagtctattcgtcgcantgtgagactcgctgcatactatatagatcacgcgcggcgacccancacaccatccacctcactcactcgcgcatattcacggcattcgtgtagagagcggantacatgatcttctatgagtttgtataagttgtaatataaatataatgcgagaggacaaatcacactacagctctgagctgatgtttcgatgagcgcgacgaatgtttctgacttcgagacgatgactcgagacttatcacactcatgcgcagtgcgctacgtgagaggtgcagcncaatcagtangtaactgattagtgccacggcatgtcgacgccaggtgagctatgcgacgaacataggnaagngctgagagatcgacgaagcgatactatgccgctgtactatcgatagaatactacgtcccgtccgtacagtcct

SEQ ID NO: 2482 - DNA, 407 bp, Glycine max
  misc_feature (329)..(329): n is a, c, g, or t
  Probeset Number=SeqID_12261
ctcgtagggctcgctacaccttcgtttgttctagccagggccgcgccgactttcgcagcaacctccggcggctctcccccgatggatccggaggtggtcggcgtcggcggcgacggcaggggtggatcgaggcggcgtctttcctgcctcctcgcccgaagatgacaggccgtgcaatgaagttgcttagaatacaatgctgctgccgtccaggcatcatcagcctgtgtaatccaaattagttggtagtacaagtgatacacgacaagtggagaacaaaaattagaaaaagaacaaatccagtttcagtgtttcagtcaaaggagaanaggtcttattgcgaccttgaacgaacagcaaaatcgaaggtgattctcttgcgactgcttggtaagctgtgggctatc

SEQ ID NO: 2483 - DNA, 919 bp, Glycine max
  Peptide Sequence Number=SeqID_6153
  Probeset Number=SeqID_12262
atatttccctttcaccaagttctatcaagtattattttaataatataactaccccccacaaatgggattacgacgcggaggtggaggcatacgaaaaaggggatcccccgtggctgtttttcctgaaagatgaaatattttgattgaattcgtatataaattactggtaaattttctttgttgttaacataaccttttagatatgaaaaatctattataactaggaatataaatataacataaggtggagcgctaatacagaagggaatgagagttcacaattagaggtgggtgctgcaaagtcctaagtggataaaatgaatggaagggcagtgctccaactcaacttgtaatcgcgttcaaaaccttgagaggaggatttcaatcaagaaagtggtaccaccaaagtcaatttgtccaccatcaccaccactttgaaggaagacctcattgacacccccggtttctccaaagttaaagtcccctaggcttcctgccacaaagagaggcaatgacaacaatggacttaactcgagctatgagaagattgtgattcctagaagctccacaaaaactcccactttggagagaaagaagtacaagagcttcaaggaagggtcatgtgtgtttgtttccattgaggcttagttgagttactcgtcttctttgatcactgacttcccatgttacattagctgctgtgaggagggaagaatatggcactgcaactagcacaaaggaaaatgcagattggccattatgggaaaacaaaggtttgaaaagcttgaaagagttgttcctcttgaatccctcaaacactaacacttggtttaaagtaaactggaggaggaaaaaaagatgtagttttattcaaccccagtttcaaatacccatcgtatattgggttaatcaggatgga

SEQ ID NO: 2484 - DNA, 1619 bp, Glycine max
  misc_feature (12)..(12): n is a, c, g, or t
  misc_feature (15)..(15): n is a, c, g, or t
  misc_feature (22)..(22): n is a, c, g, or t
  misc_feature (256)..(256): n is a, c, g, or t
  misc_feature (307)..(307): n is a, c, g, or t
  misc_feature (331)..(331): n is a, c, g, or t
  misc_feature (880)..(880): n is a, c, g, or t
  misc_feature (1511)..(1511): n is a, c, g, or t
  misc_feature (1538)..(1538): n is a, c, g, or t
  Peptide Sequence Number=SeqID_6154
  Probeset Number=SeqID_12263
agatagatttgngcntatattngtatatttatctccgcgatctagtgttgactttatttttttagctgtctccctattctccgcactactttttatctattcacgtagatggagaacgggagcgcggtggtgctcgccgcttttttacttgtccggctgtcgcgctgtccgccctgtcccattgaggggaaataattctaacctagtcttgctattaataacatctataactaaatcatagtttctctttacgccntcggcgtattgttctctctgtttgtgcgtgtggcaatgccattcgattctnttataaataaaattcgaatatgangccctcgtcttttctttttcagttctttctttctctctttccttttcttccccccgccccgcgcccacctgctcatctgacacattatatatatatagaaaataaataatatcaatgctcaccccacgtatgtctcccctccccctgacttatgatccctcgtctccctcgcatgctcgttgctactctgtccttagaactgaggtagacccgtcggtggcccgtcgcggacccgcctcacatcacttataattgcgaatgtcttgtgtcgctgtctgtattgctctatatctattcgcacgattctaccatacgctccagtaccgtatcttccgtcatcatctactatatataatactcaacacctattggtcgtctacctgttctcctccgtcatgtgctggcgacctactatacatgtatcattcagtaatctttagtgtctgtatacagtgcctcgcgggtaggtctcgcttcgctattattttctgcgtgcgtgcgacgccgctcacgctgaccgtagatgtcgctactcctactgtctcgtgncctttctctctacacgactatctgcatcactttcatatatagactataaagaagacatgcgccatcctcacatctcttatcgttcatctttctcgcagtgtcgcataccgatgtacaatctatctaggactgtatgttgtcatagctacactgaacaaatcaactcagtgctacatgtataattatatcgtcgatacattagtgtgatctgcagtaacatgtcactcagcgcgcgctctgctatgtctacatctattatatcgtattgtgagagctgctcgttctggacggtgcgagatgtgtctcgcggcggcactgcgctcaatgcacttaggaagtgatatctactgaagtgcgatggaagctcaccgtgcgcggaaggatgtggagtgcgtgatgcttcgtgagatgactgatggatagcagcatggccgcgcgagcactacgattctctgtacacatccgacgtcgcctaccgcatatcatacctcgccgcgctcactgctccgctacctgcatatctgctctcttgcctgctctatatacagcaacccgcgcacgccactcgcactctcatcgcgactatgctcccaagcacctcgctatctagcttcactatcctagaataccncacgtctcagcgcctctctctcgcttnctcctgtacttccgtcgtgagtcgcgtgcgcggctcgactctacctagttagcgctcaacaactgtcgtcgcgagctgtcg

SEQ ID NO: 2485 - DNA, 598 bp, Glycine max
  misc_feature (537)..(537): n is a, c, g, or t
  misc_feature (590)..(590): n is a, c, g, or t
  misc_feature (596)..(596): n is a, c, g, or t
  Peptide Sequence Number=SeqID_6155
  Probeset Number=SeqID_12264
tcagctacgtaggccccccccccttatatataccaaaattgaattttatgcagcaaaaagtgatattgaaagtgaagcctatacttgaagaaagcatcaagaggttgtgttgcaccaattttaaaagtaagttgagggtggcggatttaggatgtgcttcgggaccaaatgcacttatggtcatggtacaagaaaggcgagatggagtaggtgcatgcgttgtcaatgcaacaccagggagcttttacggaagactctttccgaataattacattcacttctttcaatcttcctatagcctccattggctctcacaaacccctgaagagttgatcaagggagcaaaaccactaaacaagggaaacatttatataacaactacaagctctccaatagtctttaaagcatacttagagcaattccaaagagatttcagtttttttctaaaatcacgttcagatgaactaaaagttggtggcattatggtactaactttccaaggcagagaaaaagctcatgaaattactcatcctttantggtgattgggatgctgctcaaagatatgatattagagggtttggttgagganacaaantt

SEQ ID NO: 2486 - DNA, 1439 bp, Glycine max
  misc_feature (11)..(11): n is a, c, g, or t
  misc_feature (29)..(29): n is a, c, g, or t
  misc_feature (35)..(35): n is a, c, g, or t
  misc_feature (41)..(41): n is a, c, g, or t
  misc_feature (43)..(43): n is a, c, g, or t
  misc_feature (62)..(62): n is a, c, g, or t
  misc_feature (64)..(65): n is a, c, g, or t
  misc_feature (88)..(88): n is a, c, g, or t
  misc_feature (124)..(124): n is a, c, g, or t
  misc_feature (211)..(211): n is a, c, g, or t
  misc_feature (292)..(292): n is a, c, g, or t
  misc_feature (310)..(310): n is a, c, g, or t
  misc_feature (480)..(480): n is a, c, g, or t
  misc_feature (720)..(720): n is a, c, g, or t
  misc_feature (757)..(757): n is a, c, g, or t
  misc_feature (1085)..(1085): n is a, c, g, or t
  misc_feature (1200)..(1200): n is a, c, g, or t
  misc_feature (1363)..(1363): n is a, c, g, or t
  misc_feature (1365)..(1365): n is a, c, g, or t
  misc_feature (1369)..(1369): n is a, c, g, or t
  Peptide Sequence Number=SeqID_6156
  Probeset Number=SeqID_12265
tgtgaaatctntacactttcttttacccnagacanaagcgncncccgcccacctctcgctgngnntgtggttttttatatttccgccntcccctagggaaaaagattgggggagaggaggggtntaatattcaaccccaaaactacgagagcgtcgtgaggcgacaaataagtgtgcgtggtgcggtacctcccgggcgcggggggtgcgnctgctgctcttatatgtcgtgcgcctattatataaatgtggcgatctataaacatcggcgcgaaaccccgccccggcccgnctagtatcagggctgccnagctaacctattatctctctctcggacagcatcgaccgtgcaatcgtctgtattttgcacctccgccgtccatttatatatatcttctgctctggtctgttcatcaaaccacggctgtctctacttgtcgtggatttgtgatattgattgcgctgggctgtgcggctcgntacaaggtggcgcgtattaataattaatatggtgcaataccaacacccaactcattacctcgcggcggcgtctcaaacaaaaatatcctctggcgtggcgcagaaaataataactctggtcataatatcaattcgtgctcggcgaatatattctttgtggcgtgttaataaatttatatattaaggtgtgtggcaagaaacataaactgttggtgggaataaataaaaaagcccgctgcncgcgcacacaacacacttcggcgcgtgcacaatcggnacggctgctgggataaactaataaacatatatcaagacgctctgctgcgcgtctcatacttatctaatattgtgtgtggccgtaaaaatatacgaccgactcgccagatacatatcaacatgccggcgcggctgtacattatgtgtgctgtggtgcgcaccacactcaccactctcggctcccacttgtgataaatatatacatcactctcatatgcggtgcctcgcctctcacatatatctcacaacacaactatccatatacctatatctacctatcgcgcttcccacctactatctactatcacatgatctgcacttctctctcntactttcataacacctctttatactcttcctctactttctttctatactgactgtgtgctgcggacacaatactctgcggactcatcggatccgtccacacccacatacatgtanctatatactgatctcatgcgctctctgaaataaaatactctcgtacatacgctcctctctattcatcatctctgctacctatctcctctctgcatacacccacatcacctctcaaacatataccccctccgtctcgcgtccgcgcggcgcttgctctgcggtnanatantatcatgtcgtgtgcgtgtgtgtctacttagtaagattctatatgccacacatgtctcgtcgtcgtcttg

SEQ ID NO: 2487 - DNA, 1815 bp, Glycine max
  misc_feature (1)..(1): n is a, c, g, or t
  misc_feature (4)..(4): n is a, c, g, or t
  misc_feature (24)..(24): n is a, c, g, or t
  misc_feature (33)..(33): n is a, c, g, or t
  misc_feature (67)..(67): n is a, c, g, or t
  misc_feature (96)..(96): n is a, c, g, or t
  misc_feature (114)..(114): n is a, c, g, or t
  misc_feature (117)..(117): n is a, c, g, or t
  misc_feature (149)..(149): n is a, c, g, or t
  misc_feature (157)..(157): n is a, c, g, or t
  misc_feature (163)..(163): n is a, c, g, or t
  misc_feature (171)..(171): n is a, c, g, or t
  misc_feature (179)..(179): n is a, c, g, or t
  misc_feature (182)..(182): n is a, c, g, or t
  misc_feature (192)..(192): n is a, c, g, or t
  misc_feature (237)..(237): n is a, c, g, or t
  misc_feature (247)..(247): n is a, c, g, or t
  misc_feature (255)..(255): n is a, c, g, or t
  misc_feature (260)..(260): n is a, c, g, or t
  misc_feature (313)..(313): n is a, c, g, or t
  misc_feature (315)..(315): n is a, c, g, or t
  misc_feature (463)..(463): n is a, c, g, or t
  misc_feature (466)..(466): n is a, c, g, or t
  misc_feature (505)..(505): n is a, c, g, or t
  misc_feature (537)..(537): n is a, c, g, or t
  misc_feature (539)..(539): n is a, c, g, or t
  misc_feature (542)..(542): n is a, c, g, or t
  misc_feature (608)..(608): n is a, c, g, or t
  misc_feature (653)..(653): n is a, c, g, or t
  misc_feature (703)..(703): n is a, c, g, or t
  misc_feature (707)..(707): n is a, c, g, or t
  misc_feature (722)..(722): n is a, c, g, or t
  misc_feature (745)..(745): n is a, c, g, or t
  misc_feature (795)..(795): n is a, c, g, or t
  misc_feature (801)..(801): n is a, c, g, or t
  misc_feature (885)..(885): n is a, c, g, or t
  misc_feature (892)..(892): n is a, c, g, or t
  misc_feature (911)..(911): n is a, c, g, or t
  misc_feature (955)..(955): n is a, c, g, or t
  misc_feature (978)..(978): n is a, c, g, or t
  misc_feature (1100)..(1100): n is a, c, g, or t
  misc_feature (1163)..(1163): n is a, c, g, or t
  misc_feature (1234)..(1234): n is a, c, g, or t
  misc_feature (1284)..(1284): n is a, c, g, or t
  misc_feature (1286)..(1286): n is a, c, g, or t
  misc_feature (1290)..(1290): n is a, c, g, or t
  misc_feature (1330)..(1330): n is a, c, g, or t
  misc_feature (1332)..(1332): n is a, c, g, or t
  misc_feature (1418)..(1418): n is a, c, g, or t
  misc_feature (1431)..(1431): n is a, c, g, or t
  misc_feature (1437)..(1437): n is a, c, g, or t
  misc_feature (1441)..(1441): n is a, c, g, or t
  misc_feature (1443)..(1443): n is a, c, g, or t
  misc_feature (1448)..(1448): n is a, c, g, or t
  misc_feature (1490)..(1490): n is a, c, g, or t
  misc_feature (1494)..(1494): n is a, c, g, or t
  misc_feature (1496)..(1496): n is a, c, g, or t
  misc_feature (1557)..(1557): n is a, c, g, or t
  misc_feature (1562)..(1562): n is a, c, g, or t
  misc_feature (1577)..(1577): n is a, c, g, or t
  misc_feature (1581)..(1581): n is a, c, g, or t
  misc_feature (1583)..(1583): n is a, c, g, or t
  misc_feature (1630)..(1630): n is a, c, g, or t
  misc_feature (1679)..(1679): n is a, c, g, or t
  misc_feature (1694)..(1694): n is a, c, g, or t
  misc_feature (1748)..(1748): n is a, c, g, or t
  misc_feature (1783)..(1784): n is a, c, g, or t
  misc_feature (1786)..(1786): n is a, c, g, or t
  misc_feature (1806)..(1806): n is a, c, g, or t
  misc_feature (1814)..(1815): n is a, c, g, or t
  Probeset Number=SeqID_12266
ncanttaacgtcgatcatcgcacngtcgcgggnttagacgacggtagtatttagtatagcagtcgantgatgagtactacgcgcgtcggtcgtcgngcacacacgccggacgtnatnacgagcctactgcgcgcagtagtaatctaagnagtacacngcgatncatatcgnagctgatnatncagatatcanttatatcgcagctgtcgcatacacgatagtgagtcgaaagcaagnacatatccgncgatgtancaaancatcatacgtgaacacatcagtcagtgatcgggaccgaattaaatcagtaacntngtatatatagctgtctgagtactatatactacacataagcaatattacacgtcgacatagtacgtcggagaagtgtggagtgtagggtcgctctacatacctttcctcaacggcgtgatgagatcacgtagacaaatacctctgagtntangaggacgaactacagcgcctgcgacgtgcgattgcatancatgtggctagcatcatcataacttacaccanantcnactctatcagagacgacgcatctcaacactgttcacgacgtacgctgcgactatacgagacagtgngctcagtgactagtgagtgacgtagacagactaacacatatgacnctgctattgacgtatatatcagtcccaggtgaagaatagcacagaggacnagantgtacgtaacgcacncagcgcatgtaggcagatatacnatatttagcattcatctcacatcagctatagtaagaatgagagtagatanaagtangtacgagacggaggggcgcgaagcccgcgggatcatgacactagcgtgagacatagtctcgaggatacatgtagatcgctcagncgatctnctatatcactataattaanctctgacacgttcacatctatgtgtcgaggactcatgtagggtntgagactagatctgcgtagtgcngtcgctgcgcacctcctctcgtagcagcgatatatatgagagagtaggagacgcccgacagcgcagggatgtcagactgtgatatcgatgcgcgcgctaagtcgggcgtggtgagatgtaangaggtgtacacgcggttgcacagtagcgtgagtactgtagtgatgtatatcgtcgtcagctgnggatgctgtctgcccagactatcacatacatataaactcggcgagtacgacgtagtacaagatatgagtanagtacgcaggcactattgtcttacgtactatgctagccatctgatcgacnantacntgtaatacatagctcatagcgatatcagatacatagtgcnangtctgatagtatagatccgctaacgctacagctatgatactgtctcgcaaatactcgccagcgaaacgatgtcatacaaggacgcngcgcagcagcagnaggaanaagngngatgnagagatcgagtgacgagagtagatgtgctcagtgatcgtcangtgnantatgcgaagagtaagaagcaccataataacgatcagacgcacggagactcgacgcagagancatgntgcaggcgtgagaanacangngaatactagtctgttcttatcgcataagcctagcgacaggagtgtgntctagtcattacactatagctaggtcgagagaggagtcgtgtcgcagcncccgcgcgccgcgcnggaggtgagtgtgtcggcctgtcatatcagagaaagtatgaatcggtaagcgtntatagctatgtggtctagtgtatatactgcgaagnnanaatggagaaaagagagaaanagagtggnn

SEQ ID NO: 2488 - DNA, 379 bp, Glycine max
  Peptide Sequence Number=SeqID_6157
  Probeset Number=SeqID_12267
gccaagttcccggaccaagaaggcatcctctcggaccagcagcgcctcatttttgccggaaagcagttggaggacggccgcacccttgtcgatttcaacatccaaaaggagtccaccctccaccttgtcctccgtttccgcggtggggccaaaaagggcaaaaaaaagacctacccccagccccagaagatccaaccccagcccaagaaggtccaggttggcattttccagttttacaaggttgacgattttggaaaagtgcaaaggctccgcaaggagtgccccaacgccgagtgtggtgccgggactttcaaggcccatccctttgaccgccactaattcggcaagtgtggcttgacctatgtttaccaaaaggccg

SEQ ID NO: 2489 - DNA, 1395 bp, Glycine max
  misc_feature (6)..(7): n is a, c, g, or t
  misc_feature (34)..(34): n is a, c, g, or t
  misc_feature (37)..(37): n is a, c, g, or t
  misc_feature (156)..(156): n is a, c, g, or t
  misc_feature (251)..(251): n is a, c, g, or t
  misc_feature (363)..(363): n is a, c, g, or t
  misc_feature (366)..(366): n is a, c, g, or t
  misc_feature (390)..(390): n is a, c, g, or t
  misc_feature (862)..(862): n is a, c, g, or t
  misc_feature (1172)..(1172): n is a, c, g, or t
  misc_feature (1380)..(1380): n is a, c, g, or t
  misc_feature (1395)..(1395): n is a, c, g, or t
  Peptide Sequence Number=SeqID_6158
  Probeset Number=SeqID_12268
tttaannaagggtgtttttgtttctgttttcgtngcnaatatcttcgaccccgcaggagtgatcggcgggagagggggggagtggcgtggaagtgggcgagtgagatgtaagaggtttatatgaaactaagtgtatgattaagtatgtggacagancacacaacaaacaagctctacgatatgttaaaatgtctatatgacttctccgcgacggtgtgtggtagggtaggtagtgtagatgttgccggtcnggatgagtatggctaggatgtatgagtgaaagagacacatggcactagggtttgcatacgcgctcgctatacagggtcgactaatagcgactgcccgcacaaatgaacaccncanatacatacgacacatgtccgagancgatggttgtgtatgatatacatgatgtccgagtgttgtgggtatgatataatacgatgaggatgagcagagtaaatagaagaataaagaagatagtgatatgtacactaatgagattattgttgtcacataatagcatacatataatacatactatatcacactgcgcgttgtatatgatccgtatgctttcggcgaccgcgtgtcccctgctcgtgtcctgcgtgcactttatcgtttgccgctctcgccggcgcgaggctaccgatgctgggagggagggagagtgagagtgtgtgtgcgtgagtggcgggagttacgtgcagtttatattgtgtgttgaggaggtatgttatgaatatgactaggcacgatatagacgtcagatgaggtgaacgccccgtccacatatatatgtcatatagacaagaaagtgaatagattgtctgtccgtcaacacgcgcgtcgttcnctccatagtccgtctactctatgggtgcgtagacatgagtgacattacgacatcatacctgcacggtcgtccacggtctgtgtgactatgtcatgctatttatatgctatgcactccctctttacaccctctctgcaaacgctataatatctcttcgtgaatcttgctctgctgtcacccacacttgtctgtgatctgtcatggacgagtagggagacggtcgcactccatactagcataattgttgaatagtaagtgatgtgtcgtgtgggtggtgagaaggataggccgctctccggctacgcagccngagtcatgctgctcgcgtcacctcagatattatatacatactcgcgctgcggtcgctgagatgactggatatgtaatactgagagtagtgtagtatttcaactaattgatctatgctacgataggaggcgaatagatgatacgcagggcagcgcgtcgctgtgtgctctcatgtcatgacgacgtatacgacattgcaccgcgcggcncactcttgaccagcn

SEQ ID NO: 2490 - DNA, 1983 bp, Glycine max
  misc_feature (9)..(9): n is a, c, g, or t
  misc_feature (35)..(35): n is a, c, g, or t
  misc_feature (38)..(38): n is a, c, g, or t
  misc_feature (56)..(56): n is a, c, g, or t
  misc_feature (68)..(68): n is a, c, g, or t
  misc_feature (78)..(78): n is a, c, g, or t
  misc_feature (80)..(81): n is a, c, g, or t
  misc_feature (87)..(87): n is a, c, g, or t
  misc_feature (89)..(89): n is a, c, g, or t
  misc_feature (115)..(115): n is a, c, g, or t
  misc_feature (136)..(136): n is a, c, g, or t
  misc_feature (152)..(153): n is a, c, g, or t
  misc_feature (159)..(159): n is a, c, g, or t
  misc_feature (174)..(174): n is a, c, g, or t
  misc_feature (195)..(195): n is a, c, g, or t
  misc_feature (199)..(199): n is a, c, g, or t
  misc_feature (235)..(235): n is a, c, g, or t
  misc_feature (247)..(247): n is a, c, g, or t
  misc_feature (257)..(257): n is a, c, g, or t
  misc_feature (262)..(262): n is a, c, g, or t
  misc_feature (304)..(304): n is a, c, g, or t
  misc_feature (334)..(334): n is a, c, g, or t
  misc_feature (357)..(357): n is a, c, g, or t
  misc_feature (360)..(360): n is a, c, g, or t
  misc_feature (369)..(369): n is a, c, g, or t
  misc_feature (406)..(406): n is a, c, g, or t
  misc_feature (417)..(417): n is a, c, g, or t
  misc_feature (431)..(431): n is a, c, g, or t
  misc_feature (460)..(460): n is a, c, g, or t
  misc_feature (511)..(512): n is a, c, g, or t
  misc_feature (538)..(538): n is a, c, g, or t
  misc_feature (566)..(566): n is a, c, g, or t
  misc_feature (619)..(619): n is a, c, g, or t
  misc_feature (660)..(661): n is a, c, g, or t
  misc_feature (664)..(664): n is a, c, g, or t
  misc_feature (711)..(711): n is a, c, g, or t
  misc_feature (713)..(713): n is a, c, g, or t
  misc_feature (725)..(725): n is a, c, g, or t
  misc_feature (755)..(755): n is a, c, g, or t
  misc_feature (762)..(762): n is a, c, g, or t
  misc_feature (767)..(767): n is a, c, g, or t
  misc_feature (873)..(873): n is a, c, g, or t
  misc_feature (1005)..(1005): n is a, c, g, or t
  misc_feature (1039)..(1039): n is a, c, g, or t
  misc_feature (1094)..(1094): n is a, c, g, or t
  misc_feature (1170)..(1170): n is a, c, g, or t
  misc_feature (1628)..(1628): n is a, c, g, or t
  misc_feature (1818)..(1818): n is a, c, g, or t
  misc_feature (1908)..(1909): n is a, c, g, or t
  misc_feature (1924)..(1924): n is a, c, g, or t
  Probeset Number=SeqID_12269
ctaagtagnatattagctctacgacgtgcatatgntcntactactcatgtctgagncctgacgcagcncttgccactnanngtctancnactcagcgctgacgccgcgatcaatngctgcaactgctagagcgcanactctgctgatccacnncactcnttactagacgtaacnaatactcctgcgttatctctncttncaccggcatgagtgatcgtcattctcttaatcacancttgacgctgcnagttgttagntctgncttgctgcgagctgcatgcgggcgcctgtagtctgctataantcatgattattagcgcttcgcgctcgtgcngctatatacctgcgagcgcgcantanttttattanacacgtgctctgtctctatcactcggcatcactacgnctccgctgttnacgctggcggcgcncaattatatgtgtgtctggaactacgctncgtgtacacgagggctagctctctagtcactaatgcggcgcgcacggcgcnnacgactaacgcatacattataatagnggtgtcgctacgtcatacaaggtatacnagaggaatgtattattatatagtagtgatattatctatacatacccagcacancgtgacctatcttcattgatagcgtgctctattcgtatggnncgngcacacatagacaaccacaccagcggttcataagtcgtctatgctgntntgattattgagncatcgttaggcggccgcacggggagatcgncgtccgnttcangcgcgccgcgcacggacacaatcaacattacgacatgcagcatatagtgcgatatgatatcatgtagcgtgtatgacggtcataccgcagctaatcgcgaggtatnattataaatcgcactcaccgagacagcacgcgcatcggcacgataacgcggcggcgcggctatattgtgcgtcgcgtcgtatgcatgtggtatatcaatgcgctgtctcctctatatccataggcggagtanacacatagtgcgcgtcgtatccgttcttgcgtangtatgcggctcgcgccgtccacgatgacgtggcacatgtgctcaacaacatgaanatacggtactcatacgtcgcacaggcgagacgcaaggggaatattagtataatatactctatcaccaacgcgcacncacgatgatatcgtgtatatgcgttgcacgcagctggattgtccgcgagtcttaggtcacacacgatatgctaatattgcgcggcgcgctatatataaatacagaagtggttacattaatgcaacgccgccaatggggtatcgtcaacctatggcggtgtatgtgtggcgatatatgagagacatgcgcgatatcatcctcacacccatatgcaaagacgtggtgacgtatagtatagcgtaaatatatatcaggcgcggtcgcacgcatcgccacccttcgctgttgcgcaatatacttaccgccgcgcatatactattacatgctcgtccacacccggatcagtgacgcgaggatatgggctactatcggcagtcgatgagggttgtattattatgttcgcgtatctagcgtcttgtttcgatgtatatattacaactactattcttattcgcgtnagcgcacaacctcgttattccatcccggctcatcgcgcgcgagcgtcactctattatataagagatatatacgcgcgcgcatctatgttgtatcggctctgcattacgagagatgtagtgatgtattagcaaggaatcagcgtcacaaagtggtggttatattagacgggatgaaatatacacccaccanccctctccttccatcagccgctcagtgtacagaagcgttgtattattgtattgtgagcttccccgcgcgtagagtcaaattatacgccgnnattcattacggaggnatgttgttggtagtgaagatactaacagaggtgcgacagagtccacgcatcccacaccc

SEQ ID NO: 2491 - DNA, 532 bp, Glycine max
  misc_feature (226)..(226): n is a, c, g, or t
  Peptide Sequence Number=SeqID_6159
  Probeset Number=SeqID_12270
tgagaactatggagtgaggaagttggaagctgcttttgcggttctcatcgctgtcatgggtctttcttttgcctggatgtttggtgatgctcaacctaatagagaagagcttttaatgggtattttggttccaagacttggctcaaaaacaattcgtcaggctgtgggtgttgtgggttgtgtcattatgcctcacaatgtattcctgcattctgctttggttcantcaaagaaagttgatcctaaaaagaataagtcaatacaagaagctctcaactactattcaattaagtcatcaactacacttacaatctccttcataatcaatctttttatcaccacagtttttaccaaagattgttataaaaccaagcgaacagataacataaaattaatcaatacaaaacagtatcttaaagagaagtataagaaaaaagtcttccctatgctgtgtatattaaaaattgggttattacacagctagcaatggggcaccatcactaacacatgttcctatgcattccatctaatt

SEQ ID NO: 2492 - DNA, 602 bp, Glycine max
  Peptide Sequence Number=SeqID_6160
  Probeset Number=SeqID_12271
catgatatcgatggatcgctcaacaaaatggagacactcaaaagagctatgtgctgtgctggatgtgaggaggaagttttgccactgaagcgctccaaggctgagggagcatccatgacggctagtcatcttgaggtggattccccgaggtccaaaaggaacctggaagatgaggatcaatctgaacagattttacaacgttccaagtatgacagtcctattgctgccgaatcaccatgcgaatcatctgccctgatagatgccttgagaagcgtaatgcgacgagggaaagacttgcatctgaagaggcgtgatgctacgcttgagaacgcggagcttcggatgtagaaccgtgaggcttgtctgtcgaatcgtgaggctaggatgtaaaagcgcgagcgtctcttgaatcgctatgagaatcatacacatcacagttggagcatgggcacgcggattttgataagaactgtaaggttgatcataattggtagctttataaagctgccctagaggacgccccctctgctatcagagtggtagtcactttctaactttgtctcttcagaatctcaaagatgcaaaagaattacgagttcaac

SEQ ID NO: 2493 - DNA, 1615 bp, Glycine max
  misc_feature (1)..(1): n is a, c, g, or t
  misc_feature (22)..(22): n is a, c, g, or t
  misc_feature (42)..(42): n is a, c, g, or t
  misc_feature (67)..(67): n is a, c, g, or t
  misc_feature (79)..(79): n is a, c, g, or t
  misc_feature (104)..(104): n is a, c, g, or t
  misc_feature (165)..(165): n is a, c, g, or t
  misc_feature (207)..(207): n is a, c, g, or t
  misc_feature (442)..(442): n is a, c, g, or t
  misc_feature (447)..(447): n is a, c, g, or t
  misc_feature (498)..(498): n is a, c, g, or t
  misc_feature (543)..(543): n is a, c, g, or t
  misc_feature (559)..(559): n is a, c, g, or t
  misc_feature (573)..(573): n is a, c, g, or t
  misc_feature (624)..(624): n is a, c, g, or t
  misc_feature (641)..(641): n is a, c, g, or t
  misc_feature (752)..(752): n is a, c, g, or t
  misc_feature (776)..(778): n is a, c, g, or t
  misc_feature (781)..(781): n is a, c, g, or t
  misc_feature (832)..(832): n is a, c, g, or t
  misc_feature (891)..(892): n is a, c, g, or t
  misc_feature (991)..(991): n is a, c, g, or t
  misc_feature (1012)..(1012): n is a, c, g, or t
  misc_feature (1163)..(1163): n is a, c, g, or t
  misc_feature (1199)..(1199): n is a, c, g, or t
  misc_feature (1203)..(1203): n is a, c, g, or t
  misc_feature (1222)..(1222): n is a, c, g, or t
  misc_feature (1336)..(1336): n is a, c, g, or t
  misc_feature (1481)..(1481): n is a, c, g, or t
  misc_feature (1535)..(1535): n is a, c, g, or t
  misc_feature (1547)..(1547): n is a, c, g, or t
  misc_feature (1555)..(1556): n is a, c, g, or t
  misc_feature (1577)..(1577): n is a, c, g, or t
  misc_feature (1589)..(1589): n is a, c, g, or t
  misc_feature (1591)..(1591): n is a, c, g, or t
  misc_feature (1594)..(1595): n is a, c, g, or t
  misc_feature (1599)..(1600): n is a, c, g, or t
  misc_feature (1603)..(1603): n is a, c, g, or t
  Probeset Number=SeqID_12272
nctcgtggtgtgatagtgtgtnttcacgcgatgatagacacntacgcagcgagtagagcacgagacncacgatgtgctngtctctctactatatgtgtagagangccgcggatgtatcgtgtctatactgcatctcagtttatattgcacctgcataccatacangcacgtgtcacagagtgacgaggagctgtacgtagatcagcngagtgaagatcagcgtgactatcgtgagaatgagtattcgtggagagtagatagtgcactgggagtgcgtagcgagcgtacgtgccgtgtgtgatcgaggtgcagatgtacgtagagatgagagagttatgaagtggcgtgagtgagtgtgagcgagataatgaagctagagagtcgtatagtgtccgctagggacgcggtgacgacagagcggcagaggagagtccgctcagcntgtgnacatgtatgacagatggtctgcgcagtaccgagagtagaggagcgatctgntaggtgctagtagagaacacagccgctggcagagtgaaagtagtnagagaatgagagtagnagagagtgagagtntgatagagtgtctgagcttgacgatagtgagcagagagagcgttcatagancattagtgagatgagtngtttctatccgtcagtatggcgtgggagagtgtggaggtgcgagtgtgggtggtgagactgtcagcagacgaccgctcgcactcacgagtgacagagtgttagagagtttngatcacgtcgcatgttgttgtttnnnttntttgtatatataccttatgtatatgttcgttattattattttatatactcnttcattcatcctgtggtatataatatgtatcttatactatattatatcaactcgcagcnncctcgcgagatgttcctgagctctgtgatgagcatctcgctcagataataggtcacatatatatatatagagagggcagcctacctcatgcagtgtgantgctgtagcgttgcacggtangatagtaggatgaggtggagcaagacgctgacagagcgcgagggagagagcaggagtggagcgaggtacggacggcgcgagagggagctaggcgctgagatgagggaagaagatggtgatgacgggtagtgagagcacagagggaggaatnaagagttgttatacattactatacgtatattgatanaganagagttgctgagccaatangatgaagatgatgagagagagctgtggcaggagaggagcggttatcgatgctgtgtaggcagagaaggagcgtccgcaacctataccactatacactcatgtatcaaagttagngccgtgtggcgacatgagattaagaaatgaaggagactccaccgcctcgcacaagaagacagtagaagtggctaaggaagaaaagagataatatcaataattgtcacgtcctctgctctggccacgcgcgggtgtgttcctctcntattatgttggtatgcagcccgacccgacacagccggaggagcgatgctacctnatcataccaccncacacggnncggagaaaagagagaagaacnagcagagaacananaanngaannacncgtccgtaaacc

SEQ ID NO: 2494 - DNA, 2260 bp, Glycine max
  Peptide Sequence Number=SeqID_6161
  Probeset Number=SeqID_12273
aagtttaaaaaataatttagtctgtatctccaacaactatattcatgattacctctactcctcagtccatcctcaccagaggacgcgatgaagtcgaagatatccctaatgaaggaagcgaaatccgtagggacatgcgtctcggccacgttcatcccgctactggaactcataactccaatctcgctagcccaatgggccaacctcttacaacccaagaccttggcaatcttggccaggctacaactgttatctctgctagtggtgaacgttatcaagctattggcgaacctagagtcatcagcagtgttcccatcagtgatatcggtattcccgtcactcaaagtgtagattatcaacccagaactgctgctcctatcagcaatgtgacgaatgtcacaagaagagaagaagttattgtcgatagacccgttatgactacttcaactaccgctatgcccaccacaactaccgctatgcctactactacttaccaaactggaacttaccagactggaaattatcaagcaggaaccaatcttggtacttctcacgtgattaccaccgaagctcctagaaccactcttttgtcatcaacagtggctcaacctcttcaaacttctgasatcakaaccactcaatatgtgagccaagtacctgttatggaaggagtttccaatgtctctgagatccaagttgtcgaagaacatatgagagacagtatttctatgggaagacaaacagaagatcccactcatcaatctagatgggaacaacaacaagctcaattgtctagcatgagatatgagaatcatcagacctttgaaaactgggaagtcaatagaaacttgttcttctctgatcgtctcaatgttatggatgatcttttggcaggaatggaaagaaagttggattggctcgatgctggtgtgcaaaaagtcattttattctttaaggaaagagaatcacaagaaatcgaatttagcaagagagttaagcatggtctcactcaactcggtgaccactttgaaagagttgagaatggtgaattgatgagcgatttctctagaggaatgaaggaaagtgatgccttccacgctcaagcaacaagaaacagtgagattttgggcttgttcatcaagaaggatatccttgactggatcttgcttcctagcgaaaaggaatacaagcttcaagctcactctttgagagttcctattcaggatgccagaaagagattgagtcatgttggttctcaacgtactagacgttacaataaatacttcaagctctacgattctattcaaagacaccccacaaaggtcactcctaaggataacggtatcttcaagagacaactcaagtactctttgagcgctagagaagagctcagattgctcagactctataacgaacaaggactcttggtcatctctgaattcaccagactcgccatcatgagaatgggagaaatccaaagagctttcagcttataccttcaaaagtacactgaactctttgccaatagtgcccctgctcccactcctatcttggaattgatcgaaaagtctaacggtcctgaagctatccaagccctcttctctcccagaagcttgttgtctattcccaattacgaattcttgagcaagaagttgggtacaactgatattatgtaccctgatcttacttcattcttgatcaacttccctgaatctgttgatcccgctagaagctcctttgttcttagagaatgggaagctgttaaggaaggacatctcctcagaagacccagagcctgtaccattattgctaccactggtaacagtcttttgattgtcgaaaagaagcacaaagaacaagagctcggaaaggttgaaactcccctccaaatgagatacaccaaggttgaaaatattgcagaaggaattgatggaacaacattgaaggttgttgaaagaactccaggaaccttgttcacccatactcacaaggctagactcaagttcgaaacccaagaagacgctcaatcatttgtcaatttcttgagcaatcaaaccagtcaaatgattggagatgtttaatggtttagtacatatatcaattataatatgaaagaagatcttagaatgaagaattttgctgaaggtttatggatatagaaattggagtatatgtatataagaaagtttctttaaactccattcattttccgtattaattatattacaaagtagtaacatatcaatattatttagataac

SEQ ID NO: 2495 - DNA, 315 bp, Glycine max
  Peptide Sequence Number=SeqID_6162
  Probeset Number=SeqID_12274
cgcccgggcaggtacgcgggggggcatttagaaaggatgattcgcatgttcgactggaaccgattattcccttttcaaaagcagttctcaaaagaagccttaaagaattcagatcctaaagacgttgagcagtatgtcaatcaagtcatggaaagtgtattcggctccaattatcctgctcagttcccatttcaggaccccctttctcaaaatcaaaaaacgagagaaactgatgtcgaaaaagaaaaagagccagaagtcaaagtgttcgagacgactgatcatgtgtttgtcaaaattgaacttgctcgtccg

SEQ ID NO: 2496 - DNA, 1361 bp, Glycine max
  misc_feature (332)..(332): n is a, c, g, or t
  misc_feature (966)..(966): n is a, c, g, or t
  misc_feature (976)..(976): n is a, c, g, or t
  misc_feature (1137)..(1139): n is a, c, g, or t
  misc_feature (1176)..(1176): n is a, c, g, or t
  misc_feature (1208)..(1211): n is a, c, g, or t
  misc_feature (1224)..(1225): n is a, c, g, or t
  misc_feature (1238)..(1239): n is a, c, g, or t
  misc_feature (1269)..(1272): n is a, c, g, or t
  misc_feature (1282)..(1288): n is a, c, g, or t
  misc_feature (1290)..(1292): n is a, c, g, or t
  misc_feature (1295)..(1300): n is a, c, g, or t
  misc_feature (1302)..(1305): n is a, c, g, or t
  misc_feature (1311)..(1311): n is a, c, g, or t
  misc_feature (1317)..(1346): n is a, c, g, or t
  misc_feature (1353)..(1357): n is a, c, g, or t
  Peptide Sequence Number=SeqID_6163
  Probeset Number=SeqID_12275
taggtgtaataggagtgatagtgcgttagtcgcgagtacgtgactacctagtgcgctcgcgacgacgggtgaggagtgggcgtagcagacgtcacaagcgcgacagaccgcggagtcacgaggaagcgtgccatccatagtactcattgcgctacgagcaagaggacagagagcagacgtatgaggcggacgaagaagggcgtcggtttttttattagcagtttgtgttgtgcttgttattttggtggcagctagtctacgttgtgtagaagtgactagcaggtgagagtggagtatgttaatactaaataatgtagaactagactgttttnttatcattttccttctttctttcactcgttcggctgtccccacacgtcttgctcgttgtcgctctcggcggtgtgttgaattagattgcgcgattagaataagaggccgtgagatcacgagcgcacagatcgcctcgctctgaccgtatagatattagaaacgttcaagtgcctggaccgatgtttatatttagcccgaccgatagttatacacactttatcattatattagggcagattacgacaacatccagtcgaggatgatggcagagaagcctaccctaagtattgctgattcgttatacttattcatatggcattgaacgcggtgacttaaataacaagaaaaatacttctaccctcttccttactcccatataattcaaatacattttgtacgtctggaatggcccgcttacaagccccaagattaagagcgagtgtacgctacatgataagggcgtggaaataaacaaaagcgaaagactaagaaagaaagaagagaaacataagaaaagagagaacgaggaaaagaaagaaagaaagacagaaataaacgcatatgggattatagaataacacgaagaggggaggtgagaggcaaaggcggagcccgcccggggagaagcgcacnaaaaccgganccccttttatctatttttgtatctcgcgtgttgaaactataatgtgtgattagacaaatctctcggtgggccagaaaagctctatgtggcaccggattgtcacgtaggataatgcgtgagtttagagcgctctgtcgacggcggtatcagaaagtagtagnnnagatagtaacaaacagcaaaggaggagccaggaaaangaagaagagggtggggagagaaaaaaaaaagnnnnaaacccccccacnncttataacacccnnacgccacgtccggtgcgcttggcggacggnnnncgggaccccnnnnnnncnnngcnnnnnngnnnngcggcncccggnnnnnnnnnnnnnnnnnnnnnnnnnnnnnnggggggnnnnncccc

SEQ ID NO: 2497 - DNA, 1763 bp, Glycine max
  misc_feature (20)..(20): n is a, c, g, or t
  misc_feature (22)..(22): n is a, c, g, or t
  misc_feature (37)..(37): n is a, c, g, or t
  misc_feature (52)..(52): n is a, c, g, or t
  misc_feature (54)..(54): n is a, c, g, or t
  misc_feature (65)..(65): n is a, c, g, or t
  misc_feature (67)..(71): n is a, c, g, or t
  misc_feature (73)..(74): n is a, c, g, or t
  misc_feature (94)..(94): n is a, c, g, or t
  misc_feature (100)..(101): n is a, c, g, or t
  misc_feature (103)..(103): n is a, c, g, or t
  misc_feature (140)..(140): n is a, c, g, or t
  misc_feature (162)..(164): n is a, c, g, or t
  misc_feature (166)..(167): n is a, c, g, or t
  misc_feature (173)..(173): n is a, c, g, or t
  misc_feature (186)..(186): n is a, c, g, or t
  misc_feature (189)..(189): n is a, c, g, or t
  misc_feature (196)..(196): n is a, c, g, or t
  misc_feature (205)..(205): n is a, c, g, or t
  misc_feature (230)..(230): n is a, c, g, or t
  misc_feature (245)..(245): n is a, c, g, or t
  misc_feature (247)..(247): n is a, c, g, or t
  misc_feature (250)..(250): n is a, c, g, or t
  misc_feature (252)..(254): n is a, c, g, or t
  misc_feature (259)..(259): n is a, c, g, or t
  misc_feature (276)..(276): n is a, c, g, or t
  misc_feature (280)..(280): n is a, c, g, or t
  misc_feature (308)..(308): n is a, c, g, or t
  misc_feature (311)..(311): n is a, c, g, or t
  misc_feature (315)..(315): n is a, c, g, or t
  misc_feature (328)..(328): n is a, c, g, or t
  misc_feature (331)..(331): n is a, c, g, or t
  misc_feature (374)..(374): n is a, c, g, or t
  misc_feature (393)..(393): n is a, c, g, or t
  misc_feature (398)..(398): n is a, c, g, or t
  misc_feature (439)..(439): n is a, c, g, or t
  misc_feature (443)..(443): n is a, c, g, or t
  misc_feature (475)..(475): n is a, c, g, or t
  misc_feature (497)..(497): n is a, c, g, or t
  misc_feature (517)..(517): n is a, c, g, or t
  misc_feature (551)..(551): n is a, c, g, or t
  misc_feature (608)..(608): n is a, c, g, or t
  misc_feature (664)..(664): n is a, c, g, or t
  misc_feature (722)..(722): n is a, c, g, or t
  misc_feature (735)..(735): n is a, c, g, or t
  misc_feature (741)..(741): n is a, c, g, or t
  misc_feature (760)..(760): n is a, c, g, or t
  misc_feature (769)..(769): n is a, c, g, or t
  misc_feature (774)..(774): n is a, c, g, or t
  misc_feature (785)..(786): n is a, c, g, or t
  misc_feature (814)..(814): n is a, c, g, or t
  misc_feature (857)..(857): n is a, c, g, or t
  misc_feature (866)..(866): n is a, c, g, or t
  misc_feature (890)..(890): n is a, c, g, or t
  misc_feature (906)..(906): n is a, c, g, or t
  misc_feature (949)..(949): n is a, c, g, or t
  misc_feature (1109)..(1109): n is a, c, g, or t
  misc_feature (1197)..(1197): n is a, c, g, or t
  misc_feature (1215)..(1215): n is a, c, g, or t
  misc_feature (1229)..(1229): n is a, c, g, or t
  misc_feature (1278)..(1278): n is a, c, g, or t
  misc_feature (1282)..(1282): n is a, c, g, or t
  misc_feature (1319)..(1319): n is a, c, g, or t
  misc_feature (1528)..(1528): n is a, c, g, or t
  misc_feature (1537)..(1537): n is a, c, g, or t
  misc_feature (1560)..(1560): n is a, c, g, or t
  misc_feature (1587)..(1587): n is a, c, g, or t
  misc_feature (1605)..(1605): n is a, c, g, or t
  misc_feature (1642)..(1642): n is a, c, g, or t
  misc_feature (1700)..(1700): n is a, c, g, or t
  misc_feature (1705)..(1705): n is a, c, g, or t
  misc_feature (1714)..(1714): n is a, c, g, or t
  misc_feature (1721)..(1721): n is a, c, g, or t
  Peptide Sequence Number=SeqID_6164
  Probeset Number=SeqID_12276
tttccgggggtagggagtgngntggatcgcgctgcgngctgtggagcacaanangatcgggaganannnnnannacatacacactaaccgagantatagnntncgtgtacgacgcgacatctgctagagcagacgatagnagacgggcgccgcccgccccgnnnanncacatngccgcagcgcganacnacgaccncacgacacnagcggcactagcgagggtagtatangtcggggggagtganancanannnacatngaagcggaagacttagnctcntatacacacagcaccgcggcggcgcganganaggncgcgcgagacgcnccnacgcgcgagaatatatagctcactcaccgacgtgcgcatcgcntatctagtcgggagagtcngcacntcactctatgtcgtcacgtgggcgaaccgcacgcgacgaancatncgcaggcacagtatgtccgacaagagtatganatcgcagtatgcgatacgaccnagagacagtcagatgatgantcgcggtcatgatacactagagcacgacacacgnacgagtgccgacatcgacagagtacccgattgatcaggtaatagcgagtgtcaatanagtacgaggcagtagcataggcacgagcgacagatgcacgagacggcgcagcgacncgcgcagtagtgcgactgcaactatatagcataggtgtggcgggcgtagaagtgtctnctaataatattcntagcgncacgcctctcatacatgcnctcgtcagncacanacgcatcacannagatcatcgtctcgaggagtgtgtcagntgagcgtggtacacgacgcgcatctgatgtcatccgagcagcncacgcgagngcgcgacggacgacgacgagaganggctcagacactcgcncgacgtcgagatcatacagccgctgcgagccgagggagagagnggagcgtgactagcgagcgaggcagatggcacgataacgcgtagcaagtatttgacgctagagtggtagtcacagcgaccgcagcgcgacgtcagactcgatcggcatgcacagcgcgtgcgcacgacgtgcgacagcggataatgatgacggagggacncatgagtgaagcagtacaagcatcccgaaactgagcacactacagactcagcgcgtgaacaatgtaagtgggtgatgcgcacagcgtnaggcgtagaagagtcgancgacgtgcgctcgngtgcacacatgcacgcacactgacacgcaagaacggcgatcgtcgaacncgantacagacaaatggcaacacacacacatgtactagtgngtattgctcgagacgacacagaccgatagcgcgccgccctcaccgcacgtcatgttgcgtcgcaagcgaccatctcaaacactaacctgctacacacacgcgtcgaccagcactgatgtcggcgacacacgcgcgtggtgcacactgacgcgacgcgaacaagactgagtacactggtagcgaacgcgagtcgacgtgatgcgaatgtnatgtgacantcatgagagaggcactatgacgnctctagcgaagcatcacacacgagcangcactatatgtatattgnagagctacatccgcactcacgcgacacagagataagngtcatacgtgacaccgctcagactgcgactagcatcgtagcgatacctacactgtagnagtantgacgatcncatctcngcatgaatgagaaggataatacggagccaacaaaccttccgg

SEQ ID NO: 2498 - DNA, 488 bp, Glycine max
  misc_feature (121)..(121): n is a, c, g, or t
  misc_feature (130)..(131): n is a, c, g, or t
  misc_feature (486)..(488): n is a, c, g, or t
  Probeset Number=SeqID_12277
actctcgttgtgattgataacgagaaattgagaattgttacagaaacgatcgtgttttttttttattccatcgtaaaccaaaatttagttctccagttgagcgttcttcccacaaaccctnaatggtcgnntttcttgaagaatttcatgccaattttggattcactaccccgttatttctcgggaagaagtatacactggttgcgtggacctagataaggagccttacagggataattaaaagggcaaaaatggaccagcggttgtggaacaagaaaattgaaagatatttaaacccaggggggttagggccctgggaaacttcccccgccctgaaaaactttggggaaaattaaaatttcccctggaaagaaaaccccttttgatgaggccaaaaaggcttattccttccggggggtttggtgggaaaagaaaaaaaaaaaacccctttggggggtgtccccacgggttttttttttatttttnnn

SEQ ID NO: 2499 - DNA, 575 bp, Glycine max
  Peptide Sequence Number=SeqID_6165
  Probeset Number=SeqID_12278
tcagctacgtaggccccccccccaatgagttttattacaaagaactgatggcataaaagtgattgtactatacacaccagtcttagcagctgcggccattgcagatgccgaaggatgacatttatgtccaccctttgtgatatggaccgcacctaagacgtgaatacccaataagccaaaaaggcagccatcaagttcgaataaagctcttgctcttcacttataatgaaaacaaatgaaaactataaacctataaatttattttacaataaatacttatcagttcgtatactattcagattttgactgagtgaagtcaagaagaacaagggccttcatagtaactatgaagatcacgaaaagagctaagatagcctatgaaggtttaccgagataatacataaaactacggagtatttttacttcggaaaagtgcgtgaagatcttgccagagatctaagggcccagcttaaagacccttctcaagctctaaaaagaaaaataaatgaacaatttttcgaatcatacaagcgcgaaaagccacgattgtacgcattccaaaaatcaagaatgtc

SEQ ID NO: 2500 - DNA, 747 bp, Glycine max
  misc_feature (106)..(106): n is a, c, g, or t
  misc_feature (123)..(123): n is a, c, g, or t
  misc_feature (128)..(128): n is a, c, g, or t
  misc_feature (747)..(747): n is a, c, g, or t
  Probeset Number=SeqID_12279
ccacgcgtccgaaaaaaccctttctttctggcttcagtttttgcagtgaaaatggcggtgactttaacatcaaccctctttatggctttgctatttgctgcttcancttttgctgctcttcancctanagtacctgaaggtaatgctcacatctcagaccctttcatttatatgcatagaaatgtgacgaaaagaaaaaaacttgatctgtttcatgagttgagttaatacccactttgcctatgtttacttcaaactcttgttctgcattgtccactcttactctgatttgcctgctgcaatggttctttaggttgctttctcttacaatttttgtgggtaaactttagatctgtccattatgttgagatttagcttctttgagtaaaaagtaaaagcacattaccaaagttaatgagatgttttacctaattcaaatgagaagtgaatatactatctcattttacatatatgggatctgattatgtgcacttaataaaactgattctgaagtagttttttttctttttcttgtgtgttttgtttgtaatttttaactgcgcagcttaccttcaaaatggaaactttgaggagcagccaaaccccaaaaacctccagaaaacaaagctcatggggaaatattctttgsccaaatgggaagtcaatggkctggttgartatgtctctgggggtccccaacctggaggcatgttcttcccagtgactcatggaatccatgctgtgagn

SEQ ID NO: 2501 - DNA, 1470 bp, Glycine max
  misc_feature (22)..(22): n is a, c, g, or t
  misc_feature (27)..(27): n is a, c, g, or t
  misc_feature (33)..(33): n is a, c, g, or t
  misc_feature (38)..(38): n is a, c, g, or t
  misc_feature (41)..(41): n is a, c, g, or t
  misc_feature (63)..(63): n is a, c, g, or t
  misc_feature (77)..(80): n is a, c, g, or t
  misc_feature (82)..(82): n is a, c, g, or t
  misc_feature (84)..(84): n is a, c, g, or t
  misc_feature (86)..(89): n is a, c, g, or t
  misc_feature (129)..(130): n is a, c, g, or t
  misc_feature (144)..(144): n is a, c, g, or t
  misc_feature (158)..(158): n is a, c, g, or t
  misc_feature (206)..(206): n is a, c, g, or t
  misc_feature (230)..(230): n is a, c, g, or t
  misc_feature (274)..(274): n is a, c, g, or t
  misc_feature (401)..(402): n is a, c, g, or t
  misc_feature (501)..(501): n is a, c, g, or t
  misc_feature (708)..(708): n is a, c, g, or t
  misc_feature (805)..(805): n is a, c, g, or t
  misc_feature (922)..(922): n is a, c, g, or t
  misc_feature (1115)..(1115): n is a, c, g, or t
  misc_feature (1174)..(1174): n is a, c, g, or t
  misc_feature (1200)..(1200): n is a, c, g, or t
  misc_feature (1225)..(1225): n is a, c, g, or t
  misc_feature (1278)..(1278): n is a, c, g, or t
  misc_feature (1294)..(1294): n is a, c, g, or t
  misc_feature (1296)..(1296): n is a, c, g, or t
  misc_feature (1315)..(1315): n is a, c, g, or t
  misc_feature (1322)..(1322): n is a, c, g, or t
  misc_feature (1405)..(1405): n is a, c, g, or t
  misc_feature (1418)..(1418): n is a, c, g, or t
  misc_feature (1448)..(1448): n is a, c, g, or t
  misc_feature (1470)..(1470): n is a, c, g, or t
  Peptide Sequence Number=SeqID_6166
  Probeset Number=SeqID_12280
gttttttttgggtgggggtgtntgttncggggnaggcncanggagcgggggcgccgcggcccnccgcgcgccggggnnnngngntnnnngggcgcgcggcacggtagacggacagccgagagcgcaacnncagcgggcaggganagggcgcgcgggangaagagaagcggcggaacagcggacggcgtgccgaagcaggcagacantcggcggggcgggtggcgggcgtngttacgggtgtcacacacgttacgtcgtcatcaccccgcgtcgngcggcgtctcacacataatcgtgtgaggctgtcgcccgctccggcgcacgccataatagaccaagcgaatctcgcgcggtctccccaccactggctcgtcgcacagatcgcgaggggaagcggcggnncggagagtggagagaggaacagaatgagtgggtgagaaacgtgagcgtgagtggatatcacaagaagagagaccaaccggcggcgcgacgaaagactgnctgggaagatagaggatgttggtgtggaatgcgatcgttcgggtgggcctgatgcgcgcgggggggcggccgcacgactgggcgcggtgcccgcaccccgcggtgccctcctgatccgccccgcgcgcatgcggccggcgcggggggattgtggtgtgtgggacactactagcagtgtgggtggagaagatggagggatacataatnatgtgctgttgataaccacacggcgagcactcttgttccaccggtgtagagagatgaggtcgctcaggagagggggtcgaggtgggtgccggcgagncgagtggaggtgtggtgagagtgagtgtgcagcgatgtggcgcagtggtggtgtggatgagggaggagcggaaggaggttgtggccagacgaggggcgggagcagagctcctctctnccagcgctagaagggggtgtggtggaaggtgatgctcaccgagtggaacagagggagcgccgcggctcgtctcgcgtccgagtacagaaagggagtgatgtcgtggcgaagacgctccgctcggtgtgtcgctcgctgcctcgtgtgcatggagagtgtacgccactctcgctcctgactgacacggtaggtngtgggatgcgatggtgtgcggacggccacgttatctcctctcgagtgggaggtgatggntctgctatgttgtgcgtaccgcgcgntgtgttcgttcgtgtagtgttatgntccgacagctacaggcacgggaggtggtagagtgcggcggccgcgagtggcgncggtaggtgaggtggngntgactgatgtgagaggtgncggaggngcgagctctatgagatacgtagtgggagagagcagatgcgtgcgatacatcgcgctgcacacgagacgagccgcagccgcggncaggcgcgcgcgnagtcgtagaggcgcggaagagaggcgcggncgagagcagcggacggcgaggn

SEQ ID NO: 2502 - DNA, 574 bp, Glycine max
  misc_feature (16)..(17): n is a, c, g, or t
  misc_feature (41)..(43): n is a, c, g, or t
  Probeset Number=SeqID_12281
agttaggtcgcatgtnnaagcctgacgtcaaggctattaannngcggattcaagatttgatttctcgtgcctacttgcaaagacccaaagataatcctaatatgttcaagtacttggcttgacatggtatgcataattgtgcaaataaactggttactgcaaaatcaaaccaaaaggatcatgcttaaccttctcaaaaaaaaagagaggagtttttcctaaacaatccttgaagaagcatctgtcagtgcttgtatattttccctccatgtagatgcgtcatcatgtcggaaggtttcaatctaatttccataatcctctggtcatgttcagtgtccaactcttttgtcttcttcttcttcttcgctttctatgtgttcaattttttctcctagtttctgtacgtcgcctcatgtgtttgttcgttcgagctttgcgagggttgatgatgattatttggtgattctgttcctccccgtaatgcaccgtacgtatatgaccttgaacagggtttgccacctcccccccttcttccgaaccaattctctcaaaaaaaaatccctgctagatatag

SEQ ID NO: 2503 - DNA, 511 bp, Glycine max
  misc_feature (172)..(172): n is a, c, g, or t
  Peptide Sequence Number=SeqID_6167
  Probeset Number=SeqID_12282
tggaacacctatgcttagtactagaaacatagaactagtatataggtaagacttgatcgttgaaaaagcagcggaggaaagaaagcgggagactccagttgcggactacagatacacacatttggagacttacgccaagagctcggagtggagaatgaccaagagcctctgnccaagagatggctataaagaatgacagcaagtgatccagtgcaaatagagtcgttcacccagctgaaggatgcagagatgaactctgccaagctggacaagcaggcgagtcttcagcataacacgggggccagacatgccgtcaccactgatgtgcacatgcgacatggccaccacaccagcggaaccgggactggaaccgcctcgtattgcaccagcggtgaatatggtcagcccatgggggcccaccagacgtcggtaatgccaggacatggaaccgtgcagcccacaggccatgtcaccgaaagagtggcaggctcacatcccattggaaccaaca

SEQ ID NO: 2504 - DNA, 524 bp, Glycine max
  Peptide Sequence Number=SeqID_6168
  Probeset Number=SeqID_12283
atattgagttggaaccaacgaattcgggttgccgaggatgcagccggaggaaggggacgcccgaatgcccacggcggtcgccggcacccttgggagtcagggcccggagtaagtgcaacaaaacgcaccaagaccggaggccagagggaagggagtaccagcaaccgggcagcaaaaagcgggttgtacacagagatgctgcgggtacaaacgaccacccgaatggagggaaccgggggaagctagcagatttggggtagtcaaggatgagctcagaagaggacgacccgcaaaagcccacagcggagggaggccccccaggatacaaagggcagagggtagactgcatgcaggggggaagggggatcaaggggattgaggattgcagggagcagggggaattcgacatgcgacgagggccgaaggccctggacagggcagaggcgcgagcagcacccacaaccggccaacggcgacccatgacgcaagtggatagagacaaggaaccacgaaactgaagacag

SEQ ID NO: 2505 - DNA, 545 bp, Glycine max
  misc_feature (518)..(518): n is a, c, g, or t
  Peptide Sequence Number=SeqID_6169
  Probeset Number=SeqID_12284
tcgagtcagctacgtaggcccccccccaagtcttctctgattcttgaatctgatctgattcttggaagcttgatcctgaatctgattctgattctgaattcaactttcctcttgaatcttgaagtgttcttcaactttcctcttgagtcttgaagtgttcttgattctatcttgaacatcttgaacttattctttgattgacctttgaactttttgtcatcacctttgtcatcatttttgttattatcaaaacatctttgaatcaatcttgattcatcatgaagctttgcttctacaaatatgtaaaaatttaattttctccacacacacacatatacatatatatgaggagggatcaagttactctaagagcaactctaaaagagttactcttcatcctcactattcattttcttggaatctaacagttaagattttagagttgctcttagagtaacttaacccccctccccccttctccctctcaagtgtcctatattttggacattaattgtgtngtggtgtctatgtttgtgtcgaagtcg

SEQ ID NO: 2506 - DNA, 3914 bp, Glycine max
  misc_feature (1)..(789): n is a, c, g, or t
  misc_feature (3914)..(3914): n is a, c, g, or t
  Probeset Number=SeqID_12285
nnnnnnnnnnnnnnnnnnnnnnnnnnnnnnnnnnnnnnnnnnnnnnnnnnnnnnnnnnnnnnnnnnnnnnnnnnnnnnnnnnnnnnnnnnnnnnnnnnnnnnnnnnnnnnnnnnnnnnnnnnnnnnnnnnnnnnnnnnnnnnnnnnnnnnnnnnnnnnnnnnnnnnnnnnnnnnnnnnnnnnnnnnnnnnnnnnnnnnnnnnnnnnnnnnnnnnnnnnnnnnnnnnnnnnnnnnnnnnnnnnnnnnnnnnnnnnnnnnnnnnnnnnnnnnnnnnnnnnnnnnnnnnnnnnnnnnnnnnnnnnnnnnnnnnnnnnnnnnnnnnnnnnnnnnnnnnnnnnnnnnnnnnnnnnnnnnnnnnnnnnnnnnnnnnnnnnnnnnnnnnnnnnnnnnnnnnnnnnnnnnnnnnnnnnnnnnnnnnnnnnnnnnnnnnnnnnnnnnnnnnnnnnnnnnnnnnnnnnnnnnnnnnnnnnnnnnnnnnnnnnnnnnnnnnnnnnnnnnnnnnnnnnnnnnnnnnnnnnnnnnnnnnnnnnnnnnnnnnnnnnnnnnnnnnnnnnnnnnnnnnnnnnnnnnnnnnnnnnnnnnnnnnnnnnnnnnnnnnnnnnnnnnnnnnnnnnnnnnnnnnnnnnnnnnnnnnnnnnnnnnnnnnnnnnnnnnnnnnnnnnnnnnnnnnnnnnnnnnnnnnnnnnnnnnnnnnnnnnnnnnnnnnnnnnnnnnnnnnnnnnnnnnnnnnnnnnnnnnnnnnnnnnnnnnnnnnnnnnnnnnnnnnnnnnnnnnnnnnnnnnnnnnnnnaaagccgtatggacaatctgtctgcacaagatatttggaggcgtagccatgggaatagatctcatcagaatgattcctaaacggccccttgtgtagtgtgcagcctatgcttttgcttttgccatctcgagtccaattggtgtggccattggaattatattggatgccacaactcagggtcatgtggcggattggatctttgccatatcaatgggtctggcttgtggagtatttatctatgtatcagtaaaccatctgttggcaaaagggtacatgccccacataccaacaaaggttgactcagcctatttcaagtttcttgccgtgttgttgggtgtgggagtgatagcggttgtgatgatttgggacacctaaggttgttccaagataacttctctttacagcatttgcagaatctttttctttttcttttttttatctttttgataatgaatacgtacattacagaaaaagttgtggtagttcctaggtcagatttggtatttggatattcttgtcagaaatgatttcgtcaatcatttataaggtagaaaagatgacagaaatttgcctcaaatgatagaaaagatgagcatgtattgagaattaagaggacttataaaagtcttgggaagaagggtagttcacatggagggtagcctaaatcattataggcaaaggggaacggagaagaaatatatacaaagctatagaaatgaatttatagatcaatagtttgtctgtagacatgatttataatagaagctatgctgttatttaattcatgtagcctataccaccttgtggggaaaaaggttggttggtggtggtgtgtatactttattgattgaataattattatgagttttgttcgtaatacaaaaaaaaataccacgcgtccgcactgccatttctttctctgagaaccaccatcagttcctccaagtccacgttaacctcaacgagaattccgttgttcctagcgatgaactcgttcgccaaatcagaacccgtgtcatcctcagcctcttcatcatcatcaacgtaccagcaggtgccggagcaagatgctaataacgacttggaccgcgtagcagacaacacgtttcgcaggtacacgtccaacgttaccaaggggagtggcaaaggaacagccattgtctggttcaggaacgatctcagagttttggataacgaggctctctataaggcatggctttcctccgaaaccgtgttacctgtctattgtgttgatcctcgactctttgccactacttatcatttcggctttccgaaaaccggattcattctataaccttcacttcttttcttctcacttctcacattaccatattccaataaaaaaaaatgtcaccttcttttcgcacatccctctccctcttcacactctcccttctcttcttcttctccctctccgtctccgcccacagcggccaccgcgacgacgacgacgacgacgacgcggacgccggaggcgacgccacccccaacctccgtgctcggtccttgattctcgcaaaggtgtggtgtttgatcgttattttttttgctacttttgtatcgggcgtttccccctacattctgaaatggaacgaggggttcttagttctggggacccagtttgctggaggagtgtttctgggaactgcaatgatgcattttctcagcgacgctaatgaaaccttcggggacttaactcgcaaggagtaccccttcgcgttcatgctcgcgtgtgcagggtacttgatgaccctgctcgctgatgctgtcatttcttcggttttgaagaatacggggcgtgaccccccgggagtctggaggcacgtgcgcaagccataaaccctaacacagggcttttccccttctatctctctctgcgtcctcggttatggcttctcgcaggctctcatcatctctgctccgaccattcctccctcgatctccgccggaatttcaagcttcgatcccttcccagccattctctgtcccaaacttttccactggcgtttatccggtcgccattacaaaattattctcacaatttgagtccggtaatggtttagcatcagtgctgagaagctctggactgggcttgtatcagcaggctgggggggttgtaccgccttttgctagcaggtttatgtcaacagaggcaacttctgttgattcttcttctcaagatagttcgacgctggagcctgaagttcctcctcgcattaaatttaagagattagacaaaactgccaggcacattatgcagattttagacaaggaggctgtagaggatgtgagagggcaaagagagatacctgacataaagcctggttatattgtgcaactcaaagtggaagtacctgaaaataagaggcgtgtctctattataaaaggcattgttattgcaaggcgtaatgctggactcaatactacattcagaattaggaggcaggtggctggggttgggattgaatctttattccctctgtattcacctaacataaaggagataaaggtgcttgacaagaagagagtgagaagggccaaactctactatctgagggagagaatgaacccacttaaaaattgacatggatcttcatcttgttggacattttttatgattcatgatttgtcataattagtatctacatgtgtattcttttatttgctgctgttgtgtcgtcaactagatttgttgtttcaatgtagcttattactacctaagaattaagataatgcagttttatttcaatccttagaacctgtcatgttttggaagggtaatacgcatgaaattgtaataagatgcattcgtgttaaaattttcttgtagggttatttatttcaagtagcataaagcatcgagtggggaacaaggttggttggtagttatgtctataggttattgattgaagaataattaagagatttgatcgaaaaacgaagaatgtgcacaaaccgtgtgcattgagagcgcaatttctccttgaatgcttggctgacttgaggaagaatttgatgaaaagaggactaaatttgcttgtacaacatgggaagcctgaggaaatccttccttctcttgcaaaatcttttcaagctcatacagn

SEQ ID NO: 2507 - DNA, 1400 bp, Glycine max
  misc_feature (1)..(1): n is a, c, g, or t
  misc_feature (6)..(29): n is a, c, g, or t
  misc_feature (34)..(34): n is a, c, g, or t
  misc_feature (45)..(45): n is a, c, g, or t
  misc_feature (924)..(924): n is a, c, g, or t
  misc_feature (1070)..(1070): n is a, c, g, or t
  misc_feature (1225)..(1225): n is a, c, g, or t
  misc_feature (1235)..(1235): n is a, c, g, or t
  misc_feature (1288)..(1288): n is a, c, g, or t
  misc_feature (1322)..(1322): n is a, c, g, or t
  misc_feature (1346)..(1347): n is a, c, g, or t
  misc_feature (1400)..(1400): n is a, c, g, or t
  Peptide Sequence Number=SeqID_6170
  Probeset Number=SeqID_12286
naaaannnnnnnnnnnnnnnnnnnnnnnnttggnttggacgtgtncacctatccgccgccccgacaaccgcggtttgtgcttttaaatccccacgcgcatcacgtttgctattctctgtaagtaccccgcacctacaacatcacatgtggcttatattgaacctgaatcttatctgcttacgtctacctagaaacagtactggcacagccactgccttccctcaaacacagcaactcgaacagacaacaaaacacagctgcaactcgcaaacaaacaacttgaaatctatcccacaccaccactcctatcagaattgcccaatgctccctttgcactaccccacccccaaacaacttcctgtcccctctttcagaaagaacggcgacagagtggcgctccacctattgaatcctccacgattacactaaacctgcgaagaatggccgccatggtaggaacattcaattctttcgcaagcaaactttatgggccacagggccccccgctcctgcccgccgttccccgacggctataccccaccactttcaccccaccggaagcgccgctcctgaaaaccccccgtaccctccgcccctccccccctccgccactgcccgccctccaatcccccggagcatgcactccttcacatactacatccatctcacttctccggccacgcaccatcttcgtccccccgataccaaccaccgccttttttcgccacaccgactccatcgcgacacgggcgcgcatacagaaacgacccccgggacccctcgagaaatcccgtaactccttgggtgtctgaggtgcttcatggggcgaaacattgacacgacccttattctcaatggcagacaccccctcccctctcgtcctcaccgaggcagtaccagcccactctgtcctgcacctccccncttctttcccgcctgcccacgtacttaacccacgcgcgcgtctacaccatttgacaaatagtttccaatagtctctccacccaacccaatcccgtccctacgctgcgtcgtctttccacaccatctatctcacacgacgccatccntcacacccatcctacaccaccgccatactttcgcaacgaaaccgcgagacacgcagcaggcaaccaccacgcttttcacacacgcgatgcacgccagaaatgcagcgtcgctcaccgcttctccacaccgaaacacgattctgtgcacggcggcncgctacacancacggcacctactcacccactactcgctcacgctctgtcaccaacgcaccgangtcacttatatcacaatacgcgcgctcgatacgnctcatcgactcaatctggtaatgnnacaatgcatacacacaatataattcgaccagccaccacgcgcagacacacccn

SEQ ID NO: 2508 - DNA, 1568 bp, Glycine max
  misc_feature (1)..(3): n is a, c, g, or t
  misc_feature (17)..(22): n is a, c, g, or t
  misc_feature (25)..(25): n is a, c, g, or t
  misc_feature (30)..(30): n is a, c, g, or t
  misc_feature (34)..(34): n is a, c, g, or t
  misc_feature (304)..(304): n is a, c, g, or t
  misc_feature (620)..(620): n is a, c, g, or t
  misc_feature (1041)..(1041): n is a, c, g, or t
  misc_feature (1171)..(1171): n is a, c, g, or t
  Probeset Number=SeqID_12287
nnnttttctttttcttnnnnnnctncttcncacnttactgtgacggcgagcgcaatcaaccacaaaaaattaggcagcactccacagaagaaagacgagtagaggatatacaaaagaataaacggaaataatcatagagacatagacaatatcagagaatgaaacacggatccggcggcgcacgttggtttagtgattttgatactgtacactctttgaatgtattctgctctgttgtttttgttttcctaccgcacgatggaagtgccgtgtacttagtagcgttcaatagtgctaacgatanagttgtatagccatatttttcagggttaaccacacgaatcttaatgtacatctgacaacaaaagggtgttattcccttcattctctgctcataatgttgaattcaaaggtctggatccgaaagatgagcgcgtcttgagaagcgttggtgtgtagttggtaggctggggacgtctagatgggttcagacaaaccccgcgcccgcgtctctgggctttgtctgcgtcgggggtgtatatttctttctctcttattgtatttgatactacttatgggactccctatccagtgaaacggggactaatcacgagaaagcnatatactgccgtcggagtcggcagcgccatggtggcgcgcgaaagccaccctggcgcgctgctgtcctccaggtttgattcgtatgttgggccggtgtggcgtaacacgattcgagttttcatcctagcgcccgcgcatcggtatgtactggtgttgcgcccaattgttgtcttagatccgcagcatcactatcactcatgttgggtagtcacacttgtcgtgccgagctacacggtgtttgatacttacgctccgtgttgcgctgcaaatttgtctcaggatatggtatctgcgcgtatgagtattatgagtagtgcgcatgcccacaaccgatctccatatccgacgacgcggcgacgtgatatgctcaatgtgtgtagttaggatttacgactagacacattattcgtcctcttctcnactctgctccagcttgtgcgcagcggagagcgacgatagagaagaacagcggactgttagtgtgaaagggacggcgaggatatcatgtacaggccccggattggagactcctacgtcgtgttgactcatntccttgtggaccatccgtccgtacgctatgctcgggagattatacagagctacagcagacggatatcgttccttgagccaagatcactagacagaggcgtcattacgtctatccatcgtcgcgccggcgagcaacattgttagttagattccatcgcgtgcccatgtaatatagttatacatatcactaacaatatcgactcgcctacgtgaacacactactaaagacatataggatatatcacaagtactgttactacgatctgagcccttggatagtcgagtgcgtgacagcggcgcggcgcccacgccgacccatcgcagacagaggccgtgtcgtgaagacgaaacggtggaattacgacgattaagtatctccttttttacaggtatgcagg

SEQ ID NO: 2509 - DNA, 832 bp, Glycine max
  misc_feature (339)..(339): n is a, c, g, or t
  misc_feature (678)..(678): n is a, c, g, or t
  misc_feature (706)..(706): n is a, c, g, or t
  misc_feature (719)..(719): n is a, c, g, or t
  misc_feature (740)..(740): n is a, c, g, or t
  misc_feature (760)..(760): n is a, c, g, or t
  misc_feature (772)..(772): n is a, c, g, or t
  misc_feature (786)..(786): n is a, c, g, or t
  misc_feature (790)..(790): n is a, c, g, or t
  misc_feature (832)..(832): n is a, c, g, or t
  Peptide Sequence Number=SeqID_6178
  Probeset Number=SeqID_12288
acgaggtttcttctatctaatcaagaattttgcaattagcatatgaccaaactggtatgaggaagcttaggagaaagaattcattatatttcatatgaattaaatatagattgtttgatatccttgggagtttgtttccaaacagaatgtgatcaaactgcttatattgatgagattcagatgtgacatggaagaaaagaaagatgaagaagatagcacctttaatgaaggtgaagctgaggttaccgtgactcacgcaaagagactagtgcaaagtggggtgcttccttctgatattggaattattactccgtatgctgcacgggttgttttactcanagatgttgaaaaacaaggaggaccggctgaaggatgttgaaatctcaacagttgatggtttccagggaagggagaaggaagccattattatatcaaatggttcgatcaaattcattttttgtggttggctttctgagtgatcgccggcgaatgaatggggctgtgacacggtccacaagccaatgctgtcttgtctgtgacacagagacagccagtggtgacggatttctaaagcgattgattgagtctttcgaggagcatggcgaatctctgagtgcgtctgagtgccagagtgagtgggccaggttcacaaggctaagatttcttttgttgcactcncctgggatcaacttagttgttttgcttntaggtctgctaangtttctaaaatctttcctgancttttctgattggaaaaaanatctttttattnaacctttttttttncaanaaaaaaattttcgctctctactaatggtattacatagaagan

SEQ ID NO: 2510 - DNA, 838 bp, Glycine max
  Peptide Sequence Number=SeqID_6179
  Probeset Number=SeqID_12289
ggcaactttgaacgaccgagttaaagtcaatgagcagcgacgaagaagcttatcttaaagaggaggagcaaaagatcagagaagcgttaaagcatgccagttttgaaacgctgcttaagctgagagaggaaccagccgaagcaccaggacttcaacagcaacttacatccaatcgtaaaaaacaaaagcaacttcaacagaaaaaggaagagcagctaaaaaagaaagcaaagaaccaaccggtcgaaagaagctctaagattccagtttcgcgtttggaaaaggttgtcgactccaaaaaatctaagggaagagatcctagatttaactccctatcgggctccctcaatcctgagctttttaagaaatcatatgagttccttggggagaagaaaaaaaaagagattgaaattctgagtaaagagatgaagaagaaaaagtatactcctgagcagaagcaaaagcttcaggacgctattgcgcaaaacaagagtgatctcggtcgcgccagagagctcgacttagctaatcagactcgcaaggaaatcaaagcaaagacgaaaggacagtttttcttgaagaagggcgagttcaagaagaaggtcctggagaagaagtttgataatcttgattcgagaaagaaacttgaggccaagctgaatgagaagagagctagagtaacgaagaggatgcatagggatatgcaagtgcttgaagctcgtaaagagaggagagataacctctagaagaggccttgatattttgtgtactagtagcttagtagagtttgttgtgatgtatattattgaaacatttggacaatcgtaaattgattctg

SEQ ID NO: 2511 - DNA, 371 bp, Glycine max
  misc_feature (11)..(12): n is a, c, g, or t
  misc_feature (17)..(17): n is a, c, g, or t
  misc_feature (313)..(313): n is a, c, g, or t
  misc_feature (315)..(315): n is a, c, g, or t
  misc_feature (320)..(321): n is a, c, g, or t
  misc_feature (344)..(344): n is a, c, g, or t
  misc_feature (352)..(352): n is a, c, g, or t
  misc_feature (356)..(356): n is a, c, g, or t
  misc_feature (369)..(370): n is a, c, g, or t
  Peptide Sequence Number=SeqID_6180
  Probeset Number=SeqID_12290
gacccacgcgnnccggnaaggtttgcggacatgagcaaagtggacgagcggaagctgcagcccccaagacttaagagggggatagagttaaccccctagtcctggcaatggaagtgattcaccattttcatttccacctgatccctgagattttatatgtcaagttttctggccttcgcaccttgtctctaggggctactggggacagcattttctttggttgtttgacattagagcagttctaatgtagggtatatcaggggggatgaccgcaataaacaggcaaatagctgatatatttgttttttaaaangncgccnnggaagaaaacacacaagaaaagngaaaaaanagangaaggaaagaacnng

SEQ ID NO: 2512 - DNA, 1620 bp, Glycine max
  misc_feature (1)..(1): n is a, c, g, or t
  misc_feature (12)..(12): n is a, c, g, or t
  misc_feature (20)..(20): n is a, c, g, or t
  misc_feature (119)..(119): n is a, c, g, or t
  misc_feature (132)..(132): n is a, c, g, or t
  misc_feature (184)..(184): n is a, c, g, or t
  misc_feature (243)..(243): n is a, c, g, or t
  misc_feature (256)..(256): n is a, c, g, or t
  misc_feature (263)..(263): n is a, c, g, or t
  misc_feature (457)..(457): n is a, c, g, or t
  misc_feature (473)..(473): n is a, c, g, or t
  misc_feature (575)..(575): n is a, c, g, or t
  misc_feature (616)..(616): n is a, c, g, or t
  misc_feature (707)..(707): n is a, c, g, or t
  misc_feature (941)..(941): n is a, c, g, or t
  misc_feature (1061)..(1061): n is a, c, g, or t
  misc_feature (1073)..(1073): n is a, c, g, or t
  misc_feature (1086)..(1086): n is a, c, g, or t
  misc_feature (1099)..(1099): n is a, c, g, or t
  misc_feature (1180)..(1180): n is a, c, g, or t
  misc_feature (1188)..(1188): n is a, c, g, or t
  misc_feature (1190)..(1190): n is a, c, g, or t
  misc_feature (1221)..(1221): n is a, c, g, or t
  misc_feature (1296)..(1296): n is a, c, g, or t
  misc_feature (1298)..(1298): n is a, c, g, or t
  misc_feature (1315)..(1315): n is a, c, g, or t
  misc_feature (1318)..(1318): n is a, c, g, or t
  misc_feature (1322)..(1322): n is a, c, g, or t
  misc_feature (1379)..(1379): n is a, c, g, or t
  misc_feature (1412)..(1412): n is a, c, g, or t
  misc_feature (1424)..(1424): n is a, c, g, or t
  misc_feature (1426)..(1426): n is a, c, g, or t
  misc_feature (1478)..(1478): n is a, c, g, or t
  misc_feature (1498)..(1498): n is a, c, g, or t
  misc_feature (1512)..(1512): n is a, c, g, or t
  misc_feature (1520)..(1520): n is a, c, g, or t
  misc_feature (1525)..(1525): n is a, c, g, or t
  misc_feature (1527)..(1527): n is a, c, g, or t
  misc_feature (1530)..(1530): n is a, c, g, or t
  misc_feature (1553)..(1553): n is a, c, g, or t
  misc_feature (1557)..(1557): n is a, c, g, or t
  misc_feature (1567)..(1567): n is a, c, g, or t
  misc_feature (1576)..(1576): n is a, c, g, or t
  misc_feature (1581)..(1584): n is a, c, g, or t
  misc_feature (1586)..(1586): n is a, c, g, or t
  misc_feature (1588)..(1590): n is a, c, g, or t
  misc_feature (1597)..(1599): n is a, c, g, or t
  misc_feature (1604)..(1604): n is a, c, g, or t
  misc_feature (1613)..(1614): n is a, c, g, or t
  Probeset Number=SeqID_12291
ngtatagtatcntgtagatnggtaaattctaccttcacgctgtcagttactagatatctagatcattatactaagatacttcctcacagcgatcgcaccgctcccatgacgaccacatnatctgctatatanttatgtgttttttgtgtcgtttgttgtgcacgagtgtgtatgacatatgagncacaagaggtgtatactagtcagacgatcatagagttcttctcatcattgtcatatctnatatgtagtatantatagantcgctcatcaacagtcgcgtcgatagttgcaatgagagatgatgatgtgctaggatgaagatagagcgatctagattgcgttatatatgaatatgatagtatacagtattatgataagtatatatagaagtgctacgaagagcacaacaaatacacgtcgagtgtacacattcgtgtgtgtagttgcatgaatnggtgtgtattcatganatatagaggagtgcgcagaaatgtcatcgcgagtcaatgatcatcatacattagtcacgcatactgacgagagtaggagtgtgatatagtgctatcatttcntacgttatatgtcatcttttagtagtctgtagacacagagncgccgacgcacgagagataagaagaggcatactaattacatatacgtatatgtcgttactacgcgctcgagtcatgtgtaatgtaggtagnacagtcaacgaagaagcacaacacacacacacacacacgcagatgctgctaatatctattaccctatatataactaaattgatattctatatgacataaagtcgtatagtatctgcgatcactcattcgatctcactagctgcactatgcgtgtgtttgagtttgtcttcggtgtcgtccacgtgtcgttctcatatatataattcacgcgatcggtcgcgtgaagctatgcgnggcagagttgtgtgagagtgagtagtagtcgtatataagtacatagagtgagtatagtatagagtcgagcactctctgtagtagttcgtcgtcagattcatatatagtataaatgttctntagaacacactntgatactactatncacaatgattgtnctccaccaccggctatatgctgcgctctgtgtgttgatgtgatgacgtgctgctatagacgccaagtcacacgcgctctcnacttaccncncgccacggcacactgcatctttctagagggntagtgagcgacgcgtatggtgtgatccttatgctgcattagtaccaactgctcctcataattagtcttatacagncntccgtcgagagcagacnggncggngcgagacgatagagcagtagatagtatcaccgcacgatagaacgagagagtagactntgagaatactcaatctctacatcacatatcctnattattatatgntnatatattattcacactacacgtgtacaccaccatgcacgactccttcgcgcncacggatacactgcaagcancactaaaccacgcnccccacgngcgcncnccncgcccgttcttctctctcttctncttnctctacgctnccaccccgncccgnnnncngnnnttggcgnnnccccnccggttttnnttttcc

SEQ ID NO: 2513 - DNA, 373 bp, Glycine max
  misc_feature (259)..(259): n is a, c, g, or t
  misc_feature (268)..(268): n is a, c, g, or t
  misc_feature (296)..(297): n is a, c, g, or t
  Peptide Sequence Number=SeqID_6181
  Probeset Number=SeqID_12292
ggcgaacttcatgctgatgattactgccgagcttgagaacctcacgaatctgcaaccccaagatggctgcgacgaccccaactcctcctacctcttcaagttgaaatgcccgagatgcggagaactgagccagaacgacacctgcgccgccttaaacgacaccgttcctctccccgttgggaagagcaccgctcctctcattcaaccacgccaactctcgtggagggatggcagtgggaccatgatggaacgcaaaggnaaaccactnacccaagaaatcactgaatcccggaagnncgccccaccgacgtaatccgactgcaggggctaggggccccgagatcatgcaaccgcggatggatggaaaggtgaa

SEQ ID NO: 2514 - DNA, 1416 bp, Glycine max
  misc_feature (96)..(96): n is a, c, g, or t
  misc_feature (107)..(107): n is a, c, g, or t
  misc_feature (291)..(291): n is a, c, g, or t
  misc_feature (341)..(341): n is a, c, g, or t
  misc_feature (532)..(532): n is a, c, g, or t
  misc_feature (574)..(574): n is a, c, g, or t
  misc_feature (580)..(580): n is a, c, g, or t
  misc_feature (974)..(974): n is a, c, g, or t
  misc_feature (1019)..(1019): n is a, c, g, or t
  misc_feature (1313)..(1313): n is a, c, g, or t
  misc_feature (1377)..(1377): n is a, c, g, or t
  misc_feature (1379)..(1379): n is a, c, g, or t
  Peptide Sequence Number=SeqID_6182
  Probeset Number=SeqID_12293
ggtgcgccccccactctgtttggatgatgtggcggaggtggttggcgatatgtgggggtgtcgctgtgtctctctcctctctctgtgcgtgtgttntggtgggttangtgtggtgtcgtgcgttgagaatctgaagcggcgctcgcctgccgaggtggtggagggtgagactgggtgaagtatggatctatttactccttcctatccatctcttatgttctgtaatcgactatccaacttgtatttgtatcttatccatatcatattctgttgttggtaaatacccatatntagattgcaatgtcttttttgtgtgtgtgtgcctttgatattctatcttntttccccttgtcctctgtgtactagccgccgccctctactgcccaccgctcgaacaaagatcgccgcgtgtgggcgagcgtcgtgcctcgatcggggcagcggcaggctggggccccgcaccgcccggtgttgttccgacgcaccttgcggcgcgcgcctgatacaaccggatgtctacagatacgccgcnacctcaaagatcgtgtcagttcgagattgacaatataccttnataagntgatggtcgggtgggcggtcgtcggtcctgctcggccgcccccgcgtaagcgtgagggtgttcgcgtggcgctcgttgtctcatagcgcgagcgtgtgtcacgtcaatggacgttgacctcattgcttcatataggtgcgctactccgcgtgcgagccgagcgagatgatggtagtaagtaagatggctcgagatatgtgctcgcgcgcacaccacccacgcgcacgagatggtaatgagggagagagtatcatgagctgcgatgctctcgtcttatacttctcactatatctccggcgctctgtgtccgtcgctgcctctgtactacactctaggctcgcctcgagacagatgccagtgggtgcatgcacgctcatctctctactctcgcatncatattctcaggatggctatgtgctaccattacctattctatcgnacgctactatcgatgctgatcgctaacgctgagtcggctctccgaactcaccctatctcgcgtctctgcctcacgcgctatcctctccacgccacgaaccatcgatgaagcacagcgcacgcacacttactcactcagtagcttctcgcacgcgttactcgctacacactcgcacgcagcttattaagcatagacatagtaatctacttatgaaagagaagacctctactatatctgtggagaacgcataatacaactcacacacactcgcacagctgtcctctatctatgtcngctgcgctatatatataacactacgcgcgcgctgtcctacgacacgtggcacgctgtagtgccncncgcgtcgtctctcatcgacaacacgcacgagatgcgg

SEQ ID NO: 2515 - DNA, 2128 bp, Glycine max
  misc_feature (100)..(100): n is a, c, g, or t
  misc_feature (123)..(123): n is a, c, g, or t
  misc_feature (153)..(153): n is a, c, g, or t
  misc_feature (159)..(159): n is a, c, g, or t
  misc_feature (213)..(213): n is a, c, g, or t
  misc_feature (260)..(260): n is a, c, g, or t
  misc_feature (262)..(262): n is a, c, g, or t
  misc_feature (302)..(302): n is a, c, g, or t
  misc_feature (368)..(368): n is a, c, g, or t
  misc_feature (405)..(405): n is a, c, g, or t
  misc_feature (713)..(713): n is a, c, g, or t
  misc_feature (827)..(827): n is a, c, g, or t
  misc_feature (919)..(919): n is a, c, g, or t
  misc_feature (930)..(930): n is a, c, g, or t
  misc_feature (952)..(952): n is a, c, g, or t
  misc_feature (1005)..(1005): n is a, c, g, or t
  misc_feature (1014)..(1014): n is a, c, g, or t
  misc_feature (1026)..(1026): n is a, c, g, or t
  misc_feature (1074)..(1074): n is a, c, g, or t
  misc_feature (1096)..(1096): n is a, c, g, or t
  misc_feature (1164)..(1164): n is a, c, g, or t
  misc_feature (1199)..(1199): n is a, c, g, or t
  misc_feature (1207)..(1207): n is a, c, g, or t
  misc_feature (1245)..(1245): n is a, c, g, or t
  misc_feature (1269)..(1269): n is a, c, g, or t
  misc_feature (1277)..(1277): n is a, c, g, or t
  misc_feature (1309)..(1309): n is a, c, g, or t
  misc_feature (1323)..(1323): n is a, c, g, or t
  misc_feature (1348)..(1348): n is a, c, g, or t
  misc_feature (1359)..(1359): n is a, c, g, or t
  misc_feature (1362)..(1362): n is a, c, g, or t
  misc_feature (1364)..(1364): n is a, c, g, or t
  misc_feature (1368)..(1368): n is a, c, g, or t
  misc_feature (1386)..(1386): n is a, c, g, or t
  misc_feature (1392)..(1392): n is a, c, g, or t
  misc_feature (1399)..(1399): n is a, c, g, or t
  misc_feature (1407)..(1407): n is a, c, g, or t
  misc_feature (1425)..(1425): n is a, c, g, or t
  misc_feature (1459)..(1459): n is a, c, g, or t
  misc_feature (1476)..(1476): n is a, c, g, or t
  misc_feature (1496)..(1496): n is a, c, g, or t
  misc_feature (1508)..(1509): n is a, c, g, or t
  misc_feature (1577)..(1577): n is a, c, g, or t
  misc_feature (1582)..(1582): n is a, c, g, or t
  misc_feature (1594)..(1594): n is a, c, g, or t
  misc_feature (1608)..(1608): n is a, c, g, or t
  misc_feature (1616)..(1617): n is a, c, g, or t
  misc_feature (1642)..(1642): n is a, c, g, or t
  misc_feature (1645)..(1645): n is a, c, g, or t
  misc_feature (1656)..(1656): n is a, c, g, or t
  misc_feature (1688)..(1688): n is a, c, g, or t
  misc_feature (1704)..(1704): n is a, c, g, or t
  misc_feature (1739)..(1739): n is a, c, g, or t
  misc_feature (1779)..(1779): n is a, c, g, or t
  misc_feature (1813)..(1813): n is a, c, g, or t
  misc_feature (1816)..(1816): n is a, c, g, or t
  misc_feature (1825)..(1825): n is a, c, g, or t
  misc_feature (1838)..(1838): n is a, c, g, or t
  misc_feature (1907)..(1907): n is a, c, g, or t
  misc_feature (1916)..(1916): n is a, c, g, or t
  misc_feature (1968)..(1968): n is a, c, g, or t
  misc_feature (2002)..(2002): n is a, c, g, or t
  misc_feature (2062)..(2062): n is a, c, g, or t
  misc_feature (2071)..(2071): n is a, c, g, or t
  misc_feature (2085)..(2085): n is a, c, g, or t
  misc_feature (2100)..(2100): n is a, c, g, or t
  misc_feature (2116)..(2116): n is a, c, g, or t
  misc_feature (2128)..(2128): n is a, c, g, or t
  Probeset Number=SeqID_12294
cgacttgcgggcgcacgtggtggactcgctgtcggtcgcttgtctattagtcatactgtcgtcatcatatctactatgctacggtgatgatgggcgcgcncgcgcgacccgcgcaaaggaggngcacgagcgctcgcgctgctgtcgcacganggactntcgctcactcacggctcgtcgtatagtactcgcgcgctcacaagacagcacatnattactcgccaccacatcacatacccacatagaccacatacagccancnacagccagaagtgtatagaccactatagtgttttgatagntgatttgcagtatattctatatatatctacctactcctcacacaaatagaaaataaaactaatctngacaatatgaaggataaatattagggatattaaggangatacagaaaatacacagaagaaatacactacaccaacacacgaacagatcatagtgacacagctcagctaacaacgacagccactctgcgcgcctaccaccgctgctgggctcgccctcccgcctcacacctctcttgtgttctgttcttctctatcttcactcctctttctcctctctcctctcattctcctgttcctctccatactacctccttctatactaccagctatcatctactactctttattatactctactctctatcttagtcatatcctgtcatgttgtctctactattccgtatncttacgatccctctcttatcttctctgctcttctgtgttcttatgtgctctcctctcttcgcgttatcacgtctctcctcacttctattctctgccgtctcacgtatctgctanatctatgtcttactctaatacacatactctctctactaccactaatcatcctccttacgacatacgtacattgagcatcacagcactccttncagttataatnactatactatatatatacgtantagcgtatgtgcgacgtgtgactatactatgatgtcacatacatccgtcctangtcttgccnacactcctctcnaaacaccatctgcattgcatgcgtctactcatacttcgacatcttctnctactacctacgtctatctatngcgctctgatagtcacacatataatactactacctctatcacgatcctactcactacacatgtctatnatcgttcctcactcctcatctacgtctcgatcatngtattcangaacgtacatatgcacagatagagatagtatactatanatataatgtacatcaccacgacantacatcanaacgtctcataattcgacctctactatcaganatattacctcatantcatacttactagatctcacacaancactctactantcncnctcncacactcgtctcgtatcnacacancataatnctactacntacgtatcactctcactngacaattcatatatgatacgtctagtatcactcnacgtccacgacacgtcntgacacatcaactgagtcgncaactcagactnntactacaccacattccaccctgctctcatcttattcacactttatctagctgcgctttcatcggcagntccgngatggtcgcgtngcgtcgtccgtgcngacgtganngactgaactagacatgatactatanatncttatcatgtncacgctgctccgatattctgcactaacgaccnacacgatactatactnacatacagtactacggcatgtatgacgagacacancatccctcgctctcgtatcgctcgcctacctagagaatgngattatactgatcgatcgatatatagtcgacganacncgactatcngagctacatatgntacgacgatatgacacatctcgacatatatatctgtctcatatactacgcgtctcgtgcgttatgtcanctcatgtangacgatattgtcagagctgctacagaagctatagtatatacagcacggcgcngcgatcaccgcgcacgatcaatatctatacaaancgtcacatccgactatactatatcatctttacatgaactatactaattacactctatcgnctcctgctnctgggatggaaacnatagtagtataatantaaatgtaaatcatanataagtactatn

SEQ ID NO: 2516 - DNA, 691 bp, Glycine max
  misc_feature (601)..(691): n is a, c, g, or t
  Peptide Sequence Number=SeqID_6183
  Probeset Number=SeqID_12295
gcctttctccatgctcaatattcttctttccctttccggtgttattctcacttgagccgtgtaagaacatggcaatggctgccgataaattgaaacagaaatctgaacaacggtacgttggcgagggaatagaaaagatcgacatgaaagggaaagtggtaatgagcatggaggctggcattggagtgatgggcaccaagttgggtatgatgagctatttcgtatccggcggagaggttgttcctgtcactgtcgtgggggtcaaacgaaggcaacatcgtcgcccagatcaaaactgaggccaccgatggtttcgacgctcgtccaggttggttaccggatggtcagagatcgcaaattgaccgaacccgtcatcggtcatctccagagagtcggcgccattcccatgcgccatcttcaggagttccgtcttcaagccatcgatggactggacctgaaccagcgccttgtttttgatgaaattttcaaggagggtgatcttgttgatgtctctgggaccaccatgtgcaaggagtgccaatgtgaaatgcatgcatcataacttcaaaaggcgttcatggacccatgttgcgagactcannnnnnnnnnnnnnnnnnnnnnnnnnnnnnnnnnnnnnnnnnnnnnnnnnnnnnnnnnnnnnnnnnnnnnnnnnnnnnnnnnnnnnnnnnn

SEQ ID NO: 2517 - DNA, 1408 bp, Glycine max
  misc_feature (13)..(18): n is a, c, g, or t
  misc_feature (28)..(32): n is a, c, g, or t
  misc_feature (35)..(35): n is a, c, g, or t
  misc_feature (41)..(41): n is a, c, g, or t
  misc_feature (51)..(51): n is a, c, g, or t
  misc_feature (54)..(54): n is a, c, g, or t
  misc_feature (63)..(63): n is a, c, g, or t
  misc_feature (73)..(73): n is a, c, g, or t
  misc_feature (304)..(304): n is a, c, g, or t
  misc_feature (455)..(455): n is a, c, g, or t
  misc_feature (1067)..(1068): n is a, c, g, or t
  misc_feature (1182)..(1182): n is a, c, g, or t
  misc_feature (1367)..(1367): n is a, c, g, or t
  Peptide Sequence Number=SeqID_6192
  Probeset Number=SeqID_12296
tggtagttttttnnnnnntttttttttnnnnnaanggatgnaggggaagtnaanaagagaaantacaacgaanagaaaacgattcactctataacgcttaacacaccaacacacgctacagaggatggcggtgctgaggcgcgggcggacgcccgaggaggcgagttagatagtggtagtagcgagtgtgtgatctttttctcctgctcttatgttcgtgtattgatgtataataattatgtgtctggtgtctggatacgtcgttcgacgatcttttgtgctgactcgccgtgttgctgtatanatgttcatgcagtggatcgcgcaaagttgcagcggagagagactgggcgaagatgaggtgtgagaacgcagggcgaccgacaaggcgcgacggggaagtggccggccacgcataacgagaaggggacaaaggagaaacgcaaccacacgtngacacaccatcatacactgtcgtccccccgaatagatacgcaacacaccacaacaaccacacgcacacctctacatatagtacaactgtgacacggaagaggacaggggacagatgagtgtgtgggagtgtggtgtgtgtatgagaacatgctcgcgaacgcaccagccccgtcgctggcgccacccctcatatgtcgttgtcgccgttcaggagttgacaggtgtatgtatagctactgacccgtctatgaatagagaaagcagacaataatgagcacagctacatactataattgccgatatacgataattagtatagacgatccggaataatgagagagggatggtgccggcagagggacacggtgcagcagcgccacgtgcatgcgacgcatatggtctatgatatgttgatgctcgctgtagtgtgagtatctagctatgagatgagttgtggtgtcgtgatgctctctctgatatgttcgaatttcgtcaccaagatcgatcgcgggcatggctgaggacatatagactctcgcagtagtcaccttggtagtgcgggctcagacgatatctatcggacaatacgagacagcgatggctggtgtagnntcagtgtgagcgagatagacgataccagcatgggcgctttgtgcgtgtcactgtatgacacactgatcgccatccttgcctgccgcgcgcgccgcacgacccggcgagacatantctgcgggacacggtacacgatgagaagatccaatagataacgagtgagtacgcacgtgaatagaactgcataacatgtgatatacgagtatggtgacgtgacttctacgatatatcagctgcaataatcgcacggtacgatgcgcagtacaacgtactgacggaatgcatcaaaagtacgcagnagcatatatagcacgagagcgtgcgcgagaagacgtgatag

SEQ ID NO: 2518 - DNA, 249 bp, Glycine max
  misc_feature (43)..(43): n is a, c, g, or t
  Probeset Number=SeqID_12297
atgtccagcatcttctctaatgcacaaacttaagtttttttanaacaatgacgatttggcattagtccaggcaagtttgacatttgtgaacaaggattggaatttgcttacgagatgtcgcggttactaaacactaattcatctttccactttgaggttgaacagcaggtcaatggtgaattcgttaacttcagttttaatggtgtctagagaatttaggtgcctgaggagaatgtgcaggggtaccga

SEQ ID NO: 2519 - DNA, 635 bp, Glycine max
  Peptide Sequence Number=SeqID_6193
  Probeset Number=SeqID_12298
gatcagagaaattttaaagcatactgggaaaaagattaagagcaaatgggttctttaatgtcaggatgggactctccaacaaaggatcccaactcagtgagaaggtgcaagtcactgacaagagaagaaatcgacgctttctggaaaacaaagaagaagaccgaagagaaacatgttcaagccgtttccaacttggtagctcaggaagttgcggaaagtcaggggatagaggatcgttatgaaaaccaaagcaagacgactggatggtggaaaagaagcaactgggcgttcttgaatgagccgagggaggaagagggtcgacccaacaattacgttccgcagttccaagtagctcacatcgccaaaatcgccagtaacagcgctggagtcaccggctaatcacaagtcatctcggtgaattgtgattttagttttcttttgtgatgatttaattactgggaagtcacatgttatgtatgatatggtggttactttaatgtgttggccgtattagtatccgaatgtgagtatagatcatgtaacaatggtgtgggattttaatctttttttatatgtaccattatatttttggttgtgtgggaaggaagtgtgatctcacaatgtgagattcctgc

SEQ ID NO: 2520 - DNA, 342 bp, Glycine max
  Peptide Sequence Number=SeqID_6194
  Probeset Number=SeqID_12299
gctggtaagcgttcgcgttcgctcgtcacgttccccgtcacttccttctcgggttcggccttttaaccatatgggttatggaattttgggtcaagggaatattaagactcagcatgttgagggcctggagattcttttttaaaggcctatgtgggtttcaaagaaaacgattgaggatccatgaaatttgcctcaagagtggtccacatcttggcactgtagcctcataggttcgactcttgtgtgacctagatcaagctgaaccttcctggactgttaaacatgtatgtggtgcaatgaggggagcaggtgcaaagcaaatttctgttctcggtaggtcaa

SEQ ID NO: 2521 - DNA, 415 bp, Glycine max
  Peptide Sequence Number=SeqID_6195
  Probeset Number=SeqID_12300
attcgtgaaaaccgtaagggggaagacgataaccctagaggtagagtcatcggacacaatcgacaatgtgaaggcgaagatccaggacaaggagggcatcccgccggaccagaagtgcctgatcttcgccggtaagcagctggaggacggccggaccctcgccgactaccacatccagaatgttttttttattcaccgcgacctccgcctccgcggaggtgtcaacccccgcaacaagaagacctagaccaagcccaagaagatcaagcacgagcacaagaaaggcaaggtcgccctcctccaggtgtacaaggaacgaggactccggcaaggggccggaggctccgcaaggaatgccccaaagccgaagggcggagccgggaatttcatggccaaccactttgaccgccactat

SEQ ID NO: 2522 - DNA, 1662 bp, Glycine max
  misc_feature (1)..(1): n is a, c, g, or t
  misc_feature (409)..(409): n is a, c, g, or t
  misc_feature (529)..(529): n is a, c, g, or t
  misc_feature (659)..(659): n is a, c, g, or t
  misc_feature (768)..(768): n is a, c, g, or t
  misc_feature (847)..(847): n is a, c, g, or t
  misc_feature (886)..(886): n is a, c, g, or t
  misc_feature (913)..(913): n is a, c, g, or t
  misc_feature (1057)..(1057): n is a, c, g, or t
  misc_feature (1131)..(1131): n is a, c, g, or t
  misc_feature (1138)..(1138): n is a, c, g, or t
  misc_feature (1158)..(1158): n is a, c, g, or t
  misc_feature (1197)..(1197): n is a, c, g, or t
  misc_feature (1293)..(1293): n is a, c, g, or t
  misc_feature (1307)..(1307): n is a, c, g, or t
  misc_feature (1329)..(1329): n is a, c, g, or t
  misc_feature (1357)..(1358): n is a, c, g, or t
  misc_feature (1387)..(1387): n is a, c, g, or t
  misc_feature (1420)..(1420): n is a, c, g, or t
  misc_feature (1436)..(1436): n is a, c, g, or t
  misc_feature (1485)..(1485): n is a, c, g, or t
  misc_feature (1494)..(1494): n is a, c, g, or t
  misc_feature (1517)..(1517): n is a, c, g, or t
  misc_feature (1522)..(1522): n is a, c, g, or t
  misc_feature (1540)..(1540): n is a, c, g, or t
  misc_feature (1552)..(1552): n is a, c, g, or t
  misc_feature (1563)..(1563): n is a, c, g, or t
  misc_feature (1566)..(1567): n is a, c, g, or t
  misc_feature (1577)..(1578): n is a, c, g, or t
  misc_feature (1580)..(1580): n is a, c, g, or t
  misc_feature (1588)..(1588): n is a, c, g, or t
  misc_feature (1596)..(1598): n is a, c, g, or t
  misc_feature (1612)..(1613): n is a, c, g, or t
  misc_feature (1630)..(1630): n is a, c, g, or t
  misc_feature (1632)..(1634): n is a, c, g, or t
  misc_feature (1646)..(1646): n is a, c, g, or t
  misc_feature (1651)..(1651): n is a, c, g, or t
  Peptide Sequence Number=SeqID_6196
  Probeset Number=SeqID_12301
ntggtgcactgatgatatgtagaggtggagtatttgcgggcggcgtagtgttatcaaaacagatatagaatagcgggttttgtatactacgatagggtgaggtggtgaggagaagacacattgagttgcagcggctgtattacagtagacattgttggctgtatgagtcggcagagacgcgataaggcgcggtgggtgagaagcgcgacgaaactagatgggctgatgaatagaagtggcggcgagtacaccacacacatcaagcgggtgcgtcacgctcactgcactgtccgccaccgcagatgccggcgggctgccaccgcaaactacgagcgactaagcaagccgatattatctctcatccaccttactcctctaacacgcggcgatgcacgcgcccacctgtganggggccagctggctgtttgaacacagaagtcgctcgctagtaacatacaaacacaaagtatgtgactctagaatcacttagcgcccgtacacaatattatgatgaaacgcgacaccgcgnttgtgaggcacgtatacacaataagtaagagaggccgacggtggatgttgtataggataggaagagaattgctgctcaccaccgacgctacgctctacagctgcgttgtctcccgcaacgcgtgcgctcngtcttgtgtcgggaggtagtgttggatgcggttgtgtgtcagcgagtgagtacgacccagacgcatcactagatgatcacaaccataacagaataaatagatgttgcancctcgtgtactaagaaggtgtgagtacaaactagatcaaatatagtttctagtcggtgcttgcgtatacgctcggagangcaagagtcagagcactgtagagacgatggagattgtgngtgacgctattatgtagtcggtggatngtgagtcttgtgatgtagcatacacatattcattaagatagacatgagggagtgtgtagatggccgacagccgtggaagtgcgcgtcgagactagaaccggcgggcgcacctcttcgcgcagctgcgtgctcagacccgcgccncagtgtccccactcgtgccacgcgcacaccggcccaccagagagatgtatgtgaaaagaagagaacgggtagangaagaanaattatgtcgtatagcagangcagtgtattacgacgtattagttgacggcgatagtttntattagtgtgatgtggtatgctacgcatcaccatcaaccatacccaccatcaacatacacaacagcacacaccgccgcagcgacatgatggcaggnacgaggcgcgtcgngacgcccagggagcgttgtacngcctttgctatgcatcttgtgagccctnnaatcgcgcagaaccagtcacaagattacnacgttatacatatcacagtaagtgtttacaatncataccacacacacancatgttaacgacactatataggaacaaacataacacacgatgtggtgtnttgtgccgnccctggtgttgtgcagctctgcnttcgngggggcggtggaggggtngtggtgggtgtntggtcgctctnccnntctccctttnntnctctctcncctccctnnngctcgcgcctcgcnngcaataagaccgcgccngnnnaacaaccacagnagagnaaatacccccc

SEQ ID NO: 2523 - DNA, 452 bp, Glycine max
  Probeset Number=SeqID_12302
ctttccagcaaaccagcaaaaaattgttccacattgaagagacacactcggtgcttataagaaacacaaaaagagatcgagatctaaagaagtgtagcttccctacaaagcaaaaacaagtaacccattgtttctgaaccagattcacacataacacttatttggagaaagagtaatgagatgcctatgaatctgcaacaagtcatttgtaccatacttagagagagcttttgacttccacctagggttgttaagaaggaacatatggtggtcaggagcgcacattataaactgaacaaagcattttgtatttataagagaagcaggtgggaatatttgaaagtccataatctcttatctgtgaattggaagagtaatgaattgtttcaagttaaagcaaaagagagcataattcatgactagaatgtggaaagcggaaaaactggaagcat

SEQ ID NO: 2524 - DNA, 1508 bp, Glycine max
  misc_feature (1)..(1): n is a, c, g, or t
  misc_feature (25)..(25): n is a, c, g, or t
  misc_feature (108)..(108): n is a, c, g, or t
  misc_feature (251)..(251): n is a, c, g, or t
  misc_feature (270)..(270): n is a, c, g, or t
  misc_feature (275)..(275): n is a, c, g, or t
  misc_feature (285)..(285): n is a, c, g, or t
  misc_feature (287)..(287): n is a, c, g, or t
  misc_feature (335)..(335): n is a, c, g, or t
  misc_feature (355)..(355): n is a, c, g, or t
  misc_feature (380)..(380): n is a, c, g, or t
  misc_feature (555)..(555): n is a, c, g, or t
  misc_feature (563)..(563): n is a, c, g, or t
  misc_feature (829)..(829): n is a, c, g, or t
  misc_feature (845)..(845): n is a, c, g, or t
  misc_feature (1004)..(1004): n is a, c, g, or t
  misc_feature (1024)..(1024): n is a, c, g, or t
  misc_feature (1115)..(1115): n is a, c, g, or t
  misc_feature (1133)..(1134): n is a, c, g, or t
  misc_feature (1181)..(1181): n is a, c, g, or t
  misc_feature (1311)..(1311): n is a, c, g, or t
  misc_feature (1313)..(1313): n is a, c, g, or t
  misc_feature (1332)..(1332): n is a, c, g, or t
  misc_feature (1337)..(1337): n is a, c, g, or t
  misc_feature (1341)..(1341): n is a, c, g, or t
  misc_feature (1461)..(1461): n is a, c, g, or t
  misc_feature (1480)..(1480): n is a, c, g, or t
  Peptide Sequence Number=SeqID_6197
  Probeset Number=SeqID_12303
ncgataatgtgcgtagtataggagncgtcgatgtgtagtgagtggtcagctctgcgcatatcgtcggtgttatcgatgtttagacggtcgcgtagtcgcggtgggtgnccgagcgttgtgacacgagaatgtcgagagagaaagagaagtgatataaagaggagacggcagaggctacagactatacgatcgacgattgttcttatattgcgcgcgcgcgtcgcagcacgcgcggcataccgcacgctgtntatgaatgctctcaagttntgtgntatatgcgantncgctcattctggtatgtgtagtgcgtagagagagggtatataacggcnagcgatcgtcgcacgcctcncgcacggatgtgtagtgaaagatgngtgtgtatccacgcccagcgtcgctgtaatagaaggatgatagagacacagagcatcaggacacgagacgcagcgcacatcgtgtcaatcgtagtatctgacacgttacgtatctatatcgccgcgactactgcgagggcgcgcgacgccatgcgcctgtgagcgcatagcgcangcgacgcncagatgtaacatcagacacgacactgacgatagtggagagtatgaacgaacgacacacatctgacgctaattcgatataacacacaacgcagaatgcgagcccacagagagacggtagtgacgagaggcttcgagtggttgcgcttctcacatcatatctggcgtgcctagtcgcgcgacgcggacgcagcgtcgagacgagagtatggagagatagaagtatgtatagtgatgatgagagaggagtatatctacaacgtctgagngagagcagcgagttanatatacgagcagcgagagatgcgatctatgttagttagttagttactatgtacgagcataagatatataaagtgcgactaacgatggaataccatcgtgatatcgatcacatatccgtcagtcactactccatacagcgcgaggagactacgtggaggnaagtagcagcgcacgaccgncggtcgacgggccgcgcgcgggcacgaccggtgtgcgcgccaccccgccacacacgactcaatgataaaggcagaacagagtgcagcaccntcggcgcgaattatgttnnctaatgttatccacagcgtggcggtccgcctcagtggtactcagacnatgtatctcgatgcgatgtatgtgatcggctagcgccacagccgcatgttcaagtgcgctcatcggctgcgcagctcacgcgaatgacagcgtcaatagagagcgccggtgtcacacgcactgccactcntnggtaagtatggagaatgcncagtntgantgctctcctaccgcgtcgcgcggggaggcacgcctccttcttatccgtcagcgctcgcccctcctctctcccccgcgcacctcttcgcggcacggcggggggcggcccggcgcgcgtcgnttgtgcgtctcctggcgcnttttgggtgtcctcccgtggtttctctt

SEQ ID NO: 2525 - DNA, 367 bp, Glycine max
  Probeset Number=SeqID_12304
cataaaaggcaaccgctttttcccactaggatcatataacatattggcatcatcttggggcgctgccggaggtggattgaaactaggcctggcaggaatctgtgcctgtgaaattactgttatgctccattactgcattgtcctccgtggtacaccagtcaaattcagcatacctgggatcagccctgaaatcatctacacaggtgctccacttgatatccattgcgcagagaaaccttattgtgctgaatcctccaaatgggtggcgtttgtggacaatgaaatccaaaaggcatgtgtgggtattgggtgtcctgagggtcattcgtgtgcacaagcgctaaggggcacatgtaacattcagaaa

SEQ ID NO: 2526 - DNA, 364 bp, Glycine max
  misc_feature (44)..(44): n is a, c, g, or t
  misc_feature (193)..(193): n is a, c, g, or t
  misc_feature (291)..(291): n is a, c, g, or t
  misc_feature (324)..(324): n is a, c, g, or t
  misc_feature (348)..(348): n is a, c, g, or t
  Peptide Sequence Number=SeqID_6198
  Probeset Number=SeqID_12305
aaaccctagcagtcaaaaactccgcagagtaaaaaaaaaaagangaaggtgatcgctgctttcctcctcgcgaagctcgccggaaacgagaagccgaccaaggatgatctgaagagcatcttcgattccgttggcgctgagttcgacgaggccaagacagatctgttcttttctctcgtgaaggatcacgacntggccgagctgatcgctgttgggagggagaagatgggggctctatcttccggcggtgcaggtgtcgctatggtggctggaggaggaggaggcgacgcnccttcggcggctgagccagcggcggagacgaanaaggttgaggaggagaaggaggantcggatgatggtgaag

SEQ ID NO: 2527 - DNA, 657 bp, Glycine max
  Peptide Sequence Number=SeqID_6199
  Probeset Number=SeqID_12306
aaaagatttttaatcaagcatgaaacttaacatctcctgcccctcaaccggctgccaaaagcctattgctatcgacgatgaaaagaagctttctgccttctacggtagaagaatgggacaagaagtcgacggtgaacaccttggtgatgaattcaagggatacgtcttcaaaattactggtggtaacgataaggatggtttctccatgaagcaaggtgtccttgtccaaggtagagtcagactcctcatgaaggctggccacaagtgctacagacccagaagagctggtgaaagaaagagaaagtccgtcagaggttgcatcgtcggacccgatctttccgtcattgccctcgccatcgtcaagattggtgaacaacccattgctggtctcactgacaccaagcaacccaagagactcggacccaagagagccaccagaatcagaaagcttttcgctttgaccaaggatgatgatgtcagaagattcgtcatcagaagaaagatcgaaaaggaaggcaagcccgtcagatataaggcccccaagatccaaagattggtcactgatgctagactcagaagaaagagagtctacaaggcccacaagaaggctagatgggaaagaaccagagctgccgttactgaataccaaaaggtcct

SEQ ID NO: 2528 - DNA, 541 bp, Glycine max
  Peptide Sequence Number=SeqID_6200
  Probeset Number=SeqID_12307
gaaaaacattaaggcgaggaaaccaaacggcctccctttctcctttgctcatcacatatcaatttaaattataaaggcccaagaaagttttaagtccaaaaaagaagggaaaaaggataaaatctatctaaggatatatcgggtctgtaaaagggggggccctggaacataaccaatgcgaagaatgggatgactataatcaatatcccttgcccagaacaattttaacttcagcattaaattagggcaagtttttatcccctataacaataaataaaaaaacaggccgcactattttgaacagattgttgaatactcgttgaaacattctccaaagcccaatagcccaaaacgatcaaagttgaagtaatggcaataaaacatcagcagttgatgaatatggcacagggatgaacttcacccacccgtatcaaacttcaaaaaaaaaagctttttttaaagaccgatatgaaaaaaattttcatttttattgcctccaatcttcactggcataaacgtggttgatctccgagctcctcct

SEQ ID NO: 2529 - DNA, 659 bp, Glycine max
  misc_feature (199)..(199): n is a, c, g, or t
  misc_feature (289)..(289): n is a, c, g, or t
  Probeset Number=SeqID_12308
gacagcagcgacgacggagtgagggaagcaagcacggaaggaacgctcgcatggcgatgggaacggctgtgcggtaggcggcggcggacggcgtcgtgaccttcctctgggtgctctgcgtatccacgctcggcgcctccacggccgccgtcaccacctacctccgcctgcacgaggggatccagtacgccctcctcgncaccgtctccatcctcgccctcctcctcttcgccttcaacctcctctgcgacgccctcggcggcgccagcttcaaccccaccggggtcgncgccttctacgccgcgggcctcccccagcccctcgctattcctccatcgcgctccgcctaccagcgcaggccgccggagccgcgggcggagctctggccatctccgacctgatgccggagcagtactagcacatgctcgggggaccctcggtcaaggtggaatccccacaccggggcccgcccgctggaggggggctcacctttcgtcatcaccgtttgccgcgcctctgcagtcatcggtcaagggaacccccgcaacccccctcgttcaagaacggcgagggctcctcaggcctcccccgaggaagcctgcgacacttaaacgaggggccggggtaaacaccggaaccccctccagagagacccctgg

SEQ ID NO: 2530 - DNA, 1403 bp, Glycine max
  misc_feature (1)..(1): n is a, c, g, or t
  misc_feature (52)..(52): n is a, c, g, or t
  misc_feature (65)..(65): n is a, c, g, or t
  misc_feature (225)..(225): n is a, c, g, or t
  misc_feature (311)..(311): n is a, c, g, or t
  misc_feature (389)..(389): n is a, c, g, or t
  misc_feature (424)..(424): n is a, c, g, or t
  misc_feature (573)..(573): n is a, c, g, or t
  misc_feature (604)..(604): n is a, c, g, or t
  misc_feature (970)..(970): n is a, c, g, or t
  misc_feature (1033)..(1033): n is a, c, g, or t
  misc_feature (1210)..(1210): n is a, c, g, or t
  misc_feature (1385)..(1386): n is a, c, g, or t
  Peptide Sequence Number=SeqID_6201
  Probeset Number=SeqID_12309
nagtatacatgctggtgtagtagtatgatcatataatgcaatagatgtgatngatgtagtgttcngtgttctattgttctttagtaagatatacttgtatgttctcgttatgatatcagtatcatagatatattattatatataatatgtcaagtcattatatgtagattgtgtatataatgtattcagatatgtttataatctcactatattgacattaattcnagtgctctgattcatatatcatgtgtctgtagagagagatgggtgttgtgcattagtatactgacatgctatatatagtgttatanttcaattgtctgtatggattatgattattctcgtctctgtgcatctgtatgtatgtgggcctgggagtgagaagagantaagtattatatcctgaaaacatgaagattcagantgctgagggcatactatagagcgtgtcctatgattagacaatataatattagtgtgtgagtagtgtatagaagtctagacattataaattgactgtatctatatttcgcacatctactcctatcctttatagtatcattgacacgcgcnctgtatgctatatatatatctgttcatatantggtacatcttttattcttctattggattagtcctattatgtcgctcatatttatcattaattatatatatttaatatcaagtgtgtcttatattatatatcattatattataagatattgaattcgatgtatataatatgtatcatctacattcattttcgtgtgatgttatttatatctttttgatctattctaatatattattttatatattctattatttatttatatgtatatatatttttatattatcaagtctataaaaaatagttgttatcattcatactctacacacacctatatacaagaagtatacataatttttatttctttcttctttatttttatttcagtgttattattgnttattgttttttgaattaggtaattttttatattttattatgaactacatacagtaatctacntattattttttttattcgttttattttatagattaataaatataatatacagtgtatatgaaagtcaccactatatttataatattattaatataataaatacaatatgcttttataacaacaatatagtataattatatataaattaaaccataaaaaatataatatataaatatnataattaaatataatattaaaataataattacatataatatttcttcttccttttttgatgtgtggtgggtattcttaaataaaatacactcttttaatattatatattttatattatcttttttttatgttgttctgtattcttattataaatttaaatgtgatgttattggtnnttgagcagataaattcc

SEQ ID NO: 2531 - DNA, 493 bp, Glycine max
  Probeset Number=SeqID_12310
ggtgaagtactccagagaacccgacaatcccaccaagtcctgcaaggccataggcgctgacctcagagttcattttaagaacactaaggagactgcctttgccatcacgaagttgccccttgttaaagctaaacgatacttagaggatgttttggcccacaaacaggctattcctttccgacacttttgtggtggtgttgggaggacagcccattctaagaacatacactccaatgggcaatgacactggcccgtcaaatcatctaatttcattctatatttgcttaaaaatgcttagagtaatacttagacgaaaggtgtgaatatcaatactcttaacattgctcatatccaaattaatcaagctcataaccatagacaccgcacctacatagctcatagaaaaatcagcccgtacctatcatctgctttccacattgatctgatattctctgacaaacaagagtctgcaacatggaactcagactcactt

SEQ ID NO: 2532 - DNA, 204 bp, Glycine max
  Peptide Sequence Number=SeqID_6202
  Probeset Number=SeqID_12311
aacaatgtagatgaaggcaggtcgattcgatgcggtgcttggcaccacttacttttgctttgcccccgtctacagaaggaaaccagaggtagaaactatagaaagcaaacagttgagcggtctcagctgcatgcagtacatcatgtgttttttacatgccttattcatgaagtgatatgcggaggaacaaaaaaaaaaaaaaaa

SEQ ID NO: 2533 - DNA, 1751 bp, Glycine max
  misc_feature (199)..(199): n is a, c, g, or t
  misc_feature (209)..(209): n is a, c, g, or t
  misc_feature (211)..(211): n is a, c, g, or t
  misc_feature (284)..(284): n is a, c, g, or t
  misc_feature (592)..(592): n is a, c, g, or t
  misc_feature (643)..(643): n is a, c, g, or t
  misc_feature (680)..(680): n is a, c, g, or t
  misc_feature (836)..(836): n is a, c, g, or t
  misc_feature (971)..(971): n is a, c, g, or t
  misc_feature (979)..(979): n is a, c, g, or t
  misc_feature (1217)..(1217): n is a, c, g, or t
  misc_feature (1348)..(1348): n is a, c, g, or t
  misc_feature (1358)..(1358): n is a, c, g, or t
  misc_feature (1369)..(1369): n is a, c, g, or t
  misc_feature (1413)..(1413): n is a, c, g, or t
  misc_feature (1433)..(1433): n is a, c, g, or t
  misc_feature (1468)..(1468): n is a, c, g, or t
  misc_feature (1501)..(1501): n is a, c, g, or t
  misc_feature (1510)..(1510): n is a, c, g, or t
  misc_feature (1542)..(1542): n is a, c, g, or t
  misc_feature (1547)..(1547): n is a, c, g, or t
  misc_feature (1608)..(1608): n is a, c, g, or t
  misc_feature (1659)..(1659): n is a, c, g, or t
  misc_feature (1672)..(1672): n is a, c, g, or t
  misc_feature (1678)..(1678): n is a, c, g, or t
  misc_feature (1726)..(1726): n is a, c, g, or t
  Peptide Sequence Number=SeqID_6203
  Probeset Number=SeqID_12312
taatataatcatatctaacattccggcagtgtgatatagtatagatattcatacacactcacacctacgatcttcatccgacgtcggccggcgcatatgattaccctcccctctgcgcgacggcacagcactgtctcattgtggaacgccgccagtcgcgcgttatatgattaatacgaaagaggggccaccgcgatgnagcccgtatnanacgactactccgcattatcctagcactacctcgacgcctgtgtagaaagaccgagtcaacacttacagtactnacaaaccgcggtgagcgctcgcacaacgattatatagtatactctctaccccgaccgcaccgccgatatttgatggccgccgacttattatcacctcacttccgcggtgacccaccattatattgcgggaacaaatagccgcgtaacttcgcgcgctccgcgcgccgcggcgcgcgtaatacacaccacatagccgcgcggtggcatacaagcggtggatatacatatacggcgcacgattgaatgatatgagtcgcgctgcaaatgtcgaatagataataaatatactaggtagactcaactatatntgcacactgtaagtctatatcacacaacgcaacacttcgctccacccaccngttattcgcaggagtgccgcgggttgtgaggtaagangcgactgagaatgtacgataacgaactcatctatatatcatgactaatacacaccaccatacttatacgcgcgtgtatctcgcgcgcttagtcgggtgcgagtacgtatcgtgcgtggaagggtcgattatcatgatgtatgagtaatattagcgntgcggttaataataaaaaacgcacacgaccacacacacagttatcgaatctctaactgttgtctactcgagacgacatcggcacaagatgtgacggtaaatcaatacccactcctatactactccacatcgatanttcagcantatatggcaggcgcgagtacgagcgcgcgtcgtattgatcatatcgacctatagcatatcctcaataacacatcaccgcgacacacgatcgaatccgatacgtacgatcagtcgtgtacaccgtagatgaaggcgcgtgatatatatcgaaccaccgatatatataatagcacgctctagacacatacatgtatcgtgttcgcctgcggtgcggaatagtgcgtggaagaagtagtgntgtactctacactcacgttctacagcacgtgctcagcagtatttatatccgcactactcgtatagcagttatgttgtgtcttgtgcaaaagctactatgtgcatacagattacaagacgtgcgagcgtgcngcgaaacctntcgtgagcatnattatagacagcaaatagttatatagttcgctcacggtactacncatgtatctgaggcgacgcngcgcgagctatgtcgcatgtgaaaaacgtacaganaacagactgtggcatgagtaatggagatgtatntgagatgcntgtgtgactacgtagacagtgaaccgcatagntcatnatagtgtctgatcaacatagcgtgtcgagcattgatacgtcgcagtatatgaacaacagantgcgtgagcgcgctatgttacgtgagtgatataacacactagagtagaacngagacgatagtgntcgaantgaagtatacaacacgacacacaagtatggaatagaagagctgatacnagcacgaagactgcgtgagctgcgg

SEQ ID NO: 2534 - DNA, 928 bp, Glycine max
  misc_feature (1)..(1): n is a, c, g, or t
  Probeset Number=SeqID_12313
nggggggccgacggtatggaaaaacatccagcaaggcggggacttattgcgtatgatgccgtagtgtcgacgtttgatctacatcatctgttcatgtggatgacatagatgccgagcatacgcgtatgtgcccctggagatgacgtgatacgattcgtccgcagtagaggatccacacgcacggagtcagtgaccaagatagcgtaatagatagcaatacacagtagcgaatctagcaggcgttggcggagttcattaatgctcgtgccgtgccagatttacgggttggcatagggtcagtgaccgcgcatataattaatgtgagctagctatatcattaggcgatgcagtcggaacgctttatatttcccaatagtatcttcagtggaattatgagccgataatatttttacaccgtacacagttatggtcatgagtatgccgatgacgccattgttcgtctttatagggggcaaaagctggagttaccaatcggtgtcggatgatctagagctatatgaatttatcgggatacaggaattgccttgagcccgagtgattattatatggtaatggaacatccttttagaacacttgctcaatatcaattagtttcactctctgggcacgtcccaaatcagttttttcttcagttattctcttctcaaagagtattggtatcgttttttgttattatcaggggtgggtttgaccagaagacgacggataggaccaaggagatcaaggtctttatcaagaaaggggtatagatagtgcgagcttcatccaataaggggtggatcaaagacaaacacatcgatgcgcagactaatgtgattgtaatcatctcatgcatattttaaaggaaataaagtcttaaactgaacaatattgggaaaactatgacaataagtcttaatctggcaga

SEQ ID NO: 2535 - DNA, 515 bp, Glycine max
  misc_feature (13)..(15): n is a, c, g, or t
  misc_feature (18)..(18): n is a, c, g, or t
  misc_feature (20)..(27): n is a, c, g, or t
  misc_feature (89)..(90): n is a, c, g, or t
  misc_feature (105)..(106): n is a, c, g, or t
  misc_feature (163)..(164): n is a, c, g, or t
  misc_feature (283)..(284): n is a, c, g, or t
  Peptide Sequence Number=SeqID_6204
  Probeset Number=SeqID_12314
tgaagagtgctcnnncantnnnnnnnntatgaccgcaccttgtgagccttgctacagctcttggcacttgtgtccttcaaagattgtanngcgttcagttatcgnnaatcatataattgttattagtattctgtttagtccccgcttgtttgagactttacgnnttgttctagtaatttttaagctcttgtgtggtcgataacaatttccttcatgattcagctgttaccataatcacgcctaaggccacaatttaccctcattaaagggatccaaagttggnngtgcagcacttttccgtccgttctaaacattgtggatacttcgggctccaggctcgagtgaatcatatttattttttttttttttttcataacctgaacaaatcagagtttggattctagtgaaactgacggaatgacaaaggtagttaatagttaatagctaatatttgacagatagatgactatacaatagaaagcatcataatctataatgtaatactgtttgtccga

SEQ ID NO: 2536 - DNA, 465 bp, Glycine max
  misc_feature (78)..(78): n is a, c, g, or t
  misc_feature (118)..(118): n is a, c, g, or t
  misc_feature (220)..(220): n is a, c, g, or t
  Probeset Number=SeqID_12315
atataaccaacgaacacactctcacataactctctctctctctctctctctgagtccttcttcttcttcgtccagccnacatgagctcaatcgttcagggtttctcccagtcactggncatgaccattctctctgagatcggtgacaaaacgttttttgcagctgcgatactggctatgcgacaccctagacgcctagtcttattcaggtgcttatcggnctttggatgggatgaccattctctctggtcctggtggctgggcagctcccatctgatctctcggacatggactctcacattacaccatttttatacttggaatttgactttgggcccttgaaaaaggcataattggacaaggggatggcgaaaaaattgctgtaaattgaacctaattgggaataaatgggaagggtatcccggggcctccacaaatagcattagggggggggggtggcccaaaa

SEQ ID NO: 2537 - DNA, 1532 bp, Glycine max
  misc_feature (11)..(11): n is a, c, g, or t
  misc_feature (16)..(16): n is a, c, g, or t
  misc_feature (24)..(24): n is a, c, g, or t
  misc_feature (27)..(27): n is a, c, g, or t
  misc_feature (30)..(31): n is a, c, g, or t
  misc_feature (33)..(33): n is a, c, g, or t
  misc_feature (37)..(37): n is a, c, g, or t
  misc_feature (39)..(40): n is a, c, g, or t
  misc_feature (42)..(42): n is a, c, g, or t
  misc_feature (44)..(44): n is a, c, g, or t
  misc_feature (46)..(48): n is a, c, g, or t
  misc_feature (53)..(53): n is a, c, g, or t
  misc_feature (84)..(84): n is a, c, g, or t
  misc_feature (119)..(119): n is a, c, g, or t
  misc_feature (141)..(141): n is a, c, g, or t
  misc_feature (153)..(153): n is a, c, g, or t
  misc_feature (157)..(159): n is a, c, g, or t
  misc_feature (191)..(191): n is a, c, g, or t
  misc_feature (201)..(201): n is a, c, g, or t
  misc_feature (204)..(204): n is a, c, g, or t
  misc_feature (209)..(209): n is a, c, g, or t
  misc_feature (245)..(245): n is a, c, g, or t
  misc_feature (265)..(265): n is a, c, g, or t
  misc_feature (289)..(289): n is a, c, g, or t
  misc_feature (304)..(304): n is a, c, g, or t
  misc_feature (363)..(363): n is a, c, g, or t
  misc_feature (365)..(365): n is a, c, g, or t
  misc_feature (462)..(462): n is a, c, g, or t
  misc_feature (686)..(686): n is a, c, g, or t
  misc_feature (787)..(787): n is a, c, g, or t
  misc_feature (882)..(882): n is a, c, g, or t
  misc_feature (945)..(945): n is a, c, g, or t
  misc_feature (1013)..(1013): n is a, c, g, or t
  misc_feature (1015)..(1017): n is a, c, g, or t
  misc_feature (1157)..(1157): n is a, c, g, or t
  misc_feature (1352)..(1352): n is a, c, g, or t
  misc_feature (1411)..(1411): n is a, c, g, or t
  misc_feature (1418)..(1418): n is a, c, g, or t
  misc_feature (1532)..(1532): n is a, c, g, or t
  Peptide Sequence Number=SeqID_6205
  Probeset Number=SeqID_12316
gggttttggtnttggntggggcgnccncgnncncgcngnncncncnnnccccntctcacccccccctaggcgtgggtgtgagtngttagtgtggtctgcgcgcgttatgagacgtgtanacacacaacaaataccgcaagngatgagaggagnaggnnncacatcactccatgagggaggacacgcaagcnatcaacgacngtnagggnacaacccacccccccaactctcacaatctcgaatgnagacgcacatagagagcagngttgtataatagagatagtacacncgtatcgcacgctgnactgaccgggagggtgctagggtgatgctccactgggtatgcatctcgccggagagagncnctgagcacaccgcaacctcgtacatgtatatcagccgatctcacatctatcgggaacgtctactatcttcacataaagaagtcgggaatagtaaaantaactagagatagaggacgagacaagcgacacgaactacgtatgacgtttctcacgaaccagtcggctatcctgcaatcagtgcagtaagcagatagagccttgtatccgcggtttctcctgcgcgctcgatggagcgcggtgagtcatgttacagaatggcgcttgctcgaagagcacagtcttccgtgtcgttgaccttcatgcccgcgcgtgtcagacggnacgacgtcgtgagcgactgtctggctgtgtgtgttgttttatgtatgtggctactccccttatcataagccgtgtgcgccgcggcgcgcggtgcgctcggngaagggtgcgcccgccgtcccattcacaccacactagtggctccgatgaatctctcttcttcactggcgggcagtggtggccacccgccagaacnacatatcctacacacgtctgcacatgttatatttagaatgtatagtagaatactgaggagatngcgtctaggacagctcacaccatcaccagttacacagcaaccatatccatccacacgaccccgcggantnnnaacacagtacacgagcagcggcatacttatgtaataagctactaacacatcacccagcacatccgcagagagacgcatctgtcatcaacgcgctcacgtcaggccaaggttgggtgcgtattagttgttagcacgacagnggtggtggtgtgttccattctcctgtgagtgataggagttcagccgcacaaacacacgcacattagatgccgcgagtgaaggaattccacacccgcatatagtgaatatagaagtgcgtcatgagagcatgtagatcacgattcattgaatagaattacagacagtgacgcgaacatggcattcatcttgcctgntcggtgatcccacacgactcgatcacgtactgcgcacgttctagagtttgggtgtagtngatacgnctgcggaacctcgtattgaacctaatcgcactctatagcacgagtcaacgacacaataacagacatgatatcgagcgaactgcgtcgctactctaatataccatcactacaccn

SEQ ID NO: 2538 - DNA, 600 bp, Glycine max
  misc_feature (594)..(594): n is a, c, g, or t
  Probeset Number=SeqID_12317
atcctctagctagtcgattgattgatccagaaatcaaggccggtccatggggaactttttgcccggacgtgcgtccatgaaggacgccctggacgaaaccatgcacctcgtcgacaccaagatggtctggcatcacgtcgccaacggcgggtgcctccaagagttcgtgatcgccatggacgtgtgcaaccccgattacatgaagcagcggcacccccagttttacaagaagcagcaacgcaaggccacccccgtcgacaaggacgcgtgcgtcaaggccacggcggcactgcgcgagtgcttcgccggcaaccccgtcatgttcaagcacgagtatctccaccgcatggacgagggcctcgaccaggaccgcaacccctccccggcccagatcaagaaggagtgggccagcgaatataggtggtggaccggcatgaggagaagctagtaaattttgtgcagatgcagtacgtgatgatcaatggcgctagatagatatatagatagatcggttcatcttatgatgcgatgtgtttgtttggtaagttaagtttttcattacatgcattattcgcacgaagtgtaacagtgatngtaaaa

SEQ ID NO: 2539 - DNA, 682 bp, Glycine max
  misc_feature (1)..(2): n is a, c, g, or t
  misc_feature (682)..(682): n is a, c, g, or t
  Peptide Sequence Number=SeqID_6206
  Probeset Number=SeqID_12318
nnctcgagccgaatcggctcgagctcggatcacagtgttagggttcttcaattttctccgattgccatcaaacatcacacaccacccaccaactatacgtcagcattgaaccctaaaatacatgactcagaagcagagaaccagaatcccagattccatggaaacccagtacgaggagagtgagaaagacgagtcttcctcttcttatagttcctcagaagacgaggaggaagagatagagaaggagctggctgatgtaacgtttgaggagttgcagaaagcacgctcgaatggggcacatgcatttttccagaaacccaaagaagacataaaattaaaaagggctaacaagaataggccaatggaagctagtagcaagaagccagttactgggtttagagaggtcatccaagctccaaagaaggttgtacgtgatccacgatttgaatctctttgtggtaaacttgaccctgatggaaactgtcagatgctgcctgtgtctgctgctctggacatttgcacgttgttcttgttatgctctttcttttcctgtttaatgttgtcaccatttacacttgtgttaagaaatgccataactttagttgcaatcatcattacaaatttctagtaattccatactagtgtaaagctatgttgattctggttgtctttgctattttan

SEQ ID NO: 2540 - DNA, 2079 bp, Glycine max
  misc_feature (1)..(1): n is a, c, g, or t
  misc_feature (9)..(9): n is a, c, g, or t
  misc_feature (40)..(40): n is a, c, g, or t
  misc_feature (144)..(144): n is a, c, g, or t
  misc_feature (148)..(148): n is a, c, g, or t
  misc_feature (152)..(152): n is a, c, g, or t
  misc_feature (162)..(162): n is a, c, g, or t
  misc_feature (165)..(165): n is a, c, g, or t
  misc_feature (173)..(173): n is a, c, g, or t
  misc_feature (199)..(199): n is a, c, g, or t
  misc_feature (288)..(288): n is a, c, g, or t
  misc_feature (335)..(335): n is a, c, g, or t
  misc_feature (340)..(340): n is a, c, g, or t
  misc_feature (368)..(368): n is a, c, g, or t
  misc_feature (392)..(392): n is a, c, g, or t
  misc_feature (400)..(400): n is a, c, g, or t
  misc_feature (407)..(407): n is a, c, g, or t
  misc_feature (426)..(426): n is a, c, g, or t
  misc_feature (436)..(436): n is a, c, g, or t
  misc_feature (477)..(477): n is a, c, g, or t
  misc_feature (491)..(491): n is a, c, g, or t
  misc_feature (558)..(558): n is a, c, g, or t
  misc_feature (565)..(565): n is a, c, g, or t
  misc_feature (605)..(605): n is a, c, g, or t
  misc_feature (649)..(649): n is a, c, g, or t
  misc_feature (756)..(756): n is a, c, g, or t
  misc_feature (759)..(760): n is a, c, g, or t
  misc_feature (762)..(763): n is a, c, g, or t
  misc_feature (766)..(767): n is a, c, g, or t
  misc_feature (769)..(769): n is a, c, g, or t
  misc_feature (771)..(773): n is a, c, g, or t
  misc_feature (779)..(779): n is a, c, g, or t
  misc_feature (790)..(790): n is a, c, g, or t
  misc_feature (795)..(796): n is a, c, g, or t
  misc_feature (799)..(799): n is a, c, g, or t
  misc_feature (801)..(802): n is a, c, g, or t
  misc_feature (811)..(811): n is a, c, g, or t
  misc_feature (840)..(840): n is a, c, g, or t
  misc_feature (876)..(876): n is a, c, g, or t
  misc_feature (886)..(886): n is a, c, g, or t
  misc_feature (889)..(891): n is a, c, g, or t
  misc_feature (893)..(893): n is a, c, g, or t
  misc_feature (908)..(909): n is a, c, g, or t
  misc_feature (912)..(912): n is a, c, g, or t
  misc_feature (1025)..(1025): n is a, c, g, or t
  misc_feature (1101)..(1101): n is a, c, g, or t
  misc_feature (1108)..(1108): n is a, c, g, or t
  misc_feature (1127)..(1127): n is a, c, g, or t
  misc_feature (1220)..(1220): n is a, c, g, or t
  misc_feature (1229)..(1229): n is a, c, g, or t
  misc_feature (1271)..(1271): n is a, c, g, or t
  misc_feature (1288)..(1288): n is a, c, g, or t
  misc_feature (1293)..(1293): n is a, c, g, or t
  misc_feature (1302)..(1302): n is a, c, g, or t
  misc_feature (1306)..(1306): n is a, c, g, or t
  misc_feature (1332)..(1332): n is a, c, g, or t
  misc_feature (1337)..(1337): n is a, c, g, or t
  misc_feature (1341)..(1342): n is a, c, g, or t
  misc_feature (1344)..(1344): n is a, c, g, or t
  misc_feature (1360)..(1360): n is a, c, g, or t
  misc_feature (1473)..(1473): n is a, c, g, or t
  misc_feature (1496)..(1496): n is a, c, g, or t
  misc_feature (1500)..(1500): n is a, c, g, or t
  misc_feature (1502)..(1502): n is a, c, g, or t
  misc_feature (1523)..(1523): n is a, c, g, or t
  misc_feature (1527)..(1527): n is a, c, g, or t
  misc_feature (1543)..(1543): n is a, c, g, or t
  misc_feature (1636)..(1637): n is a, c, g, or t
  misc_feature (1639)..(1639): n is a, c, g, or t
  misc_feature (1642)..(1642): n is a, c, g, or t
  misc_feature (1655)..(1655): n is a, c, g, or t
  misc_feature (1699)..(1699): n is a, c, g, or t
  misc_feature (1702)..(1703): n is a, c, g, or t
  misc_feature (1719)..(1719): n is a, c, g, or t
  misc_feature (1766)..(1767): n is a, c, g, or t
  misc_feature (1781)..(1781): n is a, c, g, or t
  misc_feature (1786)..(1786): n is a, c, g, or t
  misc_feature (1797)..(1797): n is a, c, g, or t
  misc_feature (1818)..(1818): n is a, c, g, or t
  misc_feature (1825)..(1827): n is a, c, g, or t
  misc_feature (1829)..(1829): n is a, c, g, or t
  misc_feature (1831)..(1832): n is a, c, g, or t
  misc_feature (1843)..(1843): n is a, c, g, or t
  misc_feature (1845)..(1845): n is a, c, g, or t
  misc_feature (1857)..(1857): n is a, c, g, or t
  misc_feature (1871)..(1871): n is a, c, g, or t
  misc_feature (1896)..(1903): n is a, c, g, or t
  misc_feature (1906)..(1906): n is a, c, g, or t
  misc_feature (1918)..(1918): n is a, c, g, or t
  misc_feature (1928)..(1928): n is a, c, g, or t
  misc_feature (1931)..(1933): n is a, c, g, or t
  misc_feature (1940)..(1940): n is a, c, g, or t
  misc_feature (1947)..(1947): n is a, c, g, or t
  misc_feature (1949)..(1952): n is a, c, g, or t
  misc_feature (1954)..(1958): n is a, c, g, or t
  misc_feature (1960)..(1968): n is a, c, g, or t
  misc_feature (1971)..(1971): n is a, c, g, or t
  misc_feature (1993)..(1993): n is a, c, g, or t
  misc_feature (2000)..(2000): n is a, c, g, or t
  misc_feature (2004)..(2004): n is a, c, g, or t
  misc_feature (2011)..(2011): n is a, c, g, or t
  misc_feature (2020)..(2020): n is a, c, g, or t
  misc_feature (2024)..(2025): n is a, c, g, or t
  misc_feature (2028)..(2029): n is a, c, g, or t
  misc_feature (2045)..(2046): n is a, c, g, or t
  Peptide Sequence Number=SeqID_6207
  Probeset Number=SeqID_12319
nagtgagtnatacgttgcatcacaagcgtcaatagcagcnacagcagcacgacagcgtgtagtgagatgtaatgagtcagtgcactcggatgtcgttgaaaacacatgaacaacagcagatacaggtcagtgcgagacactgtngcgngacntgctatatangtnctagagcncagacgtacgtatcagcatcatctgnacgagcgcgatcgatgcgacattcggcaccatagtccatcatgatcacgatagtgctcatgtagatgagtggacctaggtatcacacgngaatacgaacacactaggcagtaatgacatacaggagtcataggcanacgtngacgtagtagatgtgctacatccatgangagggagtaatgtgacattggtantgtggtgntttgtangtcgtgtatatattatctnagttattatntactacaagtctagcagatcaaacgtcaccacgtcatgtgngcacatctagctcncggtacgtcttagttgagggtatgatggacagcagtgacaacatggtcagcacgctactcaggcgtntgtgtcntcttgatgtgtgtgtgctgagcgtagggcatgtagtctcntagctacacagtacatcacatcatcatacatatctgtgatgtgnatgtggtgtgtgagtgatcgagccagcgagtcacgcagcggcatgtcctgcgtcactacgtcattcatccacgtgtcagcgtgtttacgatagatatgggtatatgngtnntnnttnntntnnnaagatnttgctatgtantgggnngtncnncctcctctntcctcactcacactgcacacaagagctantgcaacactgagaatgtggtgttgtgtggtggtgtntagagattantgnnntntcataacctactcgnntcntacattactcatatctacactcttaaattcacgtacacgctcaccttctgcatcgtaatacgttctatcgtgactgtagtagacggtgatctgtgcctcgtcttgcttcgatntctagcaggtgatagttcatacgatgtgtgtcatggcgattgagtctagtcgtgatggtctctatatcatatactncacgtcnatctctcgtgcactgtctncgagacaatcactacgacatcagctgctcgtgcactctatacgcaatattttcttgcttatgtagtgtgagctagacaatagtctatatcatnctcataacngtacacgtactcatctatacaatctatgtctcattggactgngccgtgagccggcgcantcagnatatcatcnacancacacactatctgagacgatggccgnggtanatgnngntagatcatgtgacgtnggcagtgctatcatgctacatgtatatttctgtcgcacatttacgcgcacacgatactcgtcattgtctgcagcgctcgcgtctgttgctctgtctgggggtggtgaggaagntcggcaatacatacagcgaatgnggangnttcgtgtgtattctttgcggnttgnagtgtatgtcgcatangaaaagaatatataatatatatatgagtagggatgagagtcttcattgagtatcatagtgtttttgtaagtgggatgattgttgctcttacgnntntgnttgtcttctcgtntgtcggacgacatgcgatatgtgcagttcgtgtagttatatatnttnntcgttgctcgcggctnggatgacacacaagcacgctgtgctcgttgtggaggtaataagatgnntcacacaacccaancacangaggagacganatggctctcacgtgtgtgttngtgtttnnntntnnacacgacatgntnttggatcatagnttagtgcgctagtntgggagagatcatacctagctattnnnnnnnngtngagagatggcgncatcctctcnctnnnaacgagnccacgcncnnnngnnnnngnnnnnnnnngtnagagtgttgtgttgttgttttnttggttntgtngcgtttntttctcgtntcannatnntaacaccacaattcanncgcggggggtggccacccacacacaaactcaca

SEQ ID NO: 2541 - DNA, 453 bp, Glycine max
  Probeset Number=SeqID_12320
aaaactctcccaacattctctcctccaatctagctagctcctacgcccactctgtaatccaacaacaacaaccagcaaagcttcgatctgatctgataagatggcgagcatcagcaacgagccggagcgcgagcacagagacgaagaagagtccggagccaacgaggacgaagacaccggcgctcaggtcgctcccatcatcaaactcgaagaagtcgccgtcactaccggcgaagaaaacgaagacgcaatcctcgatctgaaatcgaagctgtataggttcgataaagatgggagtcagtggaaggagagaggcgctggtacggtcaagttcttgaagcataaggagtctgggaagatccgtctcgttatgaggcagtccaaaactctcaagatctgtgctaatcatctcgttacgtcggggatgagtgttcaggaacacgctgggaatga

SEQ ID NO: 2542 - DNA, 1360 bp, Glycine max
  misc_feature (846)..(846): n is a, c, g, or t
  misc_feature (930)..(930): n is a, c, g, or t
  misc_feature (1040)..(1040): n is a, c, g, or t
  misc_feature (1161)..(1161): n is a, c, g, or t
  misc_feature (1297)..(1297): n is a, c, g, or t
  misc_feature (1360)..(1360): n is a, c, g, or t
  Peptide Sequence Number=SeqID_6208
  Probeset Number=SeqID_12321
tgtgtggtgtgtgtttgtaatgggctctatacgtgaatatgcgtcgcaccctcacacccaccttcacgatatatacttcttctcttgctacggcccagtccaacagactcacgacgctcatatctaatggtatgtctattctgttaaacacacgctcattgtcctgttccttcacacgaccacgtcgctatttttaatcattacctacactaagtatatactcgatgacatagtgtcggatattctgaaccgtgtcataggctctgacaattctacccgacacacgacgcctgatctctcctcttcagttcgacatccataccactcttctatccctgcatagctcttcttctcttacaaacattctcacctccactcagacacgtgtctttcacctcgtcccgcacgtgccgccacgcgccaccctattacataacagagagatctgcgtaagaaacgggagtcagactcagcgcagagtatctcttatataagttcgttctgatcacgtacccaaccgttaatctaaggatacccgattacttcctatagacttagtacatccatcgattgcatctccggcgatttaatgatcgatatcatgtataattgacgaaggccaaactaccgccacgcacatcgatggctgtactctctccgtatggctcggcgttcccacgagatactcctctagtacctccaccgacaatatattgtgcgtctgaccacgatccctagtatagacgctgcacgtccctgtaatatgaagtactgtccgtgtacggcccatattctagtctgatgaaccactctactcgatattgtgctgcgcggcgcttccgcatnacgagcgtcgtattatataatatactgacttctggataagaacacgcacaacataagttgctcttagacatatcgtgatatctnctatcatcatacgcacactctcacataccccgtgtctacatcgaatattatttatatacgcacgcgtcgtgtaatcactctgcatcacgtccctgtcgctcgaggtatgncccacgccagcggctctctctgacgtatgaccgtctcagtctatactgtgcaacggcgaagaacgtcttctgcgtccgactcgcgacgctacgtacgtatcgcgagtgatgatacgcagtncgctctccactactgtacatgtaccctagtctcagctcactccactatcatatattattcgctctcttcatcgacacaccactatgctccgcgctgacacaccactcgctcacgccgctagtactgatcagtacgntgtctcacatcactacctccgtcatcgctgcatatgatttcgatcgcacacgtcagcttcgtn

SEQ ID NO: 2543 - DNA, 3493 bp, Glycine max
  misc_feature (1)..(742): n is a, c, g, or t
  misc_feature (3493)..(3493): n is a, c, g, or t
  Probeset Number=SeqID_12322
nnnnnnnnnnnnnnnnnnnnnnnnnnnnnnnnnnnnnnnnnnnnnnnnnnnnnnnnnnnnnnnnnnnnnnnnnnnnnnnnnnnnnnnnnnnnnnnnnnnnnnnnnnnnnnnnnnnnnnnnnnnnnnnnnnnnnnnnnnnnnnnnnnnnnnnnnnnnnnnnnnnnnnnnnnnnnnnnnnnnnnnnnnnnnnnnnnnnnnnnnnnnnnnnnnnnnnnnnnnnnnnnnnnnnnnnnnnnnnnnnnnnnnnnnnnnnnnnnnnnnnnnnnnnnnnnnnnnnnnnnnnnnnnnnnnnnnnnnnnnnnnnnnnnnnnnnnnnnnnnnnnnnnnnnnnnnnnnnnnnnnnnnnnnnnnnnnnnnnnnnnnnnnnnnnnnnnnnnnnnnnnnnnnnnnnnnnnnnnnnnnnnnnnnnnnnnnnnnnnnnnnnnnnnnnnnnnnnnnnnnnnnnnnnnnnnnnnnnnnnnnnnnnnnnnnnnnnnnnnnnnnnnnnnnnnnnnnnnnnnnnnnnnnnnnnnnnnnnnnnnnnnnnnnnnnnnnnnnnnnnnnnnnnnnnnnnnnnnnnnnnnnnnnnnnnnnnnnnnnnnnnnnnnnnnnnnnnnnnnnnnnnnnnnnnnnnnnnnnnnnnnnnnnnnnnnnnnnnnnnnnnnnnnnnnnnnnnnnnnnnnnnnnnnnnnnnnnnnnnnnnnnnnnnnnnnnnnnnnnnnnnnnnnnnnnnnnnnnnnnnnnnnnnnnnnnnnnnnnnnnnaccctctctgtttcaaccgcgatcgctcacttctctctgctgggcacgggtgcatgcttcagtacgcgcttctgcacctcgctgggttcgatagcgtcaaggaagaggatttgagggaatttcggccaatgggggagcagaactccgggacaccctgagatttttgagacgccgaggattgaagttacaacagcttcctctttggctggggcgtgcccgtgtcgttgtttttgctccacgtggaggaattctcggataagctatacaacaccgctcagtctaagagtgggtgtctcgtacacgcagctgaatctggctgcgggatcggagatgcaggccttcgcgaatcaagcagtaccacttgccaggtacaagggactagggaacagggtccatttggatgaggaattgccaatgttccttggggttacgatagcgattgagttcactgggagcgacgattttcgtttcgtggcactggggttgcatgttatttgggtaaagaatggaaataatggctatgatgaaattcgtgcggctatcaaagaaacaaaagctgtttaagacaaacccacattaatcgaggtcacaacaaccattggttttggttctcctaacaaggctaactcctacagtgtgcatggaagtgcactgggtgccaaagaagttgatgccacaaggcagaaccttggatggtcacatgagccattccatgtgccagaggatgtcaaaaagcattggagtcgccacacccctgagggtgctgcacttgaagctgaatggaatgctaagtttgctgagtatgaaaagaaatacaaagaggaagctgcagaattgaaatctattattaatggtgaattccctagctggttgggagaaagcacttacgacatacactccagagagccctgcggatgccacaagaaacctgtctcaaaaatggattaatgcccttgtgaaggttcttcctggtctacttggtggcagtgcagctcttgctgttccaaaagtgaccttgctcaaaatattcggggacttcgcaaaagattatcccgaggagcgtaatgttagatttggtgttagagaacatggaatgggagccatctgcaatggaattgcactttacagccccggactgattccatactgtgcaaggttactttgtattcactgactacatgagaggtgccataaggttttctgcactgtctgaagctggcgttatttatgtgatgactcatgattcaattggacttggagaagatgggccaacccaccagcctattgagcacctggcaagcttcggggcaatgccaaacattttgatgcttcgtcccgccgatgggtaatgaaactagccggatcatacaaagtggggccgtgctcaacaggaagagaccctccattcttgccctatccaggcaaaaactgccccagcttcccggaacttccattgaaggagttgaaaagggtggttacaccatttcggacaactccactggcaacaagcctgatgtcattttgatcggaactggttcggaattggaaatcgctgccaaagctgctgatgacctaaggaaggaagggaaggctgttagagttgtttcccttgtttcttgggaactttttgatgagcaatcagaagcctacaaggagagtgttttccctgctgctgtttcagccagagttagcattgaggcaggatcaacatttgggtgggagaaaattgttggagcaaagggaaaagcaataggcattgatcgttttggagctagtgctccagctggaagaatatacaaagaatttggtatcactaaggaagctgttgttgctgcagctaaagagcttatctagaacttttgatttttttttgccttctggttttggttgagagcattccatgtcatgaataagaaaaaggttaaatatccttcgattgggaatttgggattttaagtgaagaagcaacatagatcaaagaattttgtgaacttgtaataactatttgacaatttagttttgcactgccacatggttaaattcaatgtttgatcatatcaaccatagatgctagtgtatactacttgtataatttgtttcacttgcagattcactcttagcatttgagtgtttggatgatcgtgttttgttcatttagaaatgttgacatggatagtttgttgcgtggctttgggttactgttacatgacttgttttttgagatatcactttagccacaataaggaagattagattgttcttgcatatgattgtcagaggaaccacttacattgaaggatgagttgaattaatgaagttgtatgaatttgtaacaactatttggcttgctctgtggtgtagttgaattagtgatgctcactctagcactcaattctggacagatatggcttctaggaagaattatatccttctctatttttttttcttaaaaataaaaaataaagaatctagtttaaaaccattactcaaggttaacatagccgcggcgtatggtatcttcaaccgcagggttaagaatgccgacgccgctgttagcaatggggcttagcccttcatgttggcagttttatgtataaagtagatgtcaagagcacacctggttattccagaaaagttttataaaaaaggtaggtgcacaatttccaatgtatgccttaatttaggtatttttttcccctgtctgtatgaaaaggcccaagcatgtttatgccagagtgtagtcgatggaan

SEQ ID NO: 2544 - DNA, 1984 bp, Glycine max
  misc_feature (11)..(12): n is a, c, g, or t
  misc_feature (17)..(18): n is a, c, g, or t
  misc_feature (23)..(24): n is a, c, g, or t
  misc_feature (32)..(33): n is a, c, g, or t
  misc_feature (37)..(37): n is a, c, g, or t
  misc_feature (47)..(47): n is a, c, g, or t
  misc_feature (141)..(141): n is a, c, g, or t
  misc_feature (154)..(154): n is a, c, g, or t
  misc_feature (229)..(229): n is a, c, g, or t
  misc_feature (295)..(295): n is a, c, g, or t
  misc_feature (317)..(317): n is a, c, g, or t
  misc_feature (332)..(332): n is a, c, g, or t
  misc_feature (369)..(369): n is a, c, g, or t
  misc_feature (410)..(410): n is a, c, g, or t
  misc_feature (491)..(491): n is a, c, g, or t
  misc_feature (496)..(496): n is a, c, g, or t
  misc_feature (520)..(520): n is a, c, g, or t
  misc_feature (524)..(524): n is a, c, g, or t
  misc_feature (547)..(547): n is a, c, g, or t
  misc_feature (574)..(574): n is a, c, g, or t
  misc_feature (603)..(603): n is a, c, g, or t
  misc_feature (614)..(614): n is a, c, g, or t
  misc_feature (617)..(617): n is a, c, g, or t
  misc_feature (655)..(655): n is a, c, g, or t
  misc_feature (666)..(666): n is a, c, g, or t
  misc_feature (858)..(858): n is a, c, g, or t
  misc_feature (870)..(870): n is a, c, g, or t
  misc_feature (875)..(875): n is a, c, g, or t
  misc_feature (963)..(963): n is a, c, g, or t
  misc_feature (1042)..(1042): n is a, c, g, or t
  misc_feature (1067)..(1067): n is a, c, g, or t
  misc_feature (1126)..(1126): n is a, c, g, or t
  misc_feature (1233)..(1233): n is a, c, g, or t
  misc_feature (1285)..(1285): n is a, c, g, or t
  misc_feature (1319)..(1319): n is a, c, g, or t
  misc_feature (1338)..(1338): n is a, c, g, or t
  misc_feature (1462)..(1462): n is a, c, g, or t
  misc_feature (1465)..(1465): n is a, c, g, or t
  misc_feature (1505)..(1505): n is a, c, g, or t
  misc_feature (1571)..(1571): n is a, c, g, or t
  misc_feature (1691)..(1691): n is a, c, g, or t
  misc_feature (1984)..(1984): n is a, c, g, or t
  Peptide Sequence Number=SeqID_6209
  Probeset Number=SeqID_12323
gttttcttttnntcctnnctctnnttattttnntctnactctcttantgtcattacgtccgtcgcactcgcttcgcccgttctctctgcacgcggtccacgactcacagctcgagtagccctctcgccgtccgtctttccnacactactgagcnacgtcgaggtgtatgtcgctgacgcgcgagtgacgatgatgtgtctatactatgctatgtgatctatacctgctncgctgcggacgctcgacagctgctcgataggtcggagtgagtgccgtcggaagcaagcgagtaganagtatatagagcgactgcgtcntctcatataaaagtncatagagtgtagagcatgcgcagagagtatatagatnagtcgtagcagtctgatgctagatagtcgcgcccatatgcntgcactactgatctgtcgcgcgctccgtcactcagctcttctaccgtcgcactctccgtccagctaatagtcatatgcttngagcntgcgctctctcgagcgtagacgcngacncactgataagactactcacaganagggccgtgcaagcatgctactatatnctacgctcatagactatgtcatcaatctngtacggcaagnccnacacgcaccactatgtaagtacgatattatttactatnatcagtgaaanattacgaacacgctattttatcttaatactcttatctgaaccctcggtcacgagcctattagccatccgccacgcgcacgcggcgagagacatggaatgctgtcgcggccgccgagcagaggtgacgctcgtcgcatttatatatacgtcgcacagagcacactacgtgatatgtcgtatggaggtctgcanacacggtgcacntggcnttctgatattctcagtcacttggcagtccctcctcgacgaccgactcatgacattactcactcgtcggccgccagctacttgaacatntatgtatatctgatcaccgtgctgagataatgatctacttcttagcgctcgaccggtcactcattttaggacgtggcgngtgtatccagtttgtctgctgctcnctgatatttatcttgtgtacgtagcgtacaccaatacatatgtattactcacacgcagncgtgctctatgattatgtctaggtcgtcgctgaacacactaacgttacacctcgaagctctgcgtgatcgttgatgagcctcctacctcgccacgtccaacgtgacntgagcgcgacagcgagacagacgtacatgaacactcatcttctctgtcgcgncactacgtctgtctcattgatatgctcctcgcgncacgcacatgcactctccnctctctcgagtacatctaccagcatgtatatatgtgtcgcgcgcgcccgggcctttgagctgcagctgagcgtagctacactgtatactgcgagtgtcgtagacgcgacatcgatactgcgtcncangtgatatcagtgctgcgcgtctaacattataatcgcgccngtcacgcgacgcatactcacagcatgacgacaacaatgtatgtgtactctttgcttatcacacacntacggcagcgatacctcacgatgcgcgcagtcgtcgagctcttcatctgccagacactacgtctccaacgatctcagacctggtgtgattggcacgaaatctcacactacatctactcgnctgatacatctcacgactctactcgcgaacaatacacatcaacgagagcactcagaataaagatgcgaggcagacgacagtacctggcgctctatacaactactgactctgtgagatgatcgtactctgtcgaccgatgtgcgagctgaatagtcactatatcctgcgagagagtgattgtctacataccacgggacgtgacgagagacgtgctctctctactgtgcgcgtcgcactcattcgtgtcaccgtatgagagcactaacacatgcgagcgcccatgagctcatggn

SEQ ID NO: 2545 - DNA, 1553 bp, Glycine max
  misc_feature (55)..(55): n is a, c, g, or t
  misc_feature (140)..(140): n is a, c, g, or t
  misc_feature (208)..(208): n is a, c, g, or t
  misc_feature (286)..(286): n is a, c, g, or t
  misc_feature (317)..(317): n is a, c, g, or t
  misc_feature (337)..(337): n is a, c, g, or t
  misc_feature (420)..(420): n is a, c, g, or t
  misc_feature (429)..(429): n is a, c, g, or t
  misc_feature (438)..(438): n is a, c, g, or t
  misc_feature (446)..(446): n is a, c, g, or t
  misc_feature (448)..(448): n is a, c, g, or t
  misc_feature (464)..(465): n is a, c, g, or t
  misc_feature (509)..(509): n is a, c, g, or t
  misc_feature (524)..(524): n is a, c, g, or t
  misc_feature (533)..(533): n is a, c, g, or t
  misc_feature (555)..(555): n is a, c, g, or t
  misc_feature (557)..(557): n is a, c, g, or t
  misc_feature (597)..(597): n is a, c, g, or t
  misc_feature (602)..(602): n is a, c, g, or t
  misc_feature (607)..(607): n is a, c, g, or t
  misc_feature (641)..(641): n is a, c, g, or t
  misc_feature (669)..(669): n is a, c, g, or t
  misc_feature (764)..(764): n is a, c, g, or t
  misc_feature (838)..(838): n is a, c, g, or t
  misc_feature (892)..(893): n is a, c, g, or t
  misc_feature (901)..(901): n is a, c, g, or t
  misc_feature (920)..(921): n is a, c, g, or t
  misc_feature (1051)..(1051): n is a, c, g, or t
  misc_feature (1062)..(1062): n is a, c, g, or t
  misc_feature (1070)..(1070): n is a, c, g, or t
  misc_feature (1140)..(1141): n is a, c, g, or t
  misc_feature (1177)..(1177): n is a, c, g, or t
  misc_feature (1182)..(1182): n is a, c, g, or t
  misc_feature (1259)..(1259): n is a, c, g, or t
  misc_feature (1262)..(1262): n is a, c, g, or t
  misc_feature (1267)..(1267): n is a, c, g, or t
  misc_feature (1271)..(1271): n is a, c, g, or t
  misc_feature (1281)..(1281): n is a, c, g, or t
  misc_feature (1290)..(1290): n is a, c, g, or t
  misc_feature (1298)..(1298): n is a, c, g, or t
  misc_feature (1312)..(1312): n is a, c, g, or t
  misc_feature (1314)..(1314): n is a, c, g, or t
  misc_feature (1322)..(1322): n is a, c, g, or t
  misc_feature (1339)..(1339): n is a, c, g, or t
  misc_feature (1373)..(1374): n is a, c, g, or t
  misc_feature (1376)..(1376): n is a, c, g, or t
  misc_feature (1394)..(1394): n is a, c, g, or t
  misc_feature (1428)..(1428): n is a, c, g, or t
  misc_feature (1438)..(1438): n is a, c, g, or t
  misc_feature (1456)..(1456): n is a, c, g, or t
  misc_feature (1459)..(1459): n is a, c, g, or t
  misc_feature (1464)..(1464): n is a, c, g, or t
  misc_feature (1467)..(1467): n is a, c, g, or t
  misc_feature (1469)..(1470): n is a, c, g, or t
  misc_feature (1472)..(1474): n is a, c, g, or t
  misc_feature (1485)..(1485): n is a, c, g, or t
  misc_feature (1488)..(1488): n is a, c, g, or t
  misc_feature (1490)..(1490): n is a, c, g, or t
  misc_feature (1496)..(1497): n is a, c, g, or t
  misc_feature (1499)..(1499): n is a, c, g, or t
  misc_feature (1502)..(1502): n is a, c, g, or t
  misc_feature (1504)..(1504): n is a, c, g, or t
  misc_feature (1510)..(1511): n is a, c, g, or t
  misc_feature (1514)..(1514): n is a, c, g, or t
  misc_feature (1516)..(1516): n is a, c, g, or t
  misc_feature (1525)..(1525): n is a, c, g, or t
  misc_feature (1535)..(1535): n is a, c, g, or t
  misc_feature (1539)..(1539): n is a, c, g, or t
  Peptide Sequence Number=SeqID_6210
  Probeset Number=SeqID_12324
ccatagagcgtatacgcagactatcacaacgcaccacgtcatctcgtccacgcanacgaaatatagagaatatattcacatatgtagcgacgcatcacagctaatatcatataatagtgtatctagagtagcgtccagantgtatgtctagatgttatacatcgacagcaggtacgtcattccgcaccagcgatgcgcgcgcctcatntcacatcagtgactttctcgtacggttctcgtcccgtcttagtatgcacccgatctccctgtatcaagcgcgcagcancactgacgacacatgctacgaaactatgagncatagtaccaccagcgaccncactcagatactttgatcgcgtcagcgcgcgagcgtatgatcagagctatatcagtgcgctcactacacagtacataatagtnacttgtctnttagatacngtgctatntntatgcttatagtctcnntgctcatgtattatggtctgtctggttgcgatgagaggctctgntttgctacgcagcgngcgatcatncacatcacatcaacagcacacngnagatcgacatccacactgatgtgcgcgcgcatgggtgtgnggcgngcacnttagtcacaacacaatccgcgccgtgcctcgcgncttcgcatagcacgcggtgcgcgctgtncatagatgttagatcatgatatgcataactcgagctgtagacatgctgaccatcagtcatcaacacttgtatactatgaggcgatggggacatcntcgtattgtattattagtgtcgtctaccttccgttgtccctcctctcactcattttctctattctgcatatgtngtattctacacaatcacctcctcacacgacacacatacatctcgttgtgccacnntatgatanatattccctcctcctcccnnacattataagccacgacgacaactaattatcaattgtagcaccaaacacacagacgcggcgaccgtgatagacatacactatgatcatgatacgcagacattcgccgcccacacacagtcgtcaccatangcagtgtgtgngatggtgnccccgcagcacaccgacacgcgctatcattatataacatcaatacgtaagacataacatagatgacacgnngagacctcacctccatgaatacgatgaatgacagcnttcanacacatcacactcagctagcacatcgcgcgcagagttctgaccaatcaacatatcacatatgaccacacattgtgtncgnggcgncagncgtcctccangccgcgggnggtaggtngagatatgaataananagacaccnacaccacacatccgagncgccgccgctcccacgcagcttgcgattttgtgnngntggctctcttagagatanccacaaaaagacacaaaattacagtaaagtatcncacacactanaatctctaagacaacaancantaganatntnntnnnattgcggtcgngtntntgtganngngancncactcnngcncnagacacacnaagacaccanaganaacccacacaaaca

SEQ ID NO: 2546 - DNA, 801 bp, Glycine max
  misc_feature (1)..(1): n is a, c, g, or t
  misc_feature (792)..(801): n is a, c, g, or t
  Probeset Number=SeqID_12325
naattctccaaccactggattctttccttaggacccttgtattggccaaaaaacaagacttttaattttcagattgttcctcaaaaacggaactcccttgcccccttgtacagaggaaagaaacttataatatcacagtctatttgacagatcaagagggaaacttgtccaaaacccccccctagaatccctcctacccttcgctatctatacctcagaaaaccctcctaaatacgtcgatgtcaacacctctggcaacaagatccttaagggcatgattgacaaagacttggttgatggagctgtcacttttgacaaaatccaaatcaaagaagttacttctcactttagaaacggctgggtcttctttgttgtccaacctaaaagttccggaaacgtcttgaacaatctaattgacatgcaaaatggagtcatgatcaatcctcaaaacgttaagccacttatcatcgaaaagatggttgtcaaagctaaaagagcaaagggaaagaaaaccgaccaagacttggagatcgaagaagaaaaagatcttgaaattgaacaagatcaagaacaagaacaacaagaacaagattttatatatactcatgctaatgaagaggaagtctttgtgtaaacttccaatccttcaaaaaagttgagtacatcagttgtttaattaactttattcatctcttcttctttgtgtgtttctcttgtatttattattatcattaaatcaatcaaccaagtctttctcttttcttacaaaattcaaaaaaaaaaaaaaaaaannnnnnnnnn

SEQ ID NO: 2547 - DNA, 223 bp, Glycine max
  misc_feature (131)..(177): n is a, c, g, or t
  Peptide Sequence Number=SeqID_6211
  Probeset Number=SeqID_12326
atcatccaatgcctatcagaaagttgaacatgagaaagctaaacaagacgatgcactcgaagatctaagtggcatcttaggtgatttgaagggtatggcaattggcatgggatctgaacttgacaagtaannnnnnnnnnnnnnnnnnnnnnnnnnnnnnnnnnnnnnnnnnnnnnnatttgtgttacacggtttatttgttggagttaccatgttttgctta

SEQ ID NO: 2548 - DNA, 457 bp, Glycine max
  Peptide Sequence Number=SeqID_6212
  Probeset Number=SeqID_12327
cccccccatcgacttccagaacatctgcttctactccgctcccgcgaataaaccctcactccactccctcgacgacgccgaccccgagcttctccggtacttcgacaagctcggtgtccctctcaacgagcagaaacgcctcgccaacgtctccgttgacgctgtcctcgacagcgcctccatcgccaccactcaccgcagaaccctatacacagcctgcgccattctctgctccatctccgatgccattaaggagtatcctggttcggtgagaaaacatacccgatagaacacccgctcctacgatacctgctccatccccttgtgcaccaccgtcttcaccgactgatcgagccgctacattccgatggacaccaacagacctgtgcacatatcgacttacttcaccgatcatcgcgagcagacctggctcatatgtaggactgtgatagtcccg

SEQ ID NO: 2549 - DNA, 2072 bp, Glycine max
  misc_feature (1)..(1): n is a, c, g, or t
  misc_feature (45)..(45): n is a, c, g, or t
  misc_feature (68)..(68): n is a, c, g, or t
  misc_feature (71)..(71): n is a, c, g, or t
  misc_feature (74)..(74): n is a, c, g, or t
  misc_feature (77)..(77): n is a, c, g, or t
  misc_feature (109)..(109): n is a, c, g, or t
  misc_feature (133)..(133): n is a, c, g, or t
  misc_feature (135)..(135): n is a, c, g, or t
  misc_feature (148)..(148): n is a, c, g, or t
  misc_feature (150)..(150): n is a, c, g, or t
  misc_feature (181)..(181): n is a, c, g, or t
  misc_feature (186)..(186): n is a, c, g, or t
  misc_feature (189)..(189): n is a, c, g, or t
  misc_feature (204)..(204): n is a, c, g, or t
  misc_feature (241)..(241): n is a, c, g, or t
  misc_feature (264)..(264): n is a, c, g, or t
  misc_feature (267)..(267): n is a, c, g, or t
  misc_feature (283)..(283): n is a, c, g, or t
  misc_feature (288)..(288): n is a, c, g, or t
  misc_feature (333)..(333): n is a, c, g, or t
  misc_feature (472)..(472): n is a, c, g, or t
  misc_feature (479)..(479): n is a, c, g, or t
  misc_feature (492)..(492): n is a, c, g, or t
  misc_feature (497)..(497): n is a, c, g, or t
  misc_feature (526)..(526): n is a, c, g, or t
  misc_feature (570)..(570): n is a, c, g, or t
  misc_feature (599)..(599): n is a, c, g, or t
  misc_feature (606)..(606): n is a, c, g, or t
  misc_feature (611)..(611): n is a, c, g, or t
  misc_feature (753)..(753): n is a, c, g, or t
  misc_feature (803)..(803): n is a, c, g, or t
  misc_feature (844)..(845): n is a, c, g, or t
  misc_feature (852)..(852): n is a, c, g, or t
  misc_feature (854)..(854): n is a, c, g, or t
  misc_feature (857)..(857): n is a, c, g, or t
  misc_feature (898)..(898): n is a, c, g, or t
  misc_feature (938)..(938): n is a, c, g, or t
  misc_feature (977)..(977): n is a, c, g, or t
  misc_feature (1052)..(1052): n is a, c, g, or t
  misc_feature (1057)..(1057): n is a, c, g, or t
  misc_feature (1076)..(1076): n is a, c, g, or t
  misc_feature (1084)..(1084): n is a, c, g, or t
  misc_feature (1103)..(1103): n is a, c, g, or t
  misc_feature (1199)..(1199): n is a, c, g, or t
  misc_feature (1219)..(1220): n is a, c, g, or t
  misc_feature (1227)..(1227): n is a, c, g, or t
  misc_feature (1273)..(1273): n is a, c, g, or t
  misc_feature (1275)..(1275): n is a, c, g, or t
  misc_feature (1342)..(1342): n is a, c, g, or t
  misc_feature (1344)..(1344): n is a, c, g, or t
  misc_feature (1348)..(1348): n is a, c, g, or t
  misc_feature (1358)..(1358): n is a, c, g, or t
  misc_feature (1435)..(1435): n is a, c, g, or t
  misc_feature (1455)..(1455): n is a, c, g, or t
  misc_feature (1483)..(1483): n is a, c, g, or t
  misc_feature (1505)..(1505): n is a, c, g, or t
  misc_feature (1554)..(1554): n is a, c, g, or t
  misc_feature (1586)..(1586): n is a, c, g, or t
  misc_feature (1611)..(1611): n is a, c, g, or t
  misc_feature (1613)..(1613): n is a, c, g, or t
  misc_feature (1617)..(1618): n is a, c, g, or t
  misc_feature (1629)..(1629): n is a, c, g, or t
  misc_feature (1639)..(1639): n is a, c, g, or t
  misc_feature (1643)..(1643): n is a, c, g, or t
  misc_feature (1647)..(1647): n is a, c, g, or t
  misc_feature (1711)..(1711): n is a, c, g, or t
  misc_feature (1730)..(1730): n is a, c, g, or t
  misc_feature (1754)..(1754): n is a, c, g, or t
  misc_feature (1756)..(1758): n is a, c, g, or t
  misc_feature (1761)..(1761): n is a, c, g, or t
  misc_feature (1766)..(1766): n is a, c, g, or t
  misc_feature (1771)..(1772): n is a, c, g, or t
  misc_feature (1775)..(1776): n is a, c, g, or t
  misc_feature (1780)..(1782): n is a, c, g, or t
  misc_feature (1795)..(1795): n is a, c, g, or t
  misc_feature (1833)..(1833): n is a, c, g, or t
  misc_feature (1835)..(1835): n is a, c, g, or t
  misc_feature (1842)..(1844): n is a, c, g, or t
  misc_feature (1847)..(1848): n is a, c, g, or t
  misc_feature (1850)..(1854): n is a, c, g, or t
  misc_feature (1856)..(1857): n is a, c, g, or t
  misc_feature (1860)..(1866): n is a, c, g, or t
  misc_feature (1879)..(1879): n is a, c, g, or t
  misc_feature (1890)..(1890): n is a, c, g, or t
  misc_feature (1892)..(1892): n is a, c, g, or t
  misc_feature (1897)..(1897): n is a, c, g, or t
  misc_feature (1901)..(1903): n is a, c, g, or t
  misc_feature (1905)..(1905): n is a, c, g, or t
  misc_feature (1908)..(1909): n is a, c, g, or t
  misc_feature (1917)..(1917): n is a, c, g, or t
  misc_feature (1926)..(1926): n is a, c, g, or t
  misc_feature (1930)..(1932): n is a, c, g, or t
  misc_feature (1943)..(1943): n is a, c, g, or t
  misc_feature (1946)..(1946): n is a, c, g, or t
  misc_feature (1956)..(1956): n is a, c, g, or t
  misc_feature (1958)..(1958): n is a, c, g, or t
  misc_feature (1974)..(1974): n is a, c, g, or t
  misc_feature (1978)..(1978): n is a, c, g, or t
  misc_feature (1988)..(1989): n is a, c, g, or t
  misc_feature (1993)..(1995): n is a, c, g, or t
  misc_feature (1997)..(1997): n is a, c, g, or t
  misc_feature (2001)..(2001): n is a, c, g, or t
  misc_feature (2006)..(2007): n is a, c, g, or t
  misc_feature (2011)..(2011): n is a, c, g, or t
  misc_feature (2013)..(2017): n is a, c, g, or t
  misc_feature (2019)..(2020): n is a, c, g, or t
  misc_feature (2025)..(2026): n is a, c, g, or t
  misc_feature (2029)..(2029): n is a, c, g, or t
  misc_feature (2032)..(2032): n is a, c, g, or t
  misc_feature (2034)..(2034): n is a, c, g, or t
  misc_feature (2038)..(2039): n is a, c, g, or t
  misc_feature (2041)..(2044): n is a, c, g, or t
  misc_feature (2047)..(2048): n is a, c, g, or t
  misc_feature (2063)..(2063): n is a, c, g, or t
  Peptide Sequence Number=SeqID_6213
  Probeset Number=SeqID_12328
nagaagatcagacgtgagagcagacgagctatcatgtcgtcagtngcagcttacatacttcactcggntgntgnagnatactacgagtagtgagcgtagtcaatgacangtatgagcgtcagcatgtgacgcngnctgatatacagtnancgagtcatatgcagcatatagaacattgtangcagntgncattcacagtggcgncgtgtacaaatagatagcgcgcatttagtcgccggtnacgcgagagcgatgcacgcgcangangcagccggtgcgctanacttngggcgtaagagttagtcgatgagtgagcgatgcatcgctgtgtgnagtatgtcgttacgactctatggccatctgtctatatcgatatctcatacatattcatatatgtacataattacacagacgagagagcaatacactacaatatcaagttccgcatgataagtataaaaaggcgacaatntgattgntctctgtgtgctntgagngtggccggagcgtggccgcagcacgtcancatagcgtcacacgcagcactagcctacagcattctcactacgntaacagtacgatcgcgccactggacacancttacgngtatnctatctgacgtgcatagatgaacgcgcagctcgcagtatacacatagtcatcgattactgagcagcatatatactcactcagtacatacaatcatctaacatcacctgcacacaagacacactgtagggtggggggtacgtnacacatcatacatctcccagacatcacgacacagcgacactaacatcganacagatatagacgtcatcacacacgtctcatctgtgtcgtnngctgtcntncgntctcacactcgtcatacctacatagacatatctcatcgacnacttacacacctactgtagtcttataatatcatgtctcgnatcatcagtgctggactagcgtacatgtatcagcgtgcntgagcgctctcactcacacggtgcggtcgagtatatcgccatcgctccacatcatccaacatgcatatgtgtagngtcantatctataaattctacatncatcatgntcagcatccactataactnttcgatcacgcacagcgacacagcactacctacacacacgtacatagactatagatacatgcatcatctctcgtattatatcaatcatctagacantggctacttgtatgacactnncctcatncacaccactctaattatcagctatcagtagaggataccacatcacnancaacacacacagcagcagagcgcgacgaggtgcaggcgaaccgcacagacagtagcactacgacacnancacnactcatgcanccccgcgcgcatgcgccatcagtcagcatatgtaagtacgtcatcctccatcacactccagtaacatactgctatcnatctgcgtcgtagtatatanatcacatcgcataactcctatatgatantcatatatcatcagcgctgcgncgtggcatcgtcgtcgagtctcactactatctacgtacatatcactatnactcagtcacgagtgtgtcgaagatatgcacnatacgctgcgttagtttatagtctnancatnnacaccacactnctcggctganattncatnacatatcactctcctactgcatatgtcagcagctactggctgagtcgatgtctgtggtcgttcncaccagtgctatcaggtantcgtctgatcacatactacttacntnnnctntcccnacatnnttnnaatnnntgccagaaagatnatcagcagacaactctcatcatcgtaagcaacacactngngaatgannntanntnnnnntnnatnnnnnnntacatagggtgtntgtagtgatcngngtatnatgnnngnggnntagtggtnagtattagngtgnnnggatggggagntangggtaaaatnanacagtaaaatataatnaatnagaactgagnnaaannnanaagnggagnngagngnnnnngnngaagnnganagngngggnngnnnnggnnggccccaacacacanaaccaacaa

SEQ ID NO: 2550 - DNA, 430 bp, Glycine max
  Probeset Number=SeqID_12329
atgcggaacaagcctatagcacttcaggaaagtacaatgcttttggtccagcacttctcacatatgaaattaaatacctgccatctgctcctcaaattccttagacggcactggttaagctgtctatcttaccattggagggaactgcgttatgaagatgggagcaggggaacataagtgcgtgtcaccgacttagatctaggagactcgctgaccaggtcatgtgagctattgagttggccagttgagtgagaaaagttgtaggttctctctagtgttatgtatctggaagactgcctgtgtacttggggtcgaaggtgatttaaactgtgtgttagatggtaccttggtaacttgtcctgttgtatgttgtgtctagaagtcattgcacagctgtggatgtttatggtactatgttgttgtctcaaaa

SEQ ID NO: 2551 - DNA, 1690 bp, Glycine max
  misc_feature (48)..(48): n is a, c, g, or t
  misc_feature (67)..(67): n is a, c, g, or t
  misc_feature (74)..(74): n is a, c, g, or t
  misc_feature (120)..(120): n is a, c, g, or t
  misc_feature (126)..(126): n is a, c, g, or t
  misc_feature (174)..(174): n is a, c, g, or t
  misc_feature (217)..(217): n is a, c, g, or t
  misc_feature (291)..(291): n is a, c, g, or t
  misc_feature (307)..(307): n is a, c, g, or t
  misc_feature (335)..(335): n is a, c, g, or t
  misc_feature (357)..(357): n is a, c, g, or t
  misc_feature (454)..(454): n is a, c, g, or t
  misc_feature (599)..(599): n is a, c, g, or t
  misc_feature (601)..(602): n is a, c, g, or t
  misc_feature (614)..(614): n is a, c, g, or t
  misc_feature (971)..(971): n is a, c, g, or t
  misc_feature (991)..(992): n is a, c, g, or t
  misc_feature (1023)..(1024): n is a, c, g, or t
  misc_feature (1029)..(1030): n is a, c, g, or t
  misc_feature (1032)..(1032): n is a, c, g, or t
  misc_feature (1060)..(1060): n is a, c, g, or t
  misc_feature (1098)..(1098): n is a, c, g, or t
  misc_feature (1100)..(1100): n is a, c, g, or t
  misc_feature (1116)..(1116): n is a, c, g, or t
  misc_feature (1176)..(1176): n is a, c, g, or t
  misc_feature (1262)..(1262): n is a, c, g, or t
  misc_feature (1316)..(1316): n is a, c, g, or t
  misc_feature (1318)..(1318): n is a, c, g, or t
  misc_feature (1358)..(1358): n is a, c, g, or t
  misc_feature (1371)..(1371): n is a, c, g, or t
  misc_feature (1416)..(1416): n is a, c, g, or t
  misc_feature (1452)..(1452): n is a, c, g, or t
  misc_feature (1544)..(1544): n is a, c, g, or t
  misc_feature (1570)..(1571): n is a, c, g, or t
  misc_feature (1596)..(1596): n is a, c, g, or t
  misc_feature (1613)..(1616): n is a, c, g, or t
  misc_feature (1619)..(1619): n is a, c, g, or t
  misc_feature (1621)..(1622): n is a, c, g, or t
  misc_feature (1626)..(1626): n is a, c, g, or t
  misc_feature (1629)..(1629): n is a, c, g, or t
  misc_feature (1653)..(1653): n is a, c, g, or t
  misc_feature (1657)..(1661): n is a, c, g, or t
  misc_feature (1663)..(1663): n is a, c, g, or t
  misc_feature (1665)..(1665): n is a, c, g, or t
  Peptide Sequence Number=SeqID_6214
  Probeset Number=SeqID_12330
ggtgtgatgatgcatagctcacgcgtggctgggagttgtagagtgtgnagtagagtgtggttgtcgngccaccncgagtcttcagtgtgtgtttggtctgtgtgtctagcacacatagcnacatgntgggtgcgatgtgcagtggcaggcgtgcgagatgtgtcatatactcanatgatgagtatgtacgcgtgcagcgtgatatctgcgccacgcntccacagtgtgacagatggtgcgcgcgcgtaactctgtctgttgttatcgtcgatgctattgtgtcattctcanatgtattttctgtgtntgggatgagtgtggtagcgcacagttgnttcttgtcgagtgggcttctgncgccggtgtgtatatatagttcaacgcacttctcgctctattctctgactggtccgacctcagcatagtggtgggtggtggtgagtgagtcacgccnggctcttacatgcgtaccgagggcgcacccagcatatgctcgcgtgactctccatatatccattccatctcatcacagcacgcgagcgcaccgcgcgagtggacggcgtcggcgcactgagttagtgtactcagcagagagagangnnaacgtatctgcncggcgctacagtggccgtctgtgacggtgcgtgctctggtgcgtggctgcgcgtggtgtggtgtcggtgtcccgtctatattgcgcgtgttatcacccctctttgatgtcgtggcgggcgtcgttttgttggtgaggcgccgtgttgttcattcgtcttctaacacaatctttagtcgctatagataatctgatagttgggggttgccgggtcgtccgatcttccgtgtgtgtctttttatctgtgctatatgtccgtggtctcataggtccgcgcgctcacacgctctaactgcgatagatcttgcaaatacatatgcggtcgcacatggcatgtgtttgtgtatgccgccatatngctgtctccacctcttcccnncccatatcccaccggcctatgtagatataanntatanncnaaacactcgaaacccatgatatcctccnattctctgtcgccgcgctgcgtgctgtgtgcggcttcntntccgcccgcgatacantatctctttcgcgccttcgcttgttatccttcatctcacacgacgcgccggacttcatgnaccggtagtccggcgctccgacctcatcgaccgccactctcgtcgcggcggacgtgagcgagacactcacctctccagccgctgtnttctagctctcgctgctgtggggtgaggcgcgcagcgtccaacagcgcacactnanccaagcggccgacacacgcgcgccgccagaataaggcagnacacatcaaccanccacgatgagcgtgcggagtgtagcgctcgtgacagtgggcgagntcgcgataggcgccgagttttgtggcgattggtgcnggctatccctctccggctgacctagggcaagcgcacgagagcgaggggggtggcgggtgctgtctatcctttatgtccttctccttatgctntgggaggggggggcgccgctacaccnncccgaagcactcaggtggcagaaanaaaggtagttgaggagnnnncancnncccnccncagtagaacacgccgcgcacgggnagannnnngngngagaaggaccccgaaaaaaaacccc

SEQ ID NO: 2552 - DNA, 1527 bp, Glycine max
  misc_feature (31)..(31): n is a, c, g, or t
  misc_feature (70)..(70): n is a, c, g, or t
  misc_feature (109)..(110): n is a, c, g, or t
  misc_feature (128)..(128): n is a, c, g, or t
  misc_feature (130)..(130): n is a, c, g, or t
  misc_feature (706)..(706): n is a, c, g, or t
  misc_feature (1037)..(1037): n is a, c, g, or t
  misc_feature (1079)..(1079): n is a, c, g, or t
  misc_feature (1189)..(1189): n is a, c, g, or t
  misc_feature (1267)..(1267): n is a, c, g, or t
  misc_feature (1440)..(1440): n is a, c, g, or t
  misc_feature (1514)..(1514): n is a, c, g, or t
  Probeset Number=SeqID_12331
aaataaaatatattaagaaaggaagaggagnacaacgagaaagcgaaaaaaacaaaacaattcaaaagtnttaaaaccagcactgagcctatgtaaacccttttatatnnttcctctccatctctccnanaccaccgacacatccgacccatacactcacgaagtaatagttaataagattatttttaattataatacgtaacgcgcggcgcgcgagagagtatgtggaggacggcgtagccacagagaagaagagagttatgtttaattttatcttaccccactagacagagagtcccgatggccaccacatagaagtactagatgatgatacatataaaaatgacaacaaccacacaaatatcataaacatatgtataccattatatacaatatatgcttgtataatacccaataaacggggataaagatacaatccacgaggaacgcacagagaatacaagctgttagaatcaagcataaacacgcacgctactccatatatctacacaataacaatacctctttgatatactgacacactactaattaatatatgccacaattatatagtgaaatgaaaacatgaacggaccgcaggcgcgcgtggtagtgtggatgtgctcttttgactttattacctctgaactgcactacttcactaacctcaaagcacatgcgactcgaaaggcgctacgcatccgcncgcggacatacaagacatgtgcatgtgctggatgtgagaggatggtgcgtcgcgtacactcacgatatgacagcatagcgtgataatctctgataatgatatcaatattgtgtaacgttgtgacacgcgcacactcacatcatactcactatcattcgtaatatatgttcgactcttgcgctgcttacacaagactagaaacgaatgaagtgtagaactacactaggcggtgacaatagtgcataggaatatacggtgcaggcacttacgagtcttctgcgatgtggtgttgtagcacacacacaccgcgcagcggatcccctcatcattncgcgagctgatcacgatgataagatagtaactagccgcgcancgtctgactctacctagcgcatgagctacatcgcaggatggacacgcgcagagctgactcaccactaggatgtactccccaccgttggcagtgcacgcactacacagcancagagctggttactggacgtccataaatgtacagtgtacttgtcgaggcggtcgtgcgtggctctctcggcacgtgtngagcaggcgaggcgcgagcgccagtgcgtgtgagaactatgacggaagcgactagagagatcgagatccggtcgagatgaatgcacacggagtaggttccgctcacgtggagtgtcgggtgcacggactcagcggcactggtgactatcggctctcgacagcacagctgcganctgtgagcccctttgcgagcgctgaggtggccgtgaggctagcgcacatgcggagactggtgtgtaagcgagcncacgtccacccgc

SEQ ID NO: 2553 - DNA, 734 bp, Glycine max
  misc_feature (433)..(433): n is a, c, g, or t
  misc_feature (444)..(444): n is a, c, g, or t
  misc_feature (537)..(537): n is a, c, g, or t
  misc_feature (580)..(580): n is a, c, g, or t
  misc_feature (582)..(583): n is a, c, g, or t
  misc_feature (600)..(600): n is a, c, g, or t
  misc_feature (604)..(604): n is a, c, g, or t
  misc_feature (614)..(615): n is a, c, g, or t
  misc_feature (641)..(641): n is a, c, g, or t
  misc_feature (646)..(646): n is a, c, g, or t
  misc_feature (651)..(651): n is a, c, g, or t
  misc_feature (657)..(657): n is a, c, g, or t
  misc_feature (661)..(661): n is a, c, g, or t
  misc_feature (670)..(670): n is a, c, g, or t
  misc_feature (683)..(683): n is a, c, g, or t
  misc_feature (693)..(693): n is a, c, g, or t
  misc_feature (710)..(710): n is a, c, g, or t
  misc_feature (717)..(717): n is a, c, g, or t
  misc_feature (724)..(724): n is a, c, g, or t
  misc_feature (731)..(734): n is a, c, g, or t
  Peptide Sequence Number=SeqID_6215
  Probeset Number=SeqID_12332
atttgagacctttctttcacagaacacaagaatttatggaaatatcaggaatgcacactcaagtaaagattttggaaggccaacttcatttggtaattcatatttatatggttcttttgaagaagtcatggacgtcgtctttaggtaattcagcatattagatgaaataatctgctgaattacctaatgattgcttttatatctttgtaaacttgctaccactaattgttaaatgcttttatctttgaaggtcactgaagatggattaggcattggagcaacagtgcttgttgcgtttgtattcattcaataatgtgaatatagtaccattgttaaaattatacattctgcattttcgtataatcatataaattagaaaggaaaattttcctgcattttaatctctggataaagaaaattacattcagtgtgnacttaggatcntgaatgacattagggaatcaagtatcctccctccattttttccgtggggctgttctataacacattccaaaagggattttaagcatctagaangggggcctccttggctgcctttccggaggtggcttcctctcgntnngcgcctgttggcctttntgcntcgaaattcnngctttaaacccctttgggtatcgttnacggncaggngctcgnagcnctttgggcncttggccctcttnggggaacttngtgccccccgctgaganaaagagntgggtcnttccttnnnn

SEQ ID NO: 2554 - DNA, 2430 bp, Glycine max
  misc_feature (1)..(103): n is a, c, g, or t
  misc_feature (2014)..(2014): n is a, c, g, or t
  misc_feature (2430)..(2430): n is a, c, g, or t
  Probeset Number=SeqID_12333
nnnnnnnnnnnnnnnnnnnnnnnnnnnnnnnnnnnnnnnnnnnnnnnnnnnnnnnnnnnnnnnnnnnnnnnnnnnnnnnnnnnnnnnnnnnnnnnnnnnnnnnctcaaactcactcacatccatctaacttcaacttcctcatcctcacaactcacaatcctccttccttttcctttactttttcttacatacattcatgccaaaggaggtaagtgattgggttttaagctgttaaaatagcaaggaaggtgcaaaatggcttcagttggtgtggcaccaacatcatcaggcttgagagaatccagtggtgttgataggttgccagaggagatgaatgatatgagaattagggatgataaagaaatggaagccaccgttgtcgatggtaacggaacagagaccggacatattattgttactaccattgggggtagaaatggtcaaccgaagcagactataagctatatggcagagcggattgttggacatggatcatttggggttgtcttccaggctaaatgcttggagactggtgaaaactgtggctatcaaaaaagttcttcaagacaagaggtataaaaaccgggagctgcaaacaatgcgccttcttgaccacccaaatgttgtctgtttgaagcattgtttcttttcaaccaccgaaaaggatgaactataccttaatttggtactggagtatgttcccgaaacagttaatcgtgtgatcaaacattataacaagttgaaccaacggatgcctctgatatatgtaaaactctatacataccagatctttagggcactctcttatattcatcgttgcattggagtctgccatcgggatatcaagcctcaaaatctattagttaatccacatactcaccaggtcaaaatatgcgactttggaagtgcaaaagtcttggtaaaaggcgaaccaaatatatcgtacatatgctctagatattatagagcacctgagcttatatttggagcaactgaatatactacagctattgacgtttggtcagttggttgtgtattggctgagcttatgcttggacagcccttgttccccggtgagagtggagttgatcagcttgttgagatcatcaaggttctgggaactccaacaagggaagagataaagtgcatgaatcctaactatacagaatttaaattcccacagattaaagcacatccatggcacaagatctttcacaagcgcatgcctccagaagctgttgatttagtatcaagactactacaatactcccctaacttgcggtgcacagctttagatgccttgacccatcctttctttgatgaacttcgtgacccaaacactcgcttgccaaatggtcgtttccttccaccattgttcaattttaaatctcatgaattgaagggagtcccagttgagattttgctgaaattgattccagaacatgcaaggaagcagtgcccgtttcttggcttgtgatattgtgaaaaatgtaacaaaactgcaatagtgtcgttcccatatgaatgttccgttatgtatccttcttgtatttcggtgcctagtaaaaactgatttagagatatatggttactcaatattacccaacactcgatgggtattcagaaaaaagccgtgtttcctgtttaacagaaggttgtaaacatcgaatagaagacaagtgtcatgttaaaccggtgttggtgtttgtgaatacaatgatgggtggttggctaatttagttttgctctgcattggaaactcaattgtctttgtggctaatctttagcgaaataacgagacatagtcaacgagagtgcagtttgccagtctgtataaaacataaaacacaaaaagttcgtcgtaatttggcagccgcccgaaaatttgttttgccttaaaaaaaaaaaaaaaaaaaaaaaaaaaaaaaaaaaaaaaaaaaaaaaaaaggaagaaaaatgggaagcccaacaagttggttggaatgggccaaaccgggaaccgggaagaacagngaccattatcattttggtgaactaaccaatttgggggggtaagaaaaatgggtcaagccccaaagccaagaatattaaagccacaatggcaaaacgtgttgtagggccaaggaatcaattggaagttgtccttccaagcctaaagtgccttggaaaaccggtgaaaactgtggctatcaaaaaaaggttcttcaagataagaagtacaagaacccgggagctgcaaaaatgccccttcttgaaccacccaaatgttgtcgctttgaagcactgtttcttttcaaccactgaaaaggatgaactatacctcaatttggtacttgaatatgttcctgaaacagttaatcgtgtgatcaaacattacaacaagttaaaccaaaggatgccgctgatatatgtgaaactctatacatacn

SEQ ID NO: 2555 - DNA, 874 bp, Glycine max
  Peptide Sequence Number=SeqID_6216
  Probeset Number=SeqID_12334
gcaagcaaccgacccaccagctcgccgccaacctgcgccgtctgttctccggaatcgtcaccggcaacgtgaaggaatacggcatcaaggccatcgaaaagcacggcccgtacgagattgcgggcgacccggaaatcatgaaattgctcgacgatctgctcgcggcttttgtcgcgcagcgccgtatgaaactgccgggaacgacctacaagcctgtgtatagactggttgcctgaggcccaagcgcagccagcaaaaaccacgctttttgctggcgtaaaagtacccgggctccgcgcggccagtgccgcgcctccctgtcaaaaaatcgacgttacacataacgtcgcgcacaattctcacgtgtctgcattattgcgttagccatatcgcagcgtccgctcgctgcgacatgcgtgtgaaccagtacctccatagtttctgcccacaacgtactctcactctcaatcatttagggagcgcgtatgagcagttcagacaggggcagaagtgacataccgggcctgcgtccggatctcactccctctgccaaatctccaggtcccgcggatgccgccgacccgtatgcaaattggctcgatcggatgcagaaggcgcgtgcgcgccatgccgccatcaccaagaatttgtacacgtggtccaactacaagaattgggcggaccgcatgaaagactcgtttgaggaggagccggccgccaagccggaacccggccacggcgcctccagggcgcccggattcaagcgctgagctgacaccggctcaggagccgcggcgatccgcttcaggccccaagctgacgcggactcacgccccaacaatcgcaggtgtcggcggcccatgcgccgactccc

SEQ ID NO: 2556 - DNA, 609 bp, Glycine max
  misc_feature (35)..(35): n is a, c, g, or t
  misc_feature (609)..(609): n is a, c, g, or t
  Peptide Sequence Number=SeqID_6217
  Probeset Number=SeqID_12335
acatatagtgagccgatatacgccgaacgaggtcnacggtatcgataagcttttttttttttttttttatggaatgatatatatgctcatacaacaaatggtgaaaaatactacatgcgaatgctacttaacgcccgcaaaggatgcatgtctttcaaaaggaaccgtaaatggagttgtccacacttcatacaaatctgcttgcgaagcactatgatatcaacgacagagtggattgagtgcataaatggggcatcagactgggtgattggctaccagctaaaacaactgttcacaactcttatgccattgaagtcacaagcccaaaaatattgtgggggacatgctcaaaagttctaagcgaacacatggagtataggcagagaaggctcttgaactatcctacactttgactaacagatacacagaagcaaggatacgccttggtgaaagtagataagctcatgagacaagctggaaagacatttaaggaataccccggaatacaacattcggattcttcacagataaagtaacttggaaacagactactcaatgaagagataacatcattccaggatctttggcaatatgaactctgaacaactn

SEQ ID NO: 2557 - DNA, 644 bp, Glycine max
  misc_feature (1)..(1): n is a, c, g, or t
  Peptide Sequence Number=SeqID_6218
  Probeset Number=SeqID_12336
nttccaatattgggtttcatattggcttcacaatcaagcgaccagatttgggggacggccaagcgtcgggctatttcttattaccgaggcgcataaaagggcattactcaaagagcttagtagggtacatcagggtttgccagtcgtcggaatgaagatatcgcgcaagaggtctgatagactcggcttagcgaggattatggtcacagcatccagcgtgacgatgttgagtatgccgatgagccccatgatagggattcaatgagtcctagaagcgatatttaactttacagtgtatcctatcgcattgatatacattgatgagagctagggcaatgcccttgagcgattgatcttagtcatgactatatacaatgcgtcgattgtcagccatctgaatctgtcaggtacaggtcatgctgtagatcagtatcagtgtctgtgagccaaatgtatcgaattgttggagccataaacagctagtgacagttagttatctttgggtggagggatccgatgcttatcatgagaaagaaaagtgtggagataagggcatggtggtaacatggtcagtacaatttaaggagaagtttcatgatttggttggtggatatcagagccgatgtggatggaacatcacttct

SEQ ID NO: 2558 - DNA, 833 bp, Glycine max
  misc_feature (831)..(833): n is a, c, g, or t
  Peptide Sequence Number=SeqID_6219
  Probeset Number=SeqID_12337
atagagcactcagagagtaagagcatactgtcactccattagagggcagcaaggaggtcagcttcggttctttggcagaggaagaagagaggagaaatgggaggaattctcatgcagcatcaccaaatctctctcagtcctctgcgaaaaacggccttccccggatcatttgctctccaaagagatattgctctccatcgcgttccacggcggggttctctgccgtgctcatcttccctgacggtcagagcagaagccaacgggtcctccacttcaagaattgcggtcaagaagcacagcaaagaagagctcatagagttcttcggggccatccaggccgccattgccagggactctcccaagccgcccgggaggacgaggaagccgtcgtcgccggctggcacgttcgaagaagccggcacgaagatgaaaccacacgagggactggggcaagatgggcagccaaatttcgagggcatgacggtgcccgagctgagggacttggcgagggtgagggggatgagaggttactccaagctgaagaaaggggagctgattgatcgtctgaggggtgcttgatcgtctgataattaacaaggcttcctctccgaaacaggaacaggcagacgccagtgctgcctgtttgaccgaattgatgcggcttataatcgacttttcgtctgttgtttcctttgttaggaatcttcgaaagaggaagaagctctgcagttcgattgaagttatgtaggagtataatgttggttaatcagcggatgttgtctttggaggccgagctccatggagctcggttttgaaaattttgaattttgnnn

SEQ ID NO: 2559 - DNA, 428 bp, Glycine max
  Probeset Number=SeqID_12338
gcacgaggagaaaatgcaaagatcatacggggttgagggttgaggcacaaatagtagctaaagtttatttggctttggagaacaacctgaaaattatccttggtattgatgatatttgatattgggttatggagagggttgaagagcccaaggttaaagggacaagacgtttgaagtgttcatgggatttcagtaagactaggaaataaatatttgtagtcactagatgttatgacacatatgtccaccaccaaagaagtggctagttatcaaatgcacaccaaaagtttcagggattcttggggcataacaacgacaaatttattttgttttttcattttcttttagatgtagccattgacatttgtaatttttttctttcaaatgtaagcctattattacttttgtgtaaaaaaaaaaaaaaaaat

SEQ ID NO: 2560 - DNA, 448 bp, Glycine max
  misc_feature (377)..(377): n is a, c, g, or t
  misc_feature (390)..(390): n is a, c, g, or t
  misc_feature (413)..(413): n is a, c, g, or t
  misc_feature (415)..(415): n is a, c, g, or t
  misc_feature (425)..(425): n is a, c, g, or t
  misc_feature (427)..(427): n is a, c, g, or t
  misc_feature (432)..(432): n is a, c, g, or t
  Peptide Sequence Number=SeqID_6220
  Probeset Number=SeqID_12339
acactgtcacacactccctcgctcctaaaattccagtcacgagtcacaagctcactggacacaagcgctggtgtggcgagagcacgaagcagaggcatggttgcccgcgccacggcaacgttcctccccgtcctctccctgctcctgctccgtgccggcgcggacgacgactcggcgtttgtgtacgccgggtgctcgcaggggcgctacgacgccgggacgcagtacgagtcgggcgtggactccgtgctcacatccctcgccaacagcgcgccctacgccccctacgccaacatcacttccccctcggctttacccccccgtggccggcctctaccagtgccggtccgacctcccggcctccgtctgcaccggancgtggggcgtgcnggccatgtcgcagtgcgtggggnanctcgacgccnangcgtnctccgactgcgtctcg

SEQ ID NO: 2561 - DNA, 672 bp, Glycine max
  Peptide Sequence Number=SeqID_6221
  Probeset Number=SeqID_12340
ccccccaccccagcccccagcccccccggtttcccccccccacagcccagcttccctaccacctcccatcaccacttccagactgccacctttaaccagcccaagtggtggccatgggtttgcaaactggggttttgcctccccccccggtggtggtggagcacgtcctactttgcctcaaagtcgccctgagaggagttggagcaacgcccccatctgatgatgatccccctaaaagtgctgagaaagtggaagatgcacctgctcaaaaaaagcaagtggaagatgaacccgttgaggaaaattgaagagctgtcaatttacttttggcccccgcagattgctcgataagagagttggacacgcaccctgcacctcgaaaccttattttttgtttcccattgaagttttgcccgtctttctctttttcatgttttattgtgagtgattaatactgaaacagttgagacccatttttggtagcagtgttggtagcttagttagtcgtttttatgaacatgtttgtctgctaaatagttgccgtaatcccccccaccccccaccacatcatttcaaaatctatataagtataatttccgtgatggaatttcgtttcaaagagatgttcattgttcaaacttcaaaaaaaaaaaaaaaaaagggccggccgct

SEQ ID NO: 2562 - DNA, 2135 bp, Glycine max
  misc_feature (1)..(4): n is a, c, g, or t
  misc_feature (23)..(24): n is a, c, g, or t
  misc_feature (26)..(26): n is a, c, g, or t
  misc_feature (35)..(36): n is a, c, g, or t
  misc_feature (43)..(43): n is a, c, g, or t
  misc_feature (84)..(85): n is a, c, g, or t
  misc_feature (107)..(108): n is a, c, g, or t
  misc_feature (135)..(137): n is a, c, g, or t
  misc_feature (168)..(168): n is a, c, g, or t
  misc_feature (189)..(189): n is a, c, g, or t
  misc_feature (232)..(234): n is a, c, g, or t
  misc_feature (237)..(237): n is a, c, g, or t
  misc_feature (250)..(251): n is a, c, g, or t
  misc_feature (253)..(253): n is a, c, g, or t
  misc_feature (270)..(270): n is a, c, g, or t
  misc_feature (277)..(277): n is a, c, g, or t
  misc_feature (283)..(284): n is a, c, g, or t
  misc_feature (286)..(287): n is a, c, g, or t
  misc_feature (292)..(292): n is a, c, g, or t
  misc_feature (294)..(297): n is a, c, g, or t
  misc_feature (300)..(301): n is a, c, g, or t
  misc_feature (304)..(306): n is a, c, g, or t
  misc_feature (340)..(340): n is a, c, g, or t
  misc_feature (357)..(357): n is a, c, g, or t
  misc_feature (360)..(360): n is a, c, g, or t
  misc_feature (390)..(390): n is a, c, g, or t
  misc_feature (409)..(409): n is a, c, g, or t
  misc_feature (415)..(415): n is a, c, g, or t
  misc_feature (447)..(447): n is a, c, g, or t
  misc_feature (462)..(462): n is a, c, g, or t
  misc_feature (484)..(484): n is a, c, g, or t
  misc_feature (522)..(522): n is a, c, g, or t
  misc_feature (533)..(533): n is a, c, g, or t
  misc_feature (535)..(536): n is a, c, g, or t
  misc_feature (538)..(539): n is a, c, g, or t
  misc_feature (578)..(579): n is a, c, g, or t
  misc_feature (582)..(583): n is a, c, g, or t
  misc_feature (646)..(649): n is a, c, g, or t
  misc_feature (652)..(655): n is a, c, g, or t
  misc_feature (657)..(657): n is a, c, g, or t
  misc_feature (671)..(671): n is a, c, g, or t
  misc_feature (673)..(673): n is a, c, g, or t
  misc_feature (679)..(679): n is a, c, g, or t
  misc_feature (714)..(714): n is a, c, g, or t
  misc_feature (749)..(749): n is a, c, g, or t
  misc_feature (751)..(751): n is a, c, g, or t
  misc_feature (761)..(762): n is a, c, g, or t
  misc_feature (764)..(764): n is a, c, g, or t
  misc_feature (767)..(768): n is a, c, g, or t
  misc_feature (782)..(782): n is a, c, g, or t
  misc_feature (785)..(785): n is a, c, g, or t
  misc_feature (809)..(809): n is a, c, g, or t
  misc_feature (816)..(817): n is a, c, g, or t
  misc_feature (820)..(820): n is a, c, g, or t
  misc_feature (822)..(822): n is a, c, g, or t
  misc_feature (830)..(830): n is a, c, g, or t
  misc_feature (833)..(833): n is a, c, g, or t
  misc_feature (839)..(839): n is a, c, g, or t
  misc_feature (847)..(848): n is a, c, g, or t
  misc_feature (865)..(865): n is a, c, g, or t
  misc_feature (1002)..(1003): n is a, c, g, or t
  misc_feature (1009)..(1010): n is a, c, g, or t
  misc_feature (1019)..(1019): n is a, c, g, or t
  misc_feature (1048)..(1048): n is a, c, g, or t
  misc_feature (1068)..(1068): n is a, c, g, or t
  misc_feature (1078)..(1078): n is a, c, g, or t
  misc_feature (1084)..(1084): n is a, c, g, or t
  misc_feature (1086)..(1086): n is a, c, g, or t
  misc_feature (1107)..(1107): n is a, c, g, or t
  misc_feature (1119)..(1119): n is a, c, g, or t
  misc_feature (1195)..(1196): n is a, c, g, or t
  misc_feature (1199)..(1199): n is a, c, g, or t
  misc_feature (1210)..(1211): n is a, c, g, or t
  misc_feature (1214)..(1214): n is a, c, g, or t
  misc_feature (1222)..(1222): n is a, c, g, or t
  misc_feature (1234)..(1234): n is a, c, g, or t
  misc_feature (1255)..(1255): n is a, c, g, or t
  misc_feature (1266)..(1266): n is a, c, g, or t
  misc_feature (1286)..(1286): n is a, c, g, or t
  misc_feature (1300)..(1300): n is a, c, g, or t
  misc_feature (1304)..(1304): n is a, c, g, or t
  misc_feature (1323)..(1323): n is a, c, g, or t
  misc_feature (1333)..(1333): n is a, c, g, or t
  misc_feature (1335)..(1335): n is a, c, g, or t
  misc_feature (1362)..(1362): n is a, c, g, or t
  misc_feature (1367)..(1367): n is a, c, g, or t
  misc_feature (1370)..(1370): n is a, c, g, or t
  misc_feature (1384)..(1384): n is a, c, g, or t
  misc_feature (1390)..(1390): n is a, c, g, or t
  misc_feature (1396)..(1396): n is a, c, g, or t
  misc_feature (1428)..(1428): n is a, c, g, or t
  misc_feature (1430)..(1430): n is a, c, g, or t
  misc_feature (1454)..(1454): n is a, c, g, or t
  misc_feature (1461)..(1461): n is a, c, g, or t
  misc_feature (1488)..(1488): n is a, c, g, or t
  misc_feature (1490)..(1490): n is a, c, g, or t
  misc_feature (1546)..(1546): n is a, c, g, or t
  misc_feature (1579)..(1579): n is a, c, g, or t
  misc_feature (1627)..(1627): n is a, c, g, or t
  misc_feature (1649)..(1649): n is a, c, g, or t
  misc_feature (1654)..(1655): n is a, c, g, or t
  misc_feature (1688)..(1688): n is a, c, g, or t
  misc_feature (1690)..(1690): n is a, c, g, or t
  misc_feature (1692)..(1692): n is a, c, g, or t
  misc_feature (1717)..(1717): n is a, c, g, or t
  misc_feature (1725)..(1725): n is a, c, g, or t
  misc_feature (1788)..(1789): n is a, c, g, or t
  misc_feature (1813)..(1813): n is a, c, g, or t
  misc_feature (1819)..(1819): n is a, c, g, or t
  misc_feature (1859)..(1859): n is a, c, g, or t
  misc_feature (1863)..(1863): n is a, c, g, or t
  misc_feature (1869)..(1869): n is a, c, g, or t
  misc_feature (1947)..(1947): n is a, c, g, or t
  misc_feature (1950)..(1950): n is a, c, g, or t
  misc_feature (1957)..(1957): n is a, c, g, or t
  misc_feature (2030)..(2030): n is a, c, g, or t
  misc_feature (2072)..(2073): n is a, c, g, or t
  misc_feature (2075)..(2075): n is a, c, g, or t
  misc_feature (2078)..(2078): n is a, c, g, or t
  misc_feature (2084)..(2085): n is a, c, g, or t
  misc_feature (2133)..(2133): n is a, c, g, or t
  misc_feature (2135)..(2135): n is a, c, g, or t
  Probeset Number=SeqID_12341
nnnnccgttcgccggcccgcgcnncnctcccgcgnnccccccncgcgctcccctccccgctctctttttgtttaaggtattaannaaatgggtagcgaacgcgaaannaaaaaaaaaagcgagagtaagataatnnntgaaacaaatactatcatacatataaactantaaaatatacaacactacatntattgtatttactctgccacacacacgatacttgcgtcgtcgnnngtnctttgcaatactnntngagagctgtgttctctncacaccnacctcnncnnccccncnnnngtnnttnnnagctcattgcggcgctgcgatcaggcctctctcnaccgcccaaagaaaacnaanaatacaccaattacgtctccgtctgatgtnccgcgtacattcgcgcgcncgtgcngctacgcgcgcgagagtgcgctggcgctgggngcgtgagttagggtntgcgcgtctctacatctttccntctatacgagtgattgtgtgagatatatgattctacangcatacgtgangnnannctggtgatgtgcgttggacgacgtcgactgccgcgtcgnncgnntctcgcgcacctgccgcgcgatcgagcgtaggtcgactgtgtctccgaacagacgcgcgtgtnnnngtnnnngntgtagcatctgtcngncagacntcacacgtaccccgcacgcttgcacgcgccgtctnctcgcacactccgagccaacgatcgagcgacacgncngacgagcggnngnggnntcgcgcgcgccggncgnattcactaagacgacgtcgcgtgncggtgcnncgngngtcgcgcnacnacacanaagaggannacgagcggacagctgangcgcactacacgtgctcatgcagacgcatattgagatggatgtcataaactcacgcagcgcgactacacaccgcccacagatgacacacgcctcgaccgcgacagtcgtatactacagatatactcctgacacgacnnacgtannacacacgcngacagcactgcgcgcatgtgtgatgagtntagtgactagacgctacacnatgcagctgnagtgancngtgcacacgaacagctacccntcacttacctantacacattattagatgtatgcggactcgctagtaactcacgtgcgtcgtagacacacacacgagcatacgcgcagnnggngatgacgacannggngtgtgagngagatacatatnccatctatccactatcatatnatgtccgtcantatacatcaatactcataantgcacatacgatcntaantaccgatgcacagacatantgtgggagangntgggcatgatcgtcagtagatgtagcntgagngangacacacacacacncaaccncgcgcntcatgtgactcacatctcaacgtactagacgnangtgtgacggtcggcagcgcgcggncgtcagnacgcacaacatacacgctgcaggagananacgtacagcaccgaacattgcacctacgcaacgatgacacgcgcgctcatcagcgngccgccacacacaatcgcgatcaggcatcctgnacacaccatacgcacgatcacgacgtgtgtcgtagctgagggatcaantatcacgtcagctactacaacngacgnngtgagagagacgtatacacgccgcgcacggcgncncnatctctacttctctcgacgagcgcngcgagcgncacatcgcggctcgctgcgcagacagtgtcttaccagacgcagatgacgcgcgcgggcggganncttacgctgcgtcgcagcgtcagntggcantacgtgcacacgcgctcatgccgagcttgatgcagaatanacangctacngcatggatcctcacgtagtcgtcagtcgtacgcgatcatactcacagacgatcgctactaacgacatcacgactcgcnatntacgganactatcacgcacagcgcacggtagctgacatgacgggcgcacacgaccgacaactctgctcacgcagcgactncactgctgcatgcaccacacatcgggacggtcgcgacgtcgnntngtntgcacnnacacacgtacacacggcgtcagtcagcgactcgtgcagtcgctgtgcntn

SEQ ID NO: 2563 - DNA, 1485 bp, Glycine max
  misc_feature (15)..(15): n is a, c, g, or t
  misc_feature (24)..(24): n is a, c, g, or t
  misc_feature (36)..(36): n is a, c, g, or t
  misc_feature (114)..(114): n is a, c, g, or t
  misc_feature (120)..(121): n is a, c, g, or t
  misc_feature (126)..(129): n is a, c, g, or t
  misc_feature (131)..(131): n is a, c, g, or t
  misc_feature (136)..(136): n is a, c, g, or t
  misc_feature (149)..(149): n is a, c, g, or t
  misc_feature (153)..(154): n is a, c, g, or t
  misc_feature (177)..(178): n is a, c, g, or t
  misc_feature (232)..(232): n is a, c, g, or t
  misc_feature (235)..(236): n is a, c, g, or t
  misc_feature (239)..(242): n is a, c, g, or t
  misc_feature (244)..(244): n is a, c, g, or t
  misc_feature (332)..(333): n is a, c, g, or t
  misc_feature (350)..(351): n is a, c, g, or t
  misc_feature (438)..(438): n is a, c, g, or t
  misc_feature (561)..(561): n is a, c, g, or t
  misc_feature (563)..(563): n is a, c, g, or t
  misc_feature (814)..(814): n is a, c, g, or t
  misc_feature (1238)..(1238): n is a, c, g, or t
  misc_feature (1240)..(1240): n is a, c, g, or t
  misc_feature (1407)..(1407): n is a, c, g, or t
  Peptide Sequence Number=SeqID_6222
  Probeset Number=SeqID_12342
tttttttttttcttntgttttttntttttttttttnttttgcccccgtgtgtttgtccgggttgcgcgggggcgcgcgcgctctctcttttctcgcgcttgtgttttgttcggnggtggnntgccnnnncngcgcnccggggcgagccnctcnncgttcttgtgtctgcggtgtggnnggcgcgtgagggggcgcgcgacggaggcgcgcgcccacgtctgcgcccgccgtntannaannnncncagccattggtatacacacacatataatacacacgcatcacccagacatactatggtatgatcctcatcgcactacctaaatacgatnnaatcttcgtcgtctgtnncgtttatcatcacaagagtaccacccaccaccttcgtcccagccgcgatgtgtcgcacggagccgaagccggacgacatgatagtgntagggcacacgacgggggcgaagacggcataggtggatcacgcatgaatgagagggtcgacggatcagaacgcgacgataaactgataccacgaccgcgccccaccacacaccaaatactcgnanttatatatatccgcaacaacacagtgagttatccgctcactctatcttttattattccgatcttgtgctttcactgtcatatatacgcttcgtagtgttaatcactcgatatatgcgtgaagcagcgctagttgacgcaaggacaccacctactaggatagcaacagagtcggattatatttgtgctgataagcgcgagttatatcaatttcagcgcgcgctactacttatgttaacgcacgacacaattnatacacccccatctgccatgcacctcagacacgaagagagtgagtatcactatggtagctagagtgtgtattgggtgtcggagacgaaagctacggctcagtgacgtacgttatagactcactctcatccttctctgttacttcgattgatcttgacgtcacccacatgtcataccatcattctcctacgacctagagtgtgtgtgggcgccgtgcgcgcgcgagcgtattctgtagcacgcgcgcgacacgcttatttctctttatgtatctgtcactctcattgttttccgccgccgacgagtggtatcgggtgacgttaatgcgatacatgagagcatacgcaacatagagtgtgcgggacagcgcatagagcaccctacctgacttgtatattaatacacagtgttgacagcaccgcgcnangccacacgccaccatagcacacccacgtcctctatgctctcacctccatcgcgcctctttagtgacaccgcacagcacgagcgagaagagactagattatgagattactcggattgactcgcagcgttagttcgcacgaccaacgcatagagtatagtacgcaatangaagcaatacaatataattctgtatgtctacgtccagcactactatctctacgctattcactagcatacgatctatag

SEQ ID NO: 2564 - DNA, 315 bp, Glycine max
  Probeset Number=SeqID_12343
aatcgacctgcaggtcaacttccagcatgcaaggtaaagagagctactaaatgactgattgattgtgcgcgccctcgttataaccatgatgtcgcaggcgtatataccactaccttggacgaaatcctaaacacaaaagatgggtgaacagtgatggccactgttggagcagcaaatgatgtcacgcaaaagcttgacctgacgtctgccgacgaccttcacagggagacttggtattacaccgaaaatatggccctgaccaagcgaatcttgatgaaagtgttgtgttctatgcatgtagttctgctggcttag

SEQ ID NO: 2565 - DNA, 662 bp, Glycine max
  Peptide Sequence Number=SeqID_6223
  Probeset Number=SeqID_12344
cggggatccccacaaaacctgtttcaaaaattttttttttaaaccaaagatcccctgtccagggtttaaaatttttgaaaaaccacaccggccttcccccttttgggagaatttcaggggccctcataaccctccgccagtaattttttttttccccgggagccccaccccgaaattgcaaggcccttttgggaggggttaggtcggagggatccaaccttgaaaccaccgttctttgttaatttttgtataaagggcccgggcgcgttgaccatgggtgccgggggggaacaccgagcttccatgtaaaagcttttagcgagcgaaccattcttcatgtttttatcgagccacaggcagtgtctgcccgcgcccctcccgtcgagtcccacaccggcaatctcggggacatacctgtgggtgatgtcgaggattcgcccctcctccgtacactcctcgccgcggagggaccagaacaccgtcgcggacgccgacgccgcggagggagcactcaccggtttccgtgccggggatggaaggatacgcggcggaggtgtcggcaacggcgacggagtgcgcgcaaattgcgcagaggaaggcgaagagtgatcgagagttcatggttgactgaggggggggggggaaacaccaagagtagctga

SEQ ID NO: 2566 - DNA, 238 bp, Glycine max
  Probeset Number=SeqID_12345
gtcttgctgcggtggtaactgtcgttacggaaactcctgcaggtgcggcaactgctgcggaggctgcacaatgtacccagacttgagctacactaaaacaaccagcaccgaggatctatgtaaatgtgaggggcaccctgttaaagctcaattcgaaggtgctgaaatgggtgtgcccgctgataaccatggctgcaaatgtggaccaaactgctgctgcaaaccctgcacttgcaag

SEQ ID NO: 2567 - DNA, 1928 bp, Glycine max
  misc_feature (53)..(53): n is a, c, g, or t
  misc_feature (221)..(221): n is a, c, g, or t
  misc_feature (673)..(673): n is a, c, g, or t
  misc_feature (977)..(977): n is a, c, g, or t
  misc_feature (1026)..(1026): n is a, c, g, or t
  misc_feature (1056)..(1056): n is a, c, g, or t
  misc_feature (1068)..(1068): n is a, c, g, or t
  misc_feature (1087)..(1087): n is a, c, g, or t
  misc_feature (1122)..(1122): n is a, c, g, or t
  misc_feature (1126)..(1126): n is a, c, g, or t
  misc_feature (1131)..(1131): n is a, c, g, or t
  misc_feature (1142)..(1142): n is a, c, g, or t
  misc_feature (1174)..(1174): n is a, c, g, or t
  misc_feature (1252)..(1252): n is a, c, g, or t
  misc_feature (1270)..(1270): n is a, c, g, or t
  misc_feature (1290)..(1290): n is a, c, g, or t
  misc_feature (1304)..(1304): n is a, c, g, or t
  misc_feature (1312)..(1312): n is a, c, g, or t
  misc_feature (1327)..(1327): n is a, c, g, or t
  misc_feature (1423)..(1423): n is a, c, g, or t
  misc_feature (1426)..(1426): n is a, c, g, or t
  misc_feature (1455)..(1455): n is a, c, g, or t
  misc_feature (1521)..(1521): n is a, c, g, or t
  misc_feature (1558)..(1558): n is a, c, g, or t
  misc_feature (1606)..(1606): n is a, c, g, or t
  misc_feature (1635)..(1635): n is a, c, g, or t
  misc_feature (1644)..(1645): n is a, c, g, or t
  misc_feature (1648)..(1648): n is a, c, g, or t
  misc_feature (1674)..(1674): n is a, c, g, or t
  misc_feature (1678)..(1678): n is a, c, g, or t
  misc_feature (1697)..(1697): n is a, c, g, or t
  misc_feature (1702)..(1702): n is a, c, g, or t
  misc_feature (1758)..(1759): n is a, c, g, or t
  misc_feature (1786)..(1786): n is a, c, g, or t
  misc_feature (1791)..(1791): n is a, c, g, or t
  misc_feature (1796)..(1796): n is a, c, g, or t
  misc_feature (1813)..(1813): n is a, c, g, or t
  misc_feature (1826)..(1826): n is a, c, g, or t
  misc_feature (1833)..(1833): n is a, c, g, or t
  misc_feature (1860)..(1860): n is a, c, g, or t
  misc_feature (1863)..(1863): n is a, c, g, or t
  misc_feature (1912)..(1912): n is a, c, g, or t
  misc_feature (1928)..(1928): n is a, c, g, or t
  Peptide Sequence Number=SeqID_6224
  Probeset Number=SeqID_12346
acaaagaaagaaaacgtcttctgtgctgggagctcaacatctcgaagctcagncggtacggtgaagatgtgagcgctggaggagggggcggtaggtgtgatgagatgcggagtagtaggtaagcaaatattcccgccatagacagctaatcatgtgaatagcgtgaagcattgtttttctcacgcaccagcatgagtatcgctctacatattgtaagacgntctattatcgctggcggtgagagaacgtgtcctaagagtggtgtatgtgtagttccgcccgatctatatgatatgtattgattatatcctcttgctctgcatacaacgttcacgatcgtctcggattgagtgaactgaatgcgatgtggatatgtcagctatacggaatccgaagcgcgggctgagctcggcatgctcgaagtagactctgaattggcagctcgatagagatactcaccaaattgataacatatctgttcgtccgatgaaatggacgacagtcgaggtcgagccccgagtgacacgcgacgcgtagatgagagtgtgcggggttggtgattgtgttgttgattatgatgtgctcggttagtagagatcgatagacgaactgcaacctagttgattgtggcacgtagattgtagacaatataagacagtgaactgcgacgtcncagcgagatgcgtgtaagtatgaatggagaatgatcgatatactaactcgcgtgcgagctcgtgtttgagcatgtacaggcacacgtggcgattatatatactcaggtatactaggatgtatctcgtactccgaccgactgcttgacgtgataaagcgttcacgctctaagttcacatttattcatatgatagatgaatgtcgtccgatcgtacgtcgtccgacgtactacgctgtcgcgtgcatagatgtgagcttcagagtctatgctcgagctgtgcgcatagtcagcacgaatgcgatgncagtcgacgcatacgatgtgtcgtcacgtaacgagtcgtgccacatcgngagcgagcgcacatacatagtattgcatantatgactgtgtnactgacacgaccgtatctncatatctcagtcgctgctatgaggtcgatatgtangacngcgantatcgagtcgncgaacagtgctcgagtatgacgccgactacantataccaatatcgacatcacgagagatatatccgatgcatcgcgtgagatagtatcacgtgcgcaccatagtgcgcancataccgatagtcggtgnctgcattagttgtcgtatgngcatgccgcatgtnactgtcgnactgtatctgcggcntgcatgcacatctagtgctactgcattcactcatgacatgtctagcactactgcacgcagacgtgatgtgtaatgcagaagacgacggtcgagcgnatnctactaaagtatacggtgaacataaggancgacgagtctcgatcacatgtatccgactgatgatcacgcacgactgctcgcattcgcttcatcanaaagatcgactagtcgacgacatgtagttagatgcgncatcagtacgcactgctagttgctctactactatgtttgactacactntgacacatggtcaattgatcactgcacanggagtttanntanctgagcatgagagcggcatatgatgntggnatgatatagcatgctcgcnagatncgtcgaaaatactctaattcatgatgtcgcatacgacgtagatcgctatagtgatnncgtacatacatggtcacgtcattattnacgtnacatngtactgatcgatgatgncgtgagtcatgantacgatntgtgacgcgatactgactgttgtaagnacntatgcgatcgatctcgtcatattgctcagttgatccagtcagtgatctntgatgaaactagaatn

SEQ ID NO: 2568 - DNA, 619 bp, Glycine max
  Probeset Number=SeqID_12347
atggaacagccgccgccatgtggaagcaaacgacaaatgtcttgtgatcttttattgtgaatacttttgcattctaagcactcctcatacgtcattcaatggcattggatccttgtgtagctctctatttmatcctacacatttaaatatcccgccgagtcaatacagaatgcaattcagagaaaaacccacatcaacgagcttattacacttttgtttgcacccaaaacttctaaaaaatatggtagcacgtcttctccaaaattaagccttttgttactcattttgtcatttgcatgtaatttgttaaatcacacttctaaatttgcatggcatgaacattgttagatggcacttctaaatgtaagattgtctacaacaagaaacgttatgaatgggtagaggatatttttaagtgggaacatacaattcggagtggtcttccaattgacttaaaagggtattttctccgtaccacgtaccttctcagcaatataacatagttagccaaacattattgkatagggktaataccaactacctcgttctataagatatggtcatgtggcgaaatagtaggcgaatgtaatttgttagggkgagtggagtacgtttggtt

SEQ ID NO: 2569 - DNA, 1704 bp, Glycine max
  misc_feature (13)..(13): n is a, c, g, or t
  misc_feature (17)..(17): n is a, c, g, or t
  misc_feature (19)..(20): n is a, c, g, or t
  misc_feature (33)..(33): n is a, c, g, or t
  misc_feature (78)..(78): n is a, c, g, or t
  misc_feature (80)..(80): n is a, c, g, or t
  misc_feature (90)..(93): n is a, c, g, or t
  misc_feature (96)..(97): n is a, c, g, or t
  misc_feature (99)..(99): n is a, c, g, or t
  misc_feature (667)..(667): n is a, c, g, or t
  misc_feature (905)..(905): n is a, c, g, or t
  misc_feature (936)..(936): n is a, c, g, or t
  misc_feature (955)..(955): n is a, c, g, or t
  misc_feature (968)..(968): n is a, c, g, or t
  misc_feature (978)..(978): n is a, c, g, or t
  misc_feature (1145)..(1145): n is a, c, g, or t
  misc_feature (1173)..(1173): n is a, c, g, or t
  misc_feature (1237)..(1237): n is a, c, g, or t
  misc_feature (1250)..(1250): n is a, c, g, or t
  misc_feature (1453)..(1453): n is a, c, g, or t
  misc_feature (1468)..(1468): n is a, c, g, or t
  misc_feature (1547)..(1547): n is a, c, g, or t
  misc_feature (1566)..(1566): n is a, c, g, or t
  misc_feature (1579)..(1579): n is a, c, g, or t
  misc_feature (1637)..(1637): n is a, c, g, or t
  misc_feature (1657)..(1657): n is a, c, g, or t
  misc_feature (1697)..(1697): n is a, c, g, or t
  misc_feature (1704)..(1704): n is a, c, g, or t
  Peptide Sequence Number=SeqID_6225
  Probeset Number=SeqID_12348
gtgggctgcctgncgcntnntcgctcgctctgnctgagcgccatttataataatatcgtcttactttctattgtctanantacccccttnnnnaannantttggctgccacacgccacacgaccacacgcgctccgaggccgagtggtgccgccccgatatgatcagaaacgtatcctgcgctccgctgtgagggggtagataggaagcgtggagcacctgacgatatgatataacagtagttgatattgtcttgaataccgtgccatcgtcccttctaacgctgttctactaccgccacgatgtttcttcgtgatattagctgtgatacagaagaggttttaggaaggacgtaggtgtataggttgaatcatattattagatagatttaaaataactagtgacgtggtgtgtcattcgcagctcacatattatccgccagtcgcgttatatatgcactacgattatatgcgtttactgttcttgtcttcgcggcgctcggtctctgtccgccgagcctcagtctcgagccgtatcgcgatcagcgtcgggcggtcgacgtctgttgctcagttgtagcgttactctatgctctacacatttattctctcttccgccgcgcgtcagtacgagtgtctgctgatctctctgctaacagaagggtgagnagcgacgcgcacatcttaatcggacgcacccacatcaactatatatgtgtttgtatgatataatagtggtgcgtggtgcgctcgtggcggagtgctatatagtagacgagtctcatgacacgttgcgaatacggatatgtcaacacacagatatccagcagcagagcatcgcctatgtagcgtgatttgggaggccgaaaatagagtagatgataagagagagtacgcctagagagancgagacgtcagacgcgcgtcactagtatagnagtcgattagatgatagcncgcatagataganacgtcgagangttactatatgaactcgtatgtagagtgagcgataagacgtttatgcgcgaccgatgtcgattagtgagcagcgcgatcttctgttataccgtctctaatgctatattgtattgtatcgctcactcgctatatgtacgccatgctacttcatacaaagcagcgacangtaccacgacgtagatatacgaacgcgncgactatattgcgagatgatcattgtaagtgcgcgctagatatgtgcatgatgtagatatcganagtacgcgcctgntgcggagagctgtccgtcgcgacgctctcgtattcgtggcgagacgacggctagtgtgtgcgatcagtacgcgctgagtagagtcgctcaagcgcgatagtcgcgtagatctgtctcggacggaggagtgtagctgtagatatcgctatgagggtcacgaaacgatcgaacgtatcgtgtagtattatacgttaatcagtctntcgcttcaggcgagntactgatatgcgatcgtgtgtcacgctgctaccggcgctgcgcgcgctgtcgtggtcggtgcaacaccagcagcgaganactatcgcgcactcatcgntgagatacgatanagtatcgatcgatctgtagatagacgtcagagccgacgaacgagatacactagtgatnatgatcgcgtgacgtctgantacgtcctagattgaaatacgattcgacatgatgcgcgtnatagtan

SEQ ID NO: 2570 - DNA, 743 bp, Glycine max
  Probeset Number=SeqID_12349
actccgtatccgtacctttcaactaccacctctagtagaaaattaaaataaaataaaatcatcaataacatgcacacggttatcaattatagcaagcctgcacaaaactaccaaaaaataattggaaaaaatacagttcgactgcgacgactggatttggggaaggttggtaacgaggcatatcatggattcatgtggcaatactactatatactagtatagttaaacgtttacctcaaaaacaaaatctatacatttacgtgcatcgtgtgtgtgtataactaagactgtagtaagaattttaaacaaaatagcttgtatatagctagattcgatcaccagtggaccgtctgaattctgatgatacctgtgaaacgctacgggtggctctcacacgttgacgtgcgcgaggattgcgcgtcatccaagtgtctccagcaaaatgaaagaactccatggacgagaaacggacgtgacaagaatggaggtgcgcggttgtgcaaggttacctacgtatacggtcacagaattttatggttcgccaactcaagacccaaggggcagggttcaccacacgtcaactatataaataataagaaaaaaaagaatgaaagagatgatcgtcgtttactgttatgtcgggagagatttctgatttcatgtggcagtcaatgcaactaatgttagtcatgatttgccacctctagggctccaaatatacattctttttagggcctgtttgg

SEQ ID NO: 2571 - DNA, 466 bp, Glycine max
  Peptide Sequence Number=SeqID_6226
  Probeset Number=SeqID_12350
aaaaaccatcatctttttcatcaataatggaggttatacaattgaagttgagattcatgatggtccaaccaatgtgataaaaaattggggctaccctccctttgtgggcgctatccataatgggcaaggcaaattttggcctcccaaggtacgtccaaaggattattttttttaagcaattgcaaaagcttttggcccccaaaaaaattccctatgttttataaaagtttttgtccccaaggatgccccccccaaaaaattgctggaatggggatctcgtgttgctgctgctaacagtggtccccctaatccccaaaaaaaaatcatttcctaattattggcctgttttgtgtattttgttgaaaaaagttccccccctggatttttccaagagaaaaccgcccaaaatgaaaaataagttgaaataaatgtttgcttttcccaatttggatcgggtctcgtgttt

SEQ ID NO: 2572 - DNA, 653 bp, Glycine max
  misc_feature (538)..(538): n is a, c, g, or t
  misc_feature (546)..(546): n is a, c, g, or t
  misc_feature (559)..(559): n is a, c, g, or t
  misc_feature (622)..(622): n is a, c, g, or t
  misc_feature (647)..(647): n is a, c, g, or t
  misc_feature (653)..(653): n is a, c, g, or t
  Peptide Sequence Number=SeqID_6227
  Probeset Number=SeqID_12351
gcacaaacatacaaatattgaacacaaataaacaagtaaatctgtaaatgttatgttactgattaagaaatcctagataatgatcaggactgtaacatttaagacttgccaaggctcaaagtttgcagtttcctttaagaaatcttcaaaatgcttttgcaagtccaggtttatgtagattcattggtgaagaaagcatatgaaaattgggatcaggttgtggattatgatggcaaatcactcgtgaatgctaaaattgcttctgaaaatgaacttcgggtggagtcaattgattatggtagtggtttagatcatcaactgcaactgccggcacttcccgtgtctgttccttctgagcagcaaatcaattcagggatgcctgttggaggtaagcattaccatttccttgaactctgatttgatggatgtctctccccaccccaccccatctctcttttcatttgggctgggtggtcagattcagttactttggggctcaaaatatgattgagtacagctttccgatgataatattganagaatganatttttctgcatnctggaatagaaatatctcagatagaaaaacaaaaaaaaacaattcttgatccgggggctcctntttagccgcccccccgggggactcncttttn

SEQ ID NO: 2573 - DNA, 1821 bp, Glycine max
  misc_feature (35)..(35): n is a, c, g, or t
  misc_feature (72)..(72): n is a, c, g, or t
  misc_feature (169)..(169): n is a, c, g, or t
  misc_feature (242)..(242): n is a, c, g, or t
  misc_feature (263)..(263): n is a, c, g, or t
  misc_feature (275)..(275): n is a, c, g, or t
  misc_feature (372)..(372): n is a, c, g, or t
  misc_feature (445)..(445): n is a, c, g, or t
  misc_feature (455)..(455): n is a, c, g, or t
  misc_feature (498)..(498): n is a, c, g, or t
  misc_feature (530)..(530): n is a, c, g, or t
  misc_feature (532)..(532): n is a, c, g, or t
  misc_feature (584)..(584): n is a, c, g, or t
  misc_feature (621)..(621): n is a, c, g, or t
  misc_feature (682)..(682): n is a, c, g, or t
  misc_feature (685)..(685): n is a, c, g, or t
  misc_feature (772)..(772): n is a, c, g, or t
  misc_feature (813)..(813): n is a, c, g, or t
  misc_feature (815)..(815): n is a, c, g, or t
  misc_feature (859)..(859): n is a, c, g, or t
  misc_feature (875)..(875): n is a, c, g, or t
  misc_feature (919)..(919): n is a, c, g, or t
  misc_feature (921)..(921): n is a, c, g, or t
  misc_feature (923)..(923): n is a, c, g, or t
  misc_feature (1021)..(1021): n is a, c, g, or t
  misc_feature (1097)..(1097): n is a, c, g, or t
  misc_feature (1110)..(1110): n is a, c, g, or t
  misc_feature (1128)..(1128): n is a, c, g, or t
  misc_feature (1172)..(1172): n is a, c, g, or t
  misc_feature (1250)..(1250): n is a, c, g, or t
  misc_feature (1456)..(1456): n is a, c, g, or t
  misc_feature (1528)..(1528): n is a, c, g, or t
  misc_feature (1606)..(1606): n is a, c, g, or t
  misc_feature (1624)..(1624): n is a, c, g, or t
  misc_feature (1648)..(1648): n is a, c, g, or t
  misc_feature (1657)..(1657): n is a, c, g, or t
  misc_feature (1680)..(1680): n is a, c, g, or t
  misc_feature (1802)..(1802): n is a, c, g, or t
  Peptide Sequence Number=SeqID_6228
  Probeset Number=SeqID_12352
ccgctgatatgactacgtagtacgccgcagagtantgtgttcgctggactcatgatgatagtcgggactcanttcatattcatatcgtctattttattagtcgcgttcgcaggatatatcgtgagacgcgtcgccgtgatcgagcatatgctgacgaggcacacgtagnatatatgtattgtcgttcggatctcggcgtgatgccgcgtatctgagactgtcatagctatcgcatcatcganatgctatagtgatgttattangtgtatacgcgntcgagtcgtgtcgcgcgcatgcgcgcagatatcatatatctaaacgagaccgcatcgtcgcgacctagcgcggagatacgcgcagatgatagtaatntctcacgtatacacgcatatagcacacatatacatgagacgccgtgacgtatgtgcgcgcgggagaactgaantatagagtanattatgtatgcgtcacgcagtgcgtgtctattgtcgttactgntcgcacgcggacgtgcgatagactgaccgacnantactacgctcgatcagacagtacgatcaggttgctgcgcgcgcatagtactnctcaatcgtattacaactacactcatcgttcacagantacatgatcgaaataggtcgatgagatacatagctgcgcgtattttaatacagtcaacgtnacncgccgcagtcatcacgatatcatgaccgcatatagcacgtatcgtcggtcgcgatcgcgcgttatgggagtcttgtacagcgcacgncgctgcgagtgatgattatacatatcagacataactacgantncatatacatatgctactctcgaatgatcacgacgtcgtccgcgntgtattctgtgttggntatatcacgtcgacatctcgatcgtatctatatcgctgtcgcangngntctatcgcactcgtccgcaacacgcgtatctcatacgatatcacgtcttatgctacgccgctcgatacagtattctcgccatctatcgcgtatgcgtnctttgtacgtagtgcgcgtatagatgcgcgtgtggatgtgatgatattgatattagatgtcagtatacgcgtaccngttctccgtaganatagcgtctacgaccaanacgcaccggcgacaacgattagtcgactaattacgatgtgctcngtcagtcgcggcacgatattgcgagccacatactcactatcataccccatatattattaccatcgccgtgttgcaacnaccgtggcgcagccgacatacgatcatcgcgatgtagtgcgatatatgtagtacatatacactgacgcacaatactgtatagaggcaggatcacggcgacataatatacacgtgtgcgttctaccgaacgcgtgccgtagcatcactcgccgctgcttattccgtcgcatcactcatgtctgtgatgtgttaggatcatagagacncacccagcgtcttgttatcacatgtctcgcccatcttcgcttagcctctatatctaacatcatgcggcgagngtgcgagcgtgttgcggtgcgcgagcgcatgcggttaaatatacagacgattatagtacgcgctaggcgcacgcgagngacgaatgagtgtgtatncgcgttatgcgcctattacggcancccagcgtngagatacacagaatataacacgnctacacggcctgcgctatgttgtctcgctcggcggcgcgacattggtctggaggcgtggcgcgtgcgccacaccccgcgctaatgctctctcgattgtctgtgcgcagtacatattatatgngttggtgtggcgctacata

SEQ ID NO: 2574 - DNA, 483 bp, Glycine max
  Probeset Number=SeqID_12353
ccacggacctaggggtttcctcccgccgccgccgcagccgccgccgacgccgccgccgcggctccgtcttcctctcccccccgacgataccggaacacggcaaagaagcgcagcaagcagcgccccacccccaaccagctccacaaccgccccatcaccacctgcagccccatccggaaccacaacaacagccggcgcaacgcgcacggcatgcactggcgccacgccgaggatgacgtccatggccgccgccgcgggccgcggcgtgggggcctagggtttctagcgttttgttctttttgttttctagacattgtagcgtgtgttacggagttaaggatgtgatttcactatttgtgtctgttattattattgtctagttatgggggtattgcttgtactccattttactctggttaccaaactgtgtaaatttaacaaactttataaaatgacacccttgttaaatgtgtcaaaaaaaaa

SEQ ID NO: 2575 - DNA, 726 bp, Glycine max
  misc_feature (117)..(117): n is a, c, g, or t
  misc_feature (147)..(147): n is a, c, g, or t
  misc_feature (151)..(151): n is a, c, g, or t
  misc_feature (162)..(164): n is a, c, g, or t
  misc_feature (601)..(726): n is a, c, g, or t
  Peptide Sequence Number=SeqID_6229
  Probeset Number=SeqID_12354
ggaattatggaatcatcatgaaagttgtgaactgagtccagtagagtctgatgaaagtcattctggtgagcaatttgataaaccagtattagcagaagacaaaggaaaaaaaggcangggggattttttttggggaggttttccacnaaancccccacgaannnaaacaaaaaaccatccctctgggggccggggggggcgccgtgtccctaaaattgaatatgagaaagaggttcgacaagagatgagatggatcaaagcaaaccaccataggggagtcaagggaacttggagataaacggattggtatagcaactgaatcttcacatactaggaatagaggagcacaaaactgaacaatgcattatgccccccctgccacagacagcaaacggtgcgccccaatgggatcccctcgaaacccctaggtaatatctggaattatgaaaccaggtgccggtttccagtcccaaaaaaccccccccaattggaccccccaaaggccccaaaatgttaagtgaagtggtttcccaaaaaaaggaagggttcttaaaaaaggtttttcccaagcttccctaaaaacaaattaccccgggccggnnnnnnnnnnnnnnnnnnnnnnnnnnnnnnnnnnnnnnnnnnnnnnnnnnnnnnnnnnnnnnnnnnnnnnnnnnnnnnnnnnnnnnnnnnnnnnnnnnnnnnnnnnnnnnnnnnnnnnnnnnnnnn

SEQ ID NO: 2576 - DNA, 1336 bp, Glycine max
  misc_feature (177)..(177): n is a, c, g, or t
  misc_feature (499)..(499): n is a, c, g, or t
  misc_feature (829)..(829): n is a, c, g, or t
  misc_feature (913)..(913): n is a, c, g, or t
  Probeset Number=SeqID_12355
cgtgctctgtcagagcagtctctctgtatttttcggtgcgtaaagtgagtatataaattataatgcgcgtagcgacgcgcaccgcgtgctcttactcataacttattgacggcgggcgcgcatagaatatgctcgtgcgacactagacagcgcaagcaacgcacgcgggcgtgacgnaagtgtcgtgtgcgcatataccagacacaagtcgccgtgtattattcaccctagccacgccgcgtccaccctcgttttagacccattttatttgttttattttgggcgggcgtggtatcggcgctaataacttacatttttacgccgcgagcgccgcataatattccgccgccgtaatattattaagatcatggcgccaccgataacggcgggtatgttatggtcgaggtgtcctcaacgtcacacgctctgttatgagtccattataaccacataactttttttaagacgcacgtacagcacagatagtacgtacagaggnggagctaaataatcagagatttagaaacccgtgcgcgggttgtgcggagataaaggtccggacgataaacatagtatgtgtgggggggcgagtatttttcgatatcgcccttatcatatttaatatctaccagactgtttcgactcaagatatgtgggggtcaatattatcgcgctgttattaacttctccacaccccacgaatattttaccgggggggcgcaccgatatttctataatgcgccatataattaaagcggggcgcctcaaaaagaatagttacgtattgtgcggttcattacattttttataggctgtgattattatatanaattcatgcgggcggcggtatgatcagggacgaaagatatcctcgagcgcggctgttaattcacatcttcgtgtttttctatgngcgccgcgggggagccaccccgtcccggtttttataaccggcggcatacacaaataaaaaaataaacgcgcggcgggatatatatgtattgagggcgtgggtatgtaaattttaaataaacagcgggatattaaggagcaacgtcggtgaatatataaaaatatagtgtggatataaaagtgttggggcggatgcatctggtgataacaatgaggtgggggggatggaggtatgtggcgtggtggcgagctcgtcgtaccgctttttttatactcactatgacgttccccggagctaatggttactactatggataatatttcgcccgtagtgttatgcacaacgaccgcaaaactccgacgggggagtacgcgccgagcatatcccgcagtagataacgacgggccgcgggtgggtggccac

SEQ ID NO: 2577 - DNA, 344 bp, Glycine max
  misc_feature (124)..(128): n is a, c, g, or t
  misc_feature (250)..(254): n is a, c, g, or t
  misc_feature (268)..(272): n is a, c, g, or t
  Peptide Sequence Number=SeqID_6230
  Probeset Number=SeqID_12356
ctgcagaacaactaagtaaatccttgttggatggttcagatgagaatcacggcatagaaaatagatcattttggaacttcttttggtatccatccaagcttggaaaagatcttctcacaacagnnnnntttggtcttgttcaatatgtaaagcagatgatcctgaagactgtttgtgcattgttagcatttatattggaattggctggtgtttatggtgatggggaattcaagtggtactacgggtatgnnnnncatacaaagtgcannnnncttttctgtgaaattgtacacactgattaatattaagcaaaggagtctttaactttgatcaacaataaacct

SEQ ID NO: 2578 - DNA, 1602 bp, Glycine max
  misc_feature (1)..(1): n is a, c, g, or t
  misc_feature (32)..(32): n is a, c, g, or t
  misc_feature (52)..(52): n is a, c, g, or t
  misc_feature (63)..(63): n is a, c, g, or t
  misc_feature (102)..(102): n is a, c, g, or t
  misc_feature (191)..(191): n is a, c, g, or t
  misc_feature (207)..(207): n is a, c, g, or t
  misc_feature (233)..(233): n is a, c, g, or t
  misc_feature (272)..(272): n is a, c, g, or t
  misc_feature (294)..(294): n is a, c, g, or t
  misc_feature (306)..(306): n is a, c, g, or t
  misc_feature (331)..(331): n is a, c, g, or t
  misc_feature (333)..(333): n is a, c, g, or t
  misc_feature (341)..(341): n is a, c, g, or t
  misc_feature (374)..(374): n is a, c, g, or t
  misc_feature (417)..(417): n is a, c, g, or t
  misc_feature (537)..(537): n is a, c, g, or t
  misc_feature (670)..(670): n is a, c, g, or t
  misc_feature (793)..(793): n is a, c, g, or t
  misc_feature (816)..(816): n is a, c, g, or t
  misc_feature (940)..(940): n is a, c, g, or t
  misc_feature (1164)..(1164): n is a, c, g, or t
  misc_feature (1238)..(1238): n is a, c, g, or t
  misc_feature (1395)..(1395): n is a, c, g, or t
  misc_feature (1591)..(1591): n is a, c, g, or t
  Peptide Sequence Number=SeqID_6231
  Probeset Number=SeqID_12357
ncgcgcgcatgtcgagtgtggctgacagtctnggatatactatgattatcgncgtgttcgcgncagtatactcccatcgatgcaccttgttaagagtgagcntagatgcgtctcgcgctgtgttatagatatgcgagtgtcgaggtagcacatataagagacagaatatacgtaggtatctgtcactcgcntgttatagctcaatcnacgacacgtgtagtagttctagatanacttgcgacgatatagcatatacatacagacgtcgagcncgatggagtaagatagacgcgncgtgatgtagcncttatatcatgtagtacatataccnancaccgcantctagtccgacgcacgagtaatgagagaagacnccgagtaatgtaagtctcgcatcatctcaggtatttattatgntcacgtggtttgcggcagcacatggactggataatatataacaattatatatacgcgacgtatacttatcgtgtagttgtatgtgcgtatattgatacaacttccgtcttatgtgtctgnataatggtcgtcggctgtcggcgacatgcgctgtactgcgtcgacgcgagatgttgccacggtaggcacagtaagcaaaaaaactgcgtgcgagtcgagcgctaaggcggtataagaccgatgatgtgagtantttgtcgtggagatggatacgtgcgtagatatgctccagcgccactcacacacccatcatatactctggatataaactcactactatttgctttcataattattatcacacttttcttcacanatattattccatatattattctnatcctcttcataaacagtatatccagagcatgctaatagtagagttctatatatacgaggtccgcgcggtgcgcgcggatagcgtgtatatatgtactgtacgctacctatggtccgtacatcnacccgatctctcttaacatacttcacaactttacacacatatcaatcacgcctcgcatagcacgtcgcgtgccctaccagcacgagtctagttaacacgagttctgagatatttgtcgttggcgacacaaaacagacgaatactacaattatctcattgatgtgtgtattcaatcggaggtcgagcgctcgcgcttgctgtccagccgcacgtcgctttacaantccaactgcacgagacacaacacatgattgtattaagtctgatgataagaacagagttcacgtatcactcaatnatagtacattgtctctaacagtcgcgctagctgacggctcctcgtcggggctgtataagtcttgaggagagaccttattcatgacgctgtgttattatgcggccagactatcgcgctgtgttgggggttgagaattgatatgtgcttgaatccagtnagagtactctccctctctgcagcgtcgcttgtgcgagtcataatcaatatccgtcgtcgtaggtatacttatactcgtctccgcacggccgagctgaggcagacgcatgtgtctttgataaataagtggaggaaactacgtgcggtttagatgtcgcgtgcatgtttagtgataagcggtgatgttatagctcatntaccacccctc

SEQ ID NO: 2579 - DNA, 1402 bp, Glycine max
  Probeset Number=SeqID_12358
ttaaaaattaacacgataaacaatctttcacaagtctttaacaccatcttactcaagccatgtttaccactgacgatttaatcagaactacccagagatttgatgaggtgctcgccaaaagagccaaacctcgtgacccaagcgacagcccagtggcttaccaaagcctcaatgttgttaaaagacttagcaaggccaagttccctgtctacttgacttcctctaaagtcaataaacaaaactatgccatgaagatcttctcacataaaggtgaccaacctcacccttatttcagaaatgaggttcgctttgcttccctcaagcatcctaatgttattgacattgwctactacgaaaacgaaaaagatactctctacaaaggcgagctcaagaaggtttcttacatcttgatggaatacgctccccatggtgacttctttgactttgtcacaaagcacagagaagaacttgatgagaaattggtcaraacctatttcagacarctcattaatggcatcgagtatcttcactcttgcagagtggctcatcttgacctcaagcctgagaacttgcttctaggagctgacttgaaccttaaaattgctgactttgatctctcacatgtttgtggagacagtaaaatcctcagcagaggcacaagatactatagagggcccgaatttttcaaaaacagctctggagatcctgaaatcaaatctcctttcccctctgatatctacagtgcaggcattatcctgttcattcttaaaagcggtggtatttacccacatgctgaaaacaacactctcgaaggaatcgaccttgttgacttgatgtacaatgataatgctgagttttggcgtaagcactgcgaaatccaagagaaaagtgagtctttctatgataaaagcttcagagacctgtttaatgctatggttaaattcaatcctgaagatagaatgaccatcaaggaagtcaaacagagtaaatggtacaatggacctgtttacaccccccttgaaatgcagaaaaagatgaagaagctcctcaagtgctaagtcttctctcttggtgaaatcaaattctctcaacttccttcgcataattacaaatttctttatcctttcctttcacttgtgaaaaacacacaagatttctttgtctataactcctttatctatgttctcaaactttactcttatattctctatctactcttctttattaatataaacatcattcatacattattaatttcgtacagtactgattattctgtagaatcatatataatactttcacacaattattcctgaatagatagacaatataaacctatattattagtatttgttatatacatacattattccctcaatattcaaactgctcttcagcattc

SEQ ID NO: 2580 - DNA, 557 bp, Glycine max
  misc_feature (1)..(1): n is a, c, g, or t
  misc_feature (247)..(247): n is a, c, g, or t
  misc_feature (431)..(431): n is a, c, g, or t
  Peptide Sequence Number=SeqID_6232
  Probeset Number=SeqID_12359
ngtgcaattaaacaacccaagtaatattatatttattataaaatggataggagaagacgttcaagcttggtcattgacaatggatctggaatgtgcaaggccggatttgctggagatgatgctccccgtgccgtgttcccctcaattgtcggacgcccccgtcacactggtgtgatggttggtatgggacaaaaggattcctatgttggtgatgaggctcaatccaagagaggtatcctcactctcntgtaccccattgagcacggaatcgtgaccaactgggatgatatggagaagatctggcatcacaccttctacaacgagctccgcgttgcccccgaggagcaccccgtcttgctcactgaggcccccttgaaccccaaggccaacagagagaagatgactcaaatcatgttcgagaccttcaacanccccgccatgtatgtggccatccaggctgtgttgtctctctatgcttccggacgtaccactggtattgtcatggattctggagatggtgtctcccacactgtgcccatctatgagggatatgctct

SEQ ID NO: 2581 - DNA, 570 bp, Glycine max
  Peptide Sequence Number=SeqID_6233
  Probeset Number=SeqID_12360
agagatagtgaacttaaagctaaaatggaatacattagatcatctattggtgacagaattggaaaggccaagaaacaccttaaccgagaacttaatgaaattaccactgaaatgaaacctgaaactgaaatgatcagcaagatgctcacaaaagttacccgaactcgacgagctaccattacaccaattaaaagacgtaatgttgatcttagttccgagatgacctacgaatggagaagctacgatcttgagaatggtagcatcgaagtgatcttccgaaatgttgaggctgaaaaggttcctctattcctctacaaattacttcttaaaaattcaatgattggattaatttaaattaggacttgaattatatatagcaacaaaacaaaaaaaactcaaccaaatttctcgaatttttctcttttaatttgctccaaatctttatctcgcgcccctttttccttaaaaaaatatccatatttttgttgattgtaacaaaagtggaactcatgtctaaaaaatgattgttatcctatcgaataaattataacatttcaagccaaaaaaaaa

SEQ ID NO: 2582 - DNA, 1606 bp, Glycine max
  misc_feature (14)..(14): n is a, c, g, or t
  misc_feature (16)..(18): n is a, c, g, or t
  misc_feature (26)..(26): n is a, c, g, or t
  misc_feature (31)..(31): n is a, c, g, or t
  misc_feature (36)..(36): n is a, c, g, or t
  misc_feature (76)..(76): n is a, c, g, or t
  misc_feature (80)..(81): n is a, c, g, or t
  misc_feature (95)..(95): n is a, c, g, or t
  misc_feature (157)..(157): n is a, c, g, or t
  misc_feature (224)..(224): n is a, c, g, or t
  misc_feature (359)..(359): n is a, c, g, or t
  misc_feature (876)..(876): n is a, c, g, or t
  misc_feature (1068)..(1068): n is a, c, g, or t
  misc_feature (1355)..(1355): n is a, c, g, or t
  misc_feature (1397)..(1397): n is a, c, g, or t
  misc_feature (1406)..(1406): n is a, c, g, or t
  misc_feature (1416)..(1416): n is a, c, g, or t
  misc_feature (1421)..(1421): n is a, c, g, or t
  misc_feature (1566)..(1566): n is a, c, g, or t
  Probeset Number=SeqID_12361
ttattttttttttntnnnatctttanaaatnatttnatttttttttactactctttatttttatatctatttctanacanncccgaagcggctgngcgacgctacgtctctcgtctctactctccggctcgaatgtgtggacctagcctgccgcgtnggccgcccgcgctgccgtgccacccgaggcccgcatatagaatcgattatataatttgtaccagacnaaacattgcataagggaaggaatgtatagagaagaaaagagagagacagacgagggtgaagtaaggggcgagggatatccacgtgttatactattcttctagttgacgaagatgagcccgttatgatagaagacntgacaggtataaggtatctcgccgccccctcgttcccacgccagcccgcccgagcccgcctgcggcacgggcgccgctgacacgcgggcgcgggccgggatcgggcgtggttgcgcgctcgctttgtctctgtctgatgtgtcgacaagtatatatagtaggacaatgtctaacgtacaagcacgcatcgcctctctcttctcacacccgctcactcttctctcctttctactcgctatgcctcttgacgagcacctcctcacccaccctctccctttgctacacgacacttcatcacgcacgacagcgcggcccgaggccactgcatttcagatatggagtaaggtctgcaaggtgcgtccgcgcctactcgctaagtggatagacacagaaagcacatgcatagctagggcataacccactacacgtgggtatattagatcaatttgcttgtacgaccctgcgaataaagcagtggcccgcctatgccgtgctacccacactcggtagcgccccngcccacacgggacgttgcggctccagactagcgccatcgccggactcacctctgagtgtgtgactgccgcgtggggcatgcgtgaggctatacatcgacgccccaactcgacatagcacacgagagcaccaccacctctgctcagagcgacagcgagtgaggcgggatgcgcgtgctaagcgagcggcaatngaagatatgatcgagctcgcgtcgcttctacgtccggcgctcatactagaggtgcttcgcctgcatgatctaatgcggcgacgtgcgtctcgcacgtgcgcgatgtcggtctgctcgctctgctcatctgagtcttgtacagatacgtgtgtatgacgtgagagcgtctatatatattcacgacgcgaggatccccctcgctcctcgtaccactcacctccttctctctactaatacatctacctatacgtccatccacacctccactctacactcgagtttttagntactactagtgttgagtgtgtgtacagcgcagcgccgatgcncatataccnatcttctccnttatntatctgcctgctccctgagcgtcgcggacagggcggcacgcgcggcccaaccgcttcttctcttctctacctctcgcaacactaaatatgtatatgatgaggcgatatgtgttactagtggggaacgttcagccgtctctcactntctcattccactccaccgcggcggcgtgtccaccacgcgc

SEQ ID NO: 2583 - DNA, 575 bp, Glycine max
  misc_feature (492)..(493): n is a, c, g, or t
  misc_feature (498)..(498): n is a, c, g, or t
  misc_feature (505)..(506): n is a, c, g, or t
  misc_feature (513)..(513): n is a, c, g, or t
  misc_feature (522)..(522): n is a, c, g, or t
  misc_feature (527)..(527): n is a, c, g, or t
  misc_feature (530)..(530): n is a, c, g, or t
  misc_feature (536)..(536): n is a, c, g, or t
  misc_feature (543)..(543): n is a, c, g, or t
  Peptide Sequence Number=SeqID_6234
  Probeset Number=SeqID_12362
agctggagctccaccgcggtggcggccgctctagaactagtggatcccccgggctgcaggaattcgcacgagaccattacctagaacatcctaatcgaaaaaatgtttgacaatcctattcgagtattcaagtatctttgaaggttttagttattggagataactaagatggctttcatgcaatattttgttttgttacttatcatttcagttgtttcagtcacaagtgaaatggttgcacaaaaaatatgtataaatgtggcgcaaccgagcaactgcggctttgacgtatgtaaactgctttgcaaagagttattcaaagacacattggtctccgccgaatgcattattaaaaatattcatggtccaaggggaactaaccaatgtacttgtttctatcgttgttaacctataattatattagtcttgtacacaaaattgtcagttaaattatataaataagatgcacttggttttttaacaaaacaaaanncaacnaaccccnnacccccntcccccacnctaanaanacacancacattnaaaaaaaccccccaaaaaaaaaaaaaaaggtt

SEQ ID NO: 2584 - DNA, 1398 bp, Glycine max
  misc_feature (43)..(43): n is a, c, g, or t
  misc_feature (74)..(74): n is a, c, g, or t
  misc_feature (79)..(79): n is a, c, g, or t
  misc_feature (81)..(81): n is a, c, g, or t
  misc_feature (142)..(142): n is a, c, g, or t
  misc_feature (469)..(469): n is a, c, g, or t
  misc_feature (471)..(472): n is a, c, g, or t
  misc_feature (1043)..(1043): n is a, c, g, or t
  misc_feature (1070)..(1070): n is a, c, g, or t
  misc_feature (1245)..(1245): n is a, c, g, or t
  misc_feature (1398)..(1398): n is a, c, g, or t
  Probeset Number=SeqID_12363
ggggtttttgtgccccgtcccgggggcccgccgcccacccccncccctgcgggtagggggtgggcggccacccnacaanantccaacatatctgggaaggaagcggagtacaagaacacaatctatacttgtaggggtcggncgcgcacccgcaggagacagtagcggagcgcggggcgctgggtgcctcctccccacacccccgactatagccgaacaacacaacacacaatgatataccaccagagaaagcaacacacacgacgggaggtgtagtattctcctacgcggaaccggccacgaggtgaagggtggagttcaaatggccgatggcggacggtggagaggcggagatacggagggataacagtagtataatgcatctcatatataagagggcaggaaaagcgaatgaggcgtgtgggtggcgctcgggtgaggcggaggggctacgtgtttggctagtgangnncaacctgctgtaattataggagagaaatgagtagtaatgaggaaatatgacggaacagtaagtatcagcgacgcgatggaggacatgaggtgagtgtggaggagttagatgatgaaaaaattagaaagaaggaagtagcgctgacgcaatattatatcagacagatgagcgtgtgtgttgagtaccatcatctgaattcagagaagagcagtaaggtagatgatggttgaggtgggagtgtggtggaatgccttgcaaacccccaccaccctcacacacatatttataatgttaattaatgcagcggatagatattttatagaaatcacacaccaaaccagtcagtcccttgagctgagcgcccaggcggagcagagcgcgatccgcgaccaatctgtgacacgacacgcagaggacgcgacggtgaggagagtgcgcgacgtcatagcagtgactcggctagacacagagatatgacggtctcttgacttataaaggactcttactctacgttgtgagaaaccgcgccagagcgtgtgtctgatacgtcgcctactcacctgccgtgtcnctgactgcgacacaggatgtggactgntatctagcagtggaaggggcgcgggtgaggtggtgttgtcagtagcgtatgaacttggtgatgtcgtgagcgatgtgacgtagagtgagtaatatgaattatacagtcgacatatgcctgggtcacctctccacgtgctgtgtgttcttgtacttcggtagagtgtgtatgtatnccacggtcaagtaaggtgtgtccagtgacaggtcacagtcggatgagtgctcagcgactagcgcgctgtgtactgaggtgtgtgatgcttgactgactattgactatatatcagttatctcatatgacatgtgtccgtgtgcaccaggaccan

SEQ ID NO: 2585 - DNA, 792 bp, Glycine max
  misc_feature (95)..(95): n is a, c, g, or t
  misc_feature (181)..(181): n is a, c, g, or t
  misc_feature (318)..(318): n is a, c, g, or t
  misc_feature (562)..(562): n is a, c, g, or t
  misc_feature (565)..(566): n is a, c, g, or t
  misc_feature (571)..(571): n is a, c, g, or t
  misc_feature (678)..(678): n is a, c, g, or t
  misc_feature (681)..(681): n is a, c, g, or t
  misc_feature (683)..(683): n is a, c, g, or t
  misc_feature (695)..(695): n is a, c, g, or t
  misc_feature (751)..(751): n is a, c, g, or t
  misc_feature (792)..(792): n is a, c, g, or t
  Peptide Sequence Number=SeqID_6235
  Probeset Number=SeqID_12364
gaatatgatgacaaccttgaaactaaatctgggtcagcacatgattgtgtctccccgggccactcgcacagtcgcattcgcaccaccctcctccnttaccgtatctctgactcaccaacatgcttctgctccttcttcctcctcttctctaattctacgtcataatggtacacgggtcagntcccattctcaaccattcccagaatccgatgaccaagttgaagaccttagggtccctgacaattggttagacccaaccatcgccttccaggaatcagagtggcttagggttactttacataaatggttggatgatgnagtactgtcctgaagaaaccaatgtggaaataagcagagttgctgcaactcattctacaattctctgctacagaagcaaacagacttgggtgagattctgttgaagatggcccgtgaattggagtctattaattataaagagagtttccatggggcattctcatcagcaaatgctgctattgacctcattgctcaacggatagaacagctctgccagtcaatttgaatttgattgctctaattngtnngtttnggttatagtacacaatcttgtttcacacttgacttcttcttagctttaatccccggaatattgtattgtaggccattctatggtttttttttttttttttttttaanggntngagtacttgggnggtccatttctcagcttcctgaaaatggcatgaatctcataaagcaatgtgttcangttatactctgaatttaattaagtgggtatgcatggaaaan

SEQ ID NO: 2586 - DNA, 518 bp, Glycine max
  Peptide Sequence Number=SeqID_6236
  Probeset Number=SeqID_12365
gagtgatcggtgttcacttgatccttcataagtcgtcatcatcatcatcatcatcaccgttgattgaagaagatgccgatcagaaacatcgccatcggaaggcctggagaaggttcttaccccgacccctttaaaggcgggggtgggctgagttcatctccacctgatctttctggtcggcgggtcaaggtgcgggatcggcttcacaagctcaccgacaacggcgccgccactcccgccgggcttattttcggtttcattggccatgcttttggcctctttgtgggcgggtttccgggggccaacatattcggggggcgcaggaacacccccgggaactttggcggctttttgggggggagaatatacattatttcgcgggatagtgtacgtaatctgccagctcctcgggtccatcgtggcctccctcctcctcgccttcgtcactgcctcccctgttccagcattcgggctttccgctggagtcggagttggcaacgctttggtgttggagatcg

SEQ ID NO: 2587 - DNA, 1572 bp, Glycine max
  misc_feature (1)..(1): n is a, c, g, or t
  misc_feature (34)..(34): n is a, c, g, or t
  misc_feature (57)..(57): n is a, c, g, or t
  misc_feature (70)..(70): n is a, c, g, or t
  misc_feature (113)..(113): n is a, c, g, or t
  misc_feature (154)..(154): n is a, c, g, or t
  misc_feature (225)..(225): n is a, c, g, or t
  misc_feature (299)..(299): n is a, c, g, or t
  misc_feature (361)..(361): n is a, c, g, or t
  misc_feature (616)..(616): n is a, c, g, or t
  misc_feature (1069)..(1069): n is a, c, g, or t
  misc_feature (1086)..(1086): n is a, c, g, or t
  misc_feature (1155)..(1155): n is a, c, g, or t
  misc_feature (1315)..(1315): n is a, c, g, or t
  misc_feature (1464)..(1464): n is a, c, g, or t
  misc_feature (1472)..(1472): n is a, c, g, or t
  misc_feature (1475)..(1476): n is a, c, g, or t
  misc_feature (1526)..(1526): n is a, c, g, or t
  misc_feature (1535)..(1548): n is a, c, g, or t
  misc_feature (1551)..(1556): n is a, c, g, or t
  misc_feature (1559)..(1562): n is a, c, g, or t
  Peptide Sequence Number=SeqID_6237
  Probeset Number=SeqID_12366
ngttgtgtgagatgtgatcatatatatatgtggnattgtgtagtgtacgatagtganacgagtgtagganatatgatactggacaggcagagatagtaatgttattatcatgntagacatgtactctctctaattgtgttgatatcatatatgnacgcggagtgtgaggcgacggggagtggtggagagagagcgggagtgtcactaggtatatgagacgggagntatcattgagtcacactactgaccgtgtctttgtgcacttgcctgtgtggctgtgtgtgtgccggtgtatgcgncataggcgtggtcatctgtgtggaggaggatgtgtcgagtgtgtcattagattagagcatcntatggtgtatgacgtgacacagtgtgtttgatagtatactctcaatatagagtggcgggatagtatattatgaatagatgcgatggagagaggaataagtgagtgggatgagagtagtatcgtgtggtaggagcggcggcggtgcttcacaattgaaggtgacatagtaagtatactaagagagtgtagatagtgtctatgtgtgtggtgtatgtgggtgtgttgtggttttgttgtatgttgttggtaggttgntttattatatatgttggttcaccgtactatttatctatcttatatactacctaggtgactatctacagctacacgacgcacacgtctgcgcatagaccccaacacgaacgcttctagtcactcaaaaaaactcacgatagatagtgtaggacgtcgcatctgctttatcatcgtattatataatacacgataagagtgggcatacataagatacttgagcgcaggtcgtaccccgacaaccggatgttcgctcgaaattacttaattacgtagacttataggtatggatgaaaagaacaaaaagggagtgaacgggagtttgtgatatggtattggagttggggcggcggagcgagtgatataagggtgagtaacgagagggtagggggaggggtgtcagggggggcgtgagcagtgatgcttaagcggcgcggtgacactagggagcagaancaacgaggtgaatcgcngagtgcgcgcggatgtgtttgtagtgttttgctttgtattttagcatgattgtacatgttcatggtacntctccgtgagtgtcgtggagttggactgtgcgcttctaccgtgtattgttgtcacagcgatctgtgtcacgcattctacagatatattaccaattaccgcatttgatatctcacagcaagtagcggacgtgtatagcctatcgtcacacatgcaccgctngcgttaatccaaattctgggtctttcagttgtttctgttctcatactcttatatcatcttatttacgatcttgtgtgtgtttttctatcttcgcccttaatcatatatttctatatatcattttaattagcgagggtgcgttattggcnggtggggntannttagggtggggtttgggggtgcaaaacacaatatcaacaacaacaataanttaaataannnnnnnnnnnnnnaannnnnnccnnnnaaaccccccc

SEQ ID NO: 2588 - DNA, 1733 bp, Glycine max
  misc_feature (13)..(13): n is a, c, g, or t
  misc_feature (26)..(27): n is a, c, g, or t
  misc_feature (29)..(30): n is a, c, g, or t
  misc_feature (34)..(34): n is a, c, g, or t
  misc_feature (37)..(38): n is a, c, g, or t
  misc_feature (41)..(41): n is a, c, g, or t
  misc_feature (57)..(57): n is a, c, g, or t
  misc_feature (132)..(132): n is a, c, g, or t
  misc_feature (247)..(247): n is a, c, g, or t
  misc_feature (254)..(254): n is a, c, g, or t
  misc_feature (291)..(291): n is a, c, g, or t
  misc_feature (384)..(384): n is a, c, g, or t
  misc_feature (480)..(480): n is a, c, g, or t
  misc_feature (487)..(487): n is a, c, g, or t
  misc_feature (505)..(505): n is a, c, g, or t
  misc_feature (556)..(556): n is a, c, g, or t
  misc_feature (583)..(583): n is a, c, g, or t
  misc_feature (939)..(939): n is a, c, g, or t
  misc_feature (1025)..(1025): n is a, c, g, or t
  misc_feature (1033)..(1033): n is a, c, g, or t
  misc_feature (1059)..(1059): n is a, c, g, or t
  misc_feature (1123)..(1123): n is a, c, g, or t
  misc_feature (1160)..(1160): n is a, c, g, or t
  misc_feature (1263)..(1263): n is a, c, g, or t
  misc_feature (1266)..(1266): n is a, c, g, or t
  misc_feature (1328)..(1328): n is a, c, g, or t
  misc_feature (1335)..(1335): n is a, c, g, or t
  misc_feature (1375)..(1375): n is a, c, g, or t
  misc_feature (1583)..(1583): n is a, c, g, or t
  misc_feature (1612)..(1612): n is a, c, g, or t
  misc_feature (1680)..(1680): n is a, c, g, or t
  misc_feature (1733)..(1733): n is a, c, g, or t
  Probeset Number=SeqID_12367
ttttttgttcttnttggagatgcggnngnngganggnnggntgcgtatatgggtganagccatggagtgcgcgagccgtcgatgcgcgcgtatgtcagagtcatggtgataaagaaccgcctaagtggtgtntggggtgcgcccgcggcccgcgcatactcactctattagcggcatgccacataccaagctccgctagcaggtaggggggagcggtggagagacgtgcagtcactatgccgccctnagttctnctccccgccacgactcttgtagtcaatactcactcantgctcacgagagctacccttctctctgacttgattgtggctcgtgccgcgcgtacggtgatcttgcgtcacctcccctcacggtatagtttangaatactagctgtgcacttatcgcaatgatttcctatttatataactactagtgcgctatacgcgcacacgcacgtctctgcgtggagtcgtaggnttgtatnacactacagaaagaaganatcactcacacaccctctatatatatgtcgtatttcgttataaaatatacnagacacgagcaaatatatcactattgnttttgtcttgataatattcatcttgcgtcttacagttctatgctatacgcggacacgcccactcccgcgtattaatcctgaatggatgattacaagctgtactctgtatatcatctcgagacgactcatatcgctgtgtgtgaggttgcgcgaatatgaatatcgatgcgcacgaccgatctactatacactcagacacaccacataccatctatactacacacacagcaactacacatcactccatatatatatactcctacatcgcacgtatgcacgtagatatgatatatgtggtgactatcacgacagtcacatcacatataggtaggcgaagtacggtcatctatgtctantctgacgagcatgtgtagagagtctcgcatatcgtgcattgagtacgtgatatgaaactcgtgaacgtagatgatatgatcggtgntatagatnactatagcactatcacgatctacganatacgatacacacacgcactccctccgatcgcgactctcatgtctcgtgactcgagatcgatanctagtactgtgtccgctcacactcttcactcaccgcncacgctctgctacgatcactctcgacgcatatgctatacacacatgtctacatcagcctatcagtacgcgtacgccgttctctgcgactgccatacgtcaaangangtgtgacttcaactatcaatagtatatatacactcactacctcacctactatcacatcatanatactangtgatatagacatgtaagacgtgactacgtgtgctataancactcactcatctcactgcacctgatagatgatctatagatggtcatacgatacatgtgctatactgtcactctaagtactactctgtatacgtatatgtatgtccgcaccactctcgacactctcgtagataatatctatgagcactcacgtcacacagactctgcagcgctcggtagtcctgtctactctgctcttatacatccancgatcgcgccgaaacagacacgcgacacnacttgaatgctcgattacgatgatcgacacacgtactctcacctcgatcgcagcacggagttctgtgnatgtgccccctgctgatcgctgcgttcatctactactccactggtctcctcgn

SEQ ID NO: 2589 - DNA, 486 bp, Glycine max
  Peptide Sequence Number=SeqID_6238
  Probeset Number=SeqID_12368
acaaaattgatatctcataatggaaaagcatcataacaaaaatgtcacaatttattaaaaaaatcccttaacatgctgattgctgaagttatgtgaacactctaataattaaaccttgggggggggggacggccagcacaatagcgagaggctgctcccaagagtcgattgaggaaaaaggcatacgtgcagcagatagaatcagtggcgcttgaagctcttgcagttagagcaagagggagatcttgtcttgcaacagggattgtacattggcaacggattggggtctaagaatttgggttgggctggggctgtaaattcaggaggaaccctttcccagagggagtagggcaaaggggtgggaggaccaaaataaacaaattttggaactgaggagcggccttaggtctccgaacggtggggttaagggggcggagcgcggggacagggggtaaggaccccgtgcccgaggtgggggggggggtc

SEQ ID NO: 2590 - DNA, 417 bp, Glycine max
  Peptide Sequence Number=SeqID_6239
  Probeset Number=SeqID_12369
ctttttagttttgtgttctgaagagatcgtcactgcttgaagacgtcttgctgctttcgcgtatctcatctctgcaaatcacaatgtctttggtcgcaaatgaggagtttcagcatattctccgtgtgctgaacacaaatgttgatggtaagcagaagataatgttcgctcttacctctatcaaaggtattgggaggcgattggctaacatcgtctgcaagaaggctgatgtcgacatgaacaaaagggctggtgagttatcggcagctgaaatcgacaacctgatgacaattgtcgcaaatccaaaacagtacaagatcccagactggttcctgaacagacagaaagattacaaagacggaaagtactcccaagtcgtctccaatgcccttgacatgaagctcagggatgaccttg

SEQ ID NO: 2591 - DNA, 449 bp, Glycine max
  misc_feature (98)..(98): n is a, c, g, or t
  misc_feature (167)..(167): n is a, c, g, or t
  Peptide Sequence Number=SeqID_6240
  Probeset Number=SeqID_12370
aaaaaacctcctcaccggccacaatgcgatctccgatctccggactcttctcgagatcccttagcttcctccaccgcacttcccccctaacctccgcngctcgccacctatgcgccgtcacttcccccgaagctagaacgaagaacctcgagcgaatcgccgacganttgctcaacctcaacagaatcgagctctacgactactcaatcctcttcagccacaaactcggcctcaaccgctacggatccgccgtgtcctcccccgccggagacctccccgacgcgtccgcctccgccgagaccaaaaccgctgagaaaacggctttcgatgtgaagcttgagaagttcgattccgcttcgaagatcaaagtcatcaaggagataagagcgtttacggagctggggttgaaagaagcgaaagatctcgttgagaaagctccggttgtggtg

SEQ ID NO: 2592 - DNA, 502 bp, Glycine max
  Peptide Sequence Number=SeqID_6241
  Probeset Number=SeqID_12371
aagattgccacgtctcttttaagatggccatggcaggagactctgaaactgcatcttggagaagtgatctctcaaaggttgacgtttggtatgcatcttttggatccaacatgtggaaaccgaggttcctttgctatattcaagggggacaagcggcaggaatgaagaaggcatgtgttggtgcaatggataaaactccaccaaaggaaacaacgtggggaacgtttccaaacaggctattctttggccgtgaatctacagttacttggggtgaaggaggatctgctttcctcaaccctctgactaatctcagtgatcaaactcacatgtgtttctacagaatcacgcttgagcagttcaacgatgttctgtttcaggaaaatggcatgaaagtagattctgatactcctctctttgatctagcggctatgcagttagtacagaacaatggatccattccacttgctaaagctggttggtatggtaacgttgtctgtgtggg

SEQ ID NO: 2593 - DNA, 684 bp, Glycine max
  misc_feature (602)..(684): n is a, c, g, or t
  Peptide Sequence Number=SeqID_6242
  Probeset Number=SeqID_12372
catcttcagttttcattattacttatcaatgcatcccttcatcccgataaaaataattttccatcctccatttgttttccctctcacttttctcaatggagggaaaaaaatccaaaaaaaattcgaacagggaagaatatatcttcttcttcttcttccaccagtgaacaaatctagggttttagtctcttccttcagcttatttacttgttgagttctggatattcctcgaaaagatttgcttcttagtcattactaaggtatctccatttggcgaggatctagccttttagttattactagggtatctgattccgattggcagggatctttgaaaagctgttcctggatgcactgtgttagtggacatgcaaactaagaaaaaaagcctccaggcgaaatgccagtcaagagcgtggcagtcctaaagtttcaagagcacagaggaaggtctctggaaatggtcgagctgctgaaaagaaagtcacagacttaattaatgttcagttttttaagttaatttgtatcaattgtttcaaaatgtatgattcataacctagttgctccttcataatttgaaatttgaaattattattttgaannnnnnnnnnnnnnnnnnnnnnnnnnnnnnnnnnnnnnnnnnnnnnnnnnnnnnnnnnnnnnnnnnnnnnnnnnnnnnnnnnn

SEQ ID NO: 2594 - DNA, 579 bp, Glycine max
  Probeset Number=SeqID_12373
cccgaccccgtcccatacccgatttaaattagaaaaatattttttttgtaaagaacatattaaaaatttgattttagaaaaaataaattgactgttaaacatttatttttaactacttatatattaataaatttattatagcgcatgtgtctacaaaaatcgttaaaaaaagaatattaaattatgtaaaaaaatttaaataaaaattctaggccttttgattaaattatgtaaaaattctaaaaatttcaagtggcggggctggtccgggttcggggtcggggcagatgtagtaatctcatatccgtacccgtatccgacttttgattattgggaaaaacctgaacccaaactcaatatgggttttcttgtcatgtcttgtttttagtttctaaacctctttaaaaagttatggtctatttttatgatttattgcagattgaggctgtgatacattttgacgatgacactgaagagttgcagcgatgggaccagcagactaattccgaagcgacggtcgtgctcctccttggtcgcatacttcttcccaaactccgccttaaagcttacgaagtggtg

SEQ ID NO: 2595 - DNA, 767 bp, Glycine max
  Peptide Sequence Number=SeqID_6243
  Probeset Number=SeqID_12374
aaaataaaaaaattttgattcaaaaataacataaaagatgctctctaggttcagcaagctcaccacgaaggctctacctcgtgtcacagtccgtcgcttcggaggaggtggtggtgaaagccaccctgttcacctcgacaagcagcaaaactggctcgacaaccaggatgtcaataaagaaatggtctccttattcggatggaacgacgccaacgatcactggcacgctgacaattctgatccttttgcttacatgagaactaagcccttgttctcattctcaagaatgtacttccctgacccataccacggcagtgacgacttcgagccccttatgaacgagccacatggttacctgaccggtgatgatcctttggacaccagaaacagtattgagagagctgttcctgaatacttcatgtacttcttggttggattgaccttcaccttgatgttcggatacaacttcatgaactttgtccacccttcagtgaccctattcaacctgaaccaaactgcacacttgttggaggatgacattagaaagagacgtgaagagaatagcaaattggagagcagaagagatgaacttcgtcgccaactatctggagacagcgaatagttaagatgggtagctgtgtgtattgcaagtattatagctatatgacctacttccgttgttgggaatttatgaatttcgtctgcaaagagatttgagatcacttgatactctctcatttatgcacagtctagtgcgaatttctttc

SEQ ID NO: 2596 - DNA, 445 bp, Glycine max
  Peptide Sequence Number=SeqID_6244
  Probeset Number=SeqID_12375
gccggagcttccagaggtagaggcggacaggagggccgttgagtataactgcgtcggaaagaggataacaaagtgcgttgtcgccgatgattctacggcgatccatggggcctctccctccgacttccaagcttccgacctcagcaagctcatcgtccctgctcaccgtaagggaaagaacatgtggtttcaacttgattctcctcctttcccctccttccaattccgtatggctggtgctactcacattaaaggagctgctcgcacccactattatacgccccctgtaacaaactaccatgactcggcccgcaaatattcacacacttgtccaaccccacaccagcccttgcccccctcattccccgaccacccgcccttcaccaccccccccccgctcacacaccgccccccgccgccttccacacccaccctcgttccggag

SEQ ID NO: 2597 - DNA, 2222 bp, Glycine max
  misc_feature (16)..(17): n is a, c, g, or t
  misc_feature (28)..(28): n is a, c, g, or t
  misc_feature (31)..(32): n is a, c, g, or t
  misc_feature (36)..(37): n is a, c, g, or t
  misc_feature (70)..(70): n is a, c, g, or t
  misc_feature (97)..(97): n is a, c, g, or t
  misc_feature (99)..(99): n is a, c, g, or t
  misc_feature (458)..(458): n is a, c, g, or t
  misc_feature (497)..(497): n is a, c, g, or t
  misc_feature (529)..(529): n is a, c, g, or t
  misc_feature (585)..(585): n is a, c, g, or t
  misc_feature (611)..(611): n is a, c, g, or t
  misc_feature (639)..(639): n is a, c, g, or t
  misc_feature (642)..(642): n is a, c, g, or t
  misc_feature (891)..(891): n is a, c, g, or t
  misc_feature (979)..(979): n is a, c, g, or t
  misc_feature (1030)..(1030): n is a, c, g, or t
  misc_feature (1041)..(1041): n is a, c, g, or t
  misc_feature (1047)..(1047): n is a, c, g, or t
  misc_feature (1049)..(1049): n is a, c, g, or t
  misc_feature (1094)..(1094): n is a, c, g, or t
  misc_feature (1113)..(1113): n is a, c, g, or t
  misc_feature (1119)..(1120): n is a, c, g, or t
  misc_feature (1125)..(1125): n is a, c, g, or t
  misc_feature (1139)..(1139): n is a, c, g, or t
  misc_feature (1161)..(1161): n is a, c, g, or t
  misc_feature (1175)..(1175): n is a, c, g, or t
  misc_feature (1179)..(1179): n is a, c, g, or t
  misc_feature (1255)..(1255): n is a, c, g, or t
  misc_feature (1320)..(1320): n is a, c, g, or t
  misc_feature (1323)..(1323): n is a, c, g, or t
  misc_feature (1330)..(1330): n is a, c, g, or t
  misc_feature (1342)..(1342): n is a, c, g, or t
  misc_feature (1370)..(1370): n is a, c, g, or t
  misc_feature (1399)..(1399): n is a, c, g, or t
  misc_feature (1422)..(1422): n is a, c, g, or t
  misc_feature (1434)..(1434): n is a, c, g, or t
  misc_feature (1436)..(1437): n is a, c, g, or t
  misc_feature (1449)..(1449): n is a, c, g, or t
  misc_feature (1466)..(1466): n is a, c, g, or t
  misc_feature (1482)..(1482): n is a, c, g, or t
  misc_feature (1550)..(1550): n is a, c, g, or t
  misc_feature (1552)..(1552): n is a, c, g, or t
  misc_feature (1583)..(1583): n is a, c, g, or t
  misc_feature (1594)..(1594): n is a, c, g, or t
  misc_feature (1598)..(1598): n is a, c, g, or t
  misc_feature (1615)..(1615): n is a, c, g, or t
  misc_feature (1667)..(1668): n is a, c, g, or t
  misc_feature (1691)..(1691): n is a, c, g, or t
  misc_feature (1693)..(1693): n is a, c, g, or t
  misc_feature (1747)..(1747): n is a, c, g, or t
  misc_feature (1769)..(1769): n is a, c, g, or t
  misc_feature (1774)..(1774): n is a, c, g, or t
  misc_feature (1826)..(1826): n is a, c, g, or t
  misc_feature (1845)..(1845): n is a, c, g, or t
  misc_feature (1858)..(1858): n is a, c, g, or t
  misc_feature (1908)..(1909): n is a, c, g, or t
  misc_feature (1926)..(1926): n is a, c, g, or t
  misc_feature (1933)..(1933): n is a, c, g, or t
  misc_feature (1936)..(1936): n is a, c, g, or t
  misc_feature (1945)..(1945): n is a, c, g, or t
  misc_feature (1959)..(1959): n is a, c, g, or t
  misc_feature (1966)..(1966): n is a, c, g, or t
  misc_feature (1970)..(1970): n is a, c, g, or t
  misc_feature (1990)..(1990): n is a, c, g, or t
  misc_feature (1994)..(1994): n is a, c, g, or t
  misc_feature (1997)..(1997): n is a, c, g, or t
  misc_feature (1999)..(1999): n is a, c, g, or t
  misc_feature (2010)..(2010): n is a, c, g, or t
  misc_feature (2022)..(2022): n is a, c, g, or t
  misc_feature (2055)..(2055): n is a, c, g, or t
  misc_feature (2058)..(2058): n is a, c, g, or t
  misc_feature (2062)..(2062): n is a, c, g, or t
  misc_feature (2155)..(2155): n is a, c, g, or t
  misc_feature (2161)..(2161): n is a, c, g, or t
  misc_feature (2165)..(2166): n is a, c, g, or t
  misc_feature (2170)..(2171): n is a, c, g, or t
  misc_feature (2193)..(2193): n is a, c, g, or t
  misc_feature (2196)..(2196): n is a, c, g, or t
  misc_feature (2222)..(2222): n is a, c, g, or t
  Peptide Sequence Number=SeqID_6245
  Probeset Number=SeqID_12376
tttcctattatcgctnntctttttctcntcnncttnntgtttcgtaggtgtgcgtggcggcagggctgcnatggcatcgtggatctacgtaagaggncntacgctgcgcactcccatccacatctgactacgatacaatcgtggtaggtgactccgctacctgcttagacatgaatgaggtatggagggagcatagtgatgtgatgatatagtaataggagtgtcttgttcgtacaactgcagtgaccgcaccaaccgagcgtaggcgcagatcagactcctattacctgtcacaacacggccgacacaactacactagtgcaaaagaataagataggtgagagtgaggaagagagatgtgatagatataatatgccttgtggtcgtatataggactgagggtggctgtggcgacggggggatcgtcgtgaggttgcgtgtggtgtatccgtgtctanatactcacacatgagtgcgtgtgatgctatatctagtangctatacagcatagcggtgctaagcgtagacnacgggatggtggctgggaggcgggacgacggtgtgggtgcgctgccagacggtgcngtagtggagcccgcgctgcctccgcncgaagaaggcgtcgagccggcgcgcggnacnacggcgagctggggtactctatgtagctccgtctctcaggaagtgagcttagatgtagtgatatatatattaatcacaatgattcgatttgtgcatgataagacattaattatcatatgtttgacttacacatatctcgtgttgaggtgcgctgagcgcattgctagtatgatatgttagtcgttctcttcgtgtaatgaccatcgtctatcatgatgctgcaatgtcgcggttactagcacgtacgangcttctctgagtatagctctggtgtggacgctggatcacgacgacacgtgcgtataatagatagtgatgacagtgggtagcagctgantttatactctgcacgtgtatgatgatctgtcttgctcttgtgtgtacgtgncgtgtactatnactaantnctatatattcattacctaagcgctcttcgtcgtagatgtgtgatncatgcggctctagacgtcntattcnnctacnacacatccctcgtnatgatgttgtgagctgagtganacacaccgcgatangaantctgcgtcgccgttctatacgtgtgcgtcgtcgttatactactctgctatcatgtcggtcattgttgtactgctcngtataacgttactgatatcgatgcgtagtacgctggcgacgtggagcgttatgcaatagtacgancgntcatcgnacgcgtgagagntgtgcgagtggcgcatgcgatgacgtgntatggctgtcgggtatagagtgcacgagnagtatgatagtatgtgtagtggngatgatgtgagngnnatatatacatangtacttatagtgtatgntgacgcgtgtaatacnactcacatgctgagtagcacgatatctgatatgatatacttcgtcacgtggcatcagctgacgtaaantngacgacagtaataatcgtcatgagatagatngactgcgtttncagncatcgatgactcatgcnatcatcgtacgtttatcgtcggtggtttacgcgtctgtgagtcgtgcgacanntgatactgactgtatgaagactncnataaatagcaatactggtatggcggtagatgggcgagagactatgctagatgtncgcgtctgatacgtcgtagtgnattangcttcgagctgtgtacgtgctgtcaggtatatgggctcgactgtcgtgttgnagctgacgtcgcgcgtccnacgatgatgtgancacggatgtgatgcgatcgtatgaacagatggagtctcgactctatgtgnnatgtcgatctgttgggnatctacnagngcactgctnagtgagacgcaggngattagnagcnacccatgcatggacgttcgntgangangnaccgacttacnaacgaagtgacnttgagcatgctgcgtgagctggtactactgtgntanctancgtaggatcggtcatgccaggagtatgagtaaggtgtggtcagttgagcactgcacggtcgtgtgcagcgattacgtcagcggatgatttgcngactantagnngagnntgaaaggtccgatgaccatacnatnacttcagaatcgtcgtgactcatcgn

SEQ ID NO: 2598 - DNA, 1384 bp, Glycine max
  misc_feature (197)..(197): n is a, c, g, or t
  misc_feature (808)..(808): n is a, c, g, or t
  misc_feature (1178)..(1178): n is a, c, g, or t
  Probeset Number=SeqID_12377
tattatttttattctaattttaggtctctcttgcacgaaccgacgcaacacacaaattcatcacgagaacacataagttcgtgcttatctccccacataggacatccccccccgccccccctgaggcggcgcaccgactacacaatccaacacttatactatagtgtatcaagttattctgcctgagacgcgacacnagagaatatgtaccccctcgaggggagtccgtgttctggctaccaacagagccaattatagagtaaaaaaggagtggaccgatgagttcaatatttattatcgtcacacatacaccacataccaactcctcgcagcgaccgcgtgtgcttttcttcacccgcgcccgcgtgacatcgccgcctcactgcctttcgtctacgcggcttctgctcacgccatcaccgcaacagactcccacacacaaacaacacccaaactatatctaacatcgaccaaagtataataaggacgaaaaaaatatagaacatagaacatatacctactctacccttacaatgacgagattatataactacatcatacaacatcacaatacccacaccacagaagaatcaaggactaggcaacgaacgcaagtctatacacgaaagaaatataggcaactaccacattcatatattgcgcgatctatatctgcactacctttcatcatcctagtgacaattaatatgggaattacacctttacgcacccgcaatagaaatacgccgagctacagtccgtcgcttcgctcttatcacttagttgatgtgtgagcacgtgtgcggcnagtgattggtgacacacgagaataagtcagagccgaatgggtgcgggtgggagaatgtcatcctctcctcctccctccagaccgcaatgtttgtgttttgtgtgattcatctaatacacgctgtctcgcgactatatacattactgcatctcctactcctccacgcgctatgcttagtcttcacaagcacctatcgcatatttatattataatagaggttgaagcgtaccaacaacatgacatcgacgcgtgatgagcctgtttattatacctagtacgtattctctcctcccacgcaatcttgtggcacccgctctgcgcgttcttgttatcacaggacaccttcgatttcaccgctctaccgcgcgtngatgtgctacatcacgattatcatctctgactctctcgtcgcacatgtcagaagcacgccatggtgtctggccgattattagatcgagtgacaataacatcaactcccacatcttctaactccaataacgtagctacaactccaagcgtaacgtcctgatcacgcaaccctccacactctcaacgactacgtcgcccccctaccca

SEQ ID NO: 2599 - DNA, 434 bp, Glycine max
  misc_feature (13)..(13): n is a, c, g, or t
  Peptide Sequence Number=SeqID_6246
  Probeset Number=SeqID_12378
gaagctcggaacncggctcttggcattgaggagggttcgtcctgtacccggagacccaaggcgccccagggctgactctcggtggcaaaccgaaactgccggcttcatgataactccactaccaggcgcttggccccagaaacctggttctgcaactctcccttcctttggagttcagccagtcattgtggatgagaaaggtgttgaactcgaaggcgagtgcaatggatatttgagtgtgaagaaatcacggcccggggcattcagaactctgtatggggatcatgaaagatatgacacaacatatgtcaagccattccccggatactatttcagcggtgatggctgcagcagggataaagatggataccactggctcactggaagagctgccgaagccatcaatgctagtgggcatcgaattggcacagccc

SEQ ID NO: 2600 - DNA, 386 bp, Glycine max
  misc_feature (232)..(232): n is a, c, g, or t
  Peptide Sequence Number=SeqID_6247
  Probeset Number=SeqID_12379
acgactccacccgcaaccaccgctcctcatctaagctccgtcgacaaaccaacaaagaatccaaaaagaatcagacgcccaggccaccatggcgaacccatccacgagctcgaggccgccatgcgcggctcccagtggcaccaagctcacctgcctatgctcgccgacgaaccacccgggctccttccgctgcacccgccaccgcaacccacggggccgaccgcagacgtcntcgccgccgtcgtccagccgggcggctttgggcgccagcgcaacggtgcgcgtcgaggggatcaccaggagcggtgacgtcgctgcgggaggcaggacaggcaagggccggtccgtcctgcgcgcgcacctgctgcggctggtcagcctgccgt

SEQ ID NO: 2601 - DNA, 1543 bp, Glycine max
  misc_feature (42)..(42): n is a, c, g, or t
  misc_feature (147)..(147): n is a, c, g, or t
  misc_feature (159)..(160): n is a, c, g, or t
  misc_feature (198)..(199): n is a, c, g, or t
  misc_feature (207)..(207): n is a, c, g, or t
  misc_feature (313)..(313): n is a, c, g, or t
  misc_feature (460)..(460): n is a, c, g, or t
  misc_feature (536)..(536): n is a, c, g, or t
  misc_feature (538)..(538): n is a, c, g, or t
  misc_feature (655)..(655): n is a, c, g, or t
  misc_feature (869)..(869): n is a, c, g, or t
  misc_feature (933)..(933): n is a, c, g, or t
  misc_feature (1142)..(1142): n is a, c, g, or t
  misc_feature (1158)..(1158): n is a, c, g, or t
  misc_feature (1167)..(1167): n is a, c, g, or t
  misc_feature (1192)..(1192): n is a, c, g, or t
  misc_feature (1206)..(1206): n is a, c, g, or t
  misc_feature (1211)..(1211): n is a, c, g, or t
  misc_feature (1215)..(1215): n is a, c, g, or t
  misc_feature (1245)..(1245): n is a, c, g, or t
  misc_feature (1275)..(1275): n is a, c, g, or t
  misc_feature (1310)..(1310): n is a, c, g, or t
  misc_feature (1387)..(1387): n is a, c, g, or t
  misc_feature (1396)..(1396): n is a, c, g, or t
  misc_feature (1412)..(1412): n is a, c, g, or t
  misc_feature (1434)..(1434): n is a, c, g, or t
  Peptide Sequence Number=SeqID_6248
  Probeset Number=SeqID_12380
tatcgtgtagtttcataaatctcgtacttaataataggaganagttttgtatgtgttgtatggttatcgtgtcagttctgatgtgctcatagttgtgtgtgttggtgcggcgggtgtgtgtgcgagagggtgccgcgcgcgggacanagcaggagggannagtactcccacacgctcccacaccgcgaacaaattacnnctagccgnacaattataatgatcatcatatgcgaacctctagcacacatgatagagatatgagtgatgtgtgttttggtcttactgatgcttgtcttttcttctcattattctnctgtatatcttagccgctcactcactcatataccgctcgatcgcctatcagattcggcttcatagtatttatatatctgatacccgcttcgagtctatcaccgcacatctgagacagcgttttcgctcattgtagctgctagttganatgttatttgtatcgtacattatacatggatgctgcgccgtctatatcataaccctagcacccacaacataccaananattacatgagatgtgttgcaaactatatctgaatatatatcagagtaatataccgcactcctgctgtgttcggtatgatatttatgactgtgcgtgtgtgttgtatgcgagatagtntgtgtctgcgttcgctgtggtcgggtcttgtgctcgagtggcgcgcgctctccggtactcgacgagacgagatagtatatgtcaggtgttgattgtgtcgagtgcgtgttgaactgtagtagtgtgtgttgttgtgatagtgctgtggtcttgatgtcgtaagagtgtagtgagacgcgttcggtactgatattagtctatagcgccgcgacgnatagctagacagcgtgcagatgagatacgtgtgtgatgtgaggtgtatgcgccgtgttatatgnatgcggctgcgcgtgtatgctcatcattcgtgtcgcgacttcgctacgaggtgatagatctatagtgtgagctgagcgtgcagatgctggcggtacgctctctgcgagtgaatacgcgtaacgcggtgtggatatgacgtatcgtgccgatccctgatggcggagagcatgcactgatcgtcgcatgacgagacgagtggcgcgatgtnctgtggagtgctgaantctgtctcntgcgcttcgtgactgcgtctgtatntaggatgcacgggnatatnatgnatctactctaatactctatctacgatactnccatcactatatgacggctgatctcgccancatatctcgacacgtgacatacgtgactgcgaccncgctcgctcagtatcatacacggagatgatgtaggactcatgttgcgtgagtggtgtacctagcatgtagacggcgngcagcgtangatgactgcggatcanagatgcgtcgacgcgcaccganggctggagtatgaggtgatggactgttgtcattgagcgttgactcgcgtggtggtcaactgtctgtagtctgtgatgcactccgtaacttgtacgctactctcgccgtg

SEQ ID NO: 2602 - DNA, 258 bp, Glycine max
  Probeset Number=SeqID_12381
agcgcctggcgccccgcggcggtaaccggactgcttccggtatcggccacgatgtttgccttcctcttcggttttggcatgcgcgatataaggagcaacaaatttgtctagatataaaaatataaaatcagtgaaataaagagtaacaaatttgtttagatgcctgcaagaatattaataaatttatagattcctgtaatataaatatgtctagatataaaaatataaaatcagtgaaatattattaaactatatact

SEQ ID NO: 2603 - DNA, 632 bp, Glycine max
  misc_feature (603)..(603): n is a, c, g, or t
  Peptide Sequence Number=SeqID_6249
  Probeset Number=SeqID_12382
agttaaacctctggacttcagcatgaacgaaaacctgttcgaacgaatgttgtgctccttcacggcttctagtgtgcttccaatttcgctccttcacccctccggccccagtgctggttgggggcccctctcctggccttcgaccatcccctcctcccctcgctcctttccgcgcgcacggaatttcggtcctcctgttcccgggggagccccccgaccccctccgttttttctccccggggggtgccccccgcggggcacgccgcaaggcccccgcggcgggtcttgcctggctggggccccgcccttccggcggtctcgcgcccctaaccccccgggttcttttaaaggggccccgtggcccggccgcggcgccgttatgcgctggcccccgccccgacctctcaaaacgtgtgtgtgtctaaatcccctcgcgtggcgaggcggattctaaaccgaatggtttaattcacccccctgtccccgcttggcacaaaatatgtcatattattgagacggacactccgcgcaagctcacaacccgccttcggagtggtacgtcttagaggggagggcacacatgcgaccttcttttacagcaangcggggctggaacccccccggtgtcggag

SEQ ID NO: 2604 - DNA, 1882 bp, Glycine max
  misc_feature (1)..(35): n is a, c, g, or t
  misc_feature (47)..(50): n is a, c, g, or t
  misc_feature (67)..(68): n is a, c, g, or t
  misc_feature (73)..(74): n is a, c, g, or t
  misc_feature (76)..(76): n is a, c, g, or t
  misc_feature (197)..(197): n is a, c, g, or t
  misc_feature (212)..(212): n is a, c, g, or t
  misc_feature (214)..(222): n is a, c, g, or t
  misc_feature (297)..(297): n is a, c, g, or t
  misc_feature (312)..(312): n is a, c, g, or t
  misc_feature (319)..(319): n is a, c, g, or t
  misc_feature (381)..(381): n is a, c, g, or t
  misc_feature (504)..(504): n is a, c, g, or t
  misc_feature (960)..(960): n is a, c, g, or t
  misc_feature (985)..(985): n is a, c, g, or t
  misc_feature (1035)..(1035): n is a, c, g, or t
  misc_feature (1060)..(1060): n is a, c, g, or t
  misc_feature (1122)..(1122): n is a, c, g, or t
  misc_feature (1188)..(1188): n is a, c, g, or t
  misc_feature (1226)..(1226): n is a, c, g, or t
  misc_feature (1266)..(1266): n is a, c, g, or t
  misc_feature (1399)..(1399): n is a, c, g, or t
  misc_feature (1411)..(1411): n is a, c, g, or t
  misc_feature (1427)..(1427): n is a, c, g, or t
  misc_feature (1436)..(1436): n is a, c, g, or t
  misc_feature (1439)..(1439): n is a, c, g, or t
  misc_feature (1474)..(1474): n is a, c, g, or t
  misc_feature (1477)..(1477): n is a, c, g, or t
  misc_feature (1506)..(1506): n is a, c, g, or t
  misc_feature (1542)..(1542): n is a, c, g, or t
  misc_feature (1610)..(1610): n is a, c, g, or t
  misc_feature (1665)..(1665): n is a, c, g, or t
  misc_feature (1688)..(1688): n is a, c, g, or t
  misc_feature (1733)..(1733): n is a, c, g, or t
  misc_feature (1755)..(1755): n is a, c, g, or t
  misc_feature (1760)..(1760): n is a, c, g, or t
  misc_feature (1765)..(1765): n is a, c, g, or t
  misc_feature (1780)..(1780): n is a, c, g, or t
  misc_feature (1783)..(1783): n is a, c, g, or t
  misc_feature (1789)..(1789): n is a, c, g, or t
  misc_feature (1822)..(1822): n is a, c, g, or t
  misc_feature (1831)..(1831): n is a, c, g, or t
  misc_feature (1864)..(1864): n is a, c, g, or t
  misc_feature (1875)..(1875): n is a, c, g, or t
  misc_feature (1882)..(1882): n is a, c, g, or t
  Probeset Number=SeqID_12383
nnnnnnnnnnnnnnnnnnnnnnnnnnnnnnnnnnnttttccctattnnnnaaaaccattaaataaanncatannanccgtattaataatattacaagataaaacatctacaaataaacagacaatactagtttaacttcttacgataacttattttatattaacatttacactcaaaaatatattactcactatatnacaatactgactatnannnnnnnnnatcgacgcagtcgccggcgcgcgatgccggcacacgagacgccacgtgtctcgcgtccgccgataaacaccaggnggacgccagccgcgngtgcggntgtagagaatagatgcgcttttgatttatattattattttacagttgatatttgtggtgagngttcttaatattttattagatgcgacggaaaacgggcgaccgcgccggacacagagctgtagtattatggcgtacgagagtggagtacaacgtgccgcgtccgctggcgtccgcccgtccgcncgcgtttcgtttcacgctcatatattattgaattatagagagtagatgatgcgcttgccacatagtggaacgcgaaatgctgtatgtatacatatgtacagattcatactatcacgaatatcgcaacgttatatatatgcactgattatcgtcgtgcgacacgcgtgcgacgacccgtgctacgactacatctacacatcacctcatgattgtataaatataccaatataccacatacaatacttatcatatatagtacgtacgtatcgcagttcgcgactgtcctattaatgtatcacttgacgtagctgatgtgataccgtatatcaagcgcactccatatagtcatcacaacaaaatatatcctcctactgcttgctctacactgatcacatgcacatttgtgcaactcgcctgtgctaactgtgtcatttgtcgcgtacgctgtactcggtnctacacgtatgtatgcgtcgtgagngaacccaagacagacggtgcgctacatgacaccgcgtgcacgggcagacncacaagtgcaatatgtagacaggangaagacagaggcagagtgacgcgacacgagtggagtagagagacacacgaacgcagcacgcngtgagtcgatcgtgcatgagacgtctgtgaggcgacgctcgtagtgcctcgctgctccaacctgtnttcgtatgtgatattataaacagaatcaactcagacanactgtatatgacacactgtactatatatatatctcatatnaatagacgtcaatctatcgcagcacatcacgtacatcatccacatacacacgaaactctgtcgcgctgcaagagctccagcaccgcgcccgactgctactgcgctgcgtgcgtatacactaccacgcgacgantagttgagatgnacgcgcgtctgacgtngttagtatngtntgacgatagcgctagcagcacgagacggatacagnctntgcgtttgcgtcgctgcgccatcgtgctntgtactgtacgactcgtatgtggtagggttaatttntcgtattatatggggcagcacgctcatacgtagtatactcgcagagtgagatgtactggtagtagtgnagcgtagcgcatcgacgctacgattacaacgaatagctcatgacacactacaaancgctggcattaatacctagattnctatcgaaatgatatacatcatatattattgaggcgtatagtttnatgatagtagtgagtgatggancggancgtantcatctactcttgantantaatcncaacgaagatcacactatcaactacgacactantacacgacntaatgagatactacgcactgacatatcgagatnatacttcatantgtcatn

SEQ ID NO: 2605 - DNA, 1381 bp, Glycine max
  misc_feature (521)..(521): n is a, c, g, or t
  misc_feature (680)..(680): n is a, c, g, or t
  misc_feature (774)..(774): n is a, c, g, or t
  misc_feature (805)..(805): n is a, c, g, or t
  misc_feature (906)..(906): n is a, c, g, or t
  misc_feature (954)..(954): n is a, c, g, or t
  misc_feature (956)..(956): n is a, c, g, or t
  misc_feature (996)..(996): n is a, c, g, or t
  misc_feature (1106)..(1106): n is a, c, g, or t
  misc_feature (1121)..(1122): n is a, c, g, or t
  misc_feature (1124)..(1124): n is a, c, g, or t
  misc_feature (1241)..(1241): n is a, c, g, or t
  misc_feature (1275)..(1275): n is a, c, g, or t
  misc_feature (1354)..(1354): n is a, c, g, or t
  misc_feature (1381)..(1381): n is a, c, g, or t
  Peptide Sequence Number=SeqID_6250
  Probeset Number=SeqID_12384
gtgggtgggcgctcgggggattgtgcatacacgcgattggagggcgtgttacgacgcgcgacgcaccatatctcttcacctgatcttaggcacagtacatattattattagtttcggtttgctttcgtgtagcatctcgtgtagcgcccggagcgagcgctgttgactgtttatattgacgtctaggcctggagacgttctgcccctattttattggtgttcgagtgcgcgaatggcttaaaccggcccctgcgagcgcggaggcgtcaacacggtccagacgaagaccgcggatatatactactactagcgagaaggacgaactaatagcggagtacgaccctatttatcgcgtcgcttcgagagtcaagatcgaacgggcgctgagagacgatacctggcgcgacagaggtcgtaatagggagcggagatggatagaggagcagaaacgcgacaacgacacaacctatataatatgcgtcgccgcgcagtgcgggttgacgatacacgttggacgtggngcgggggtgctggtgaacgcgggagcggtgtggagcgtcgcgcccgttgttacggtatcgtaagctgcgatacggatcatgcggtaggatggcataacgcattagaagccgtgacgctgtcgcggatatttcggcggtgcgtatcgactgattggattngacggataggagaagcacgtatcgcgcgcgtctgcgcgccccgtcagcggacaagactgagtggggaaataggagtgaggttgtatcccgtgcnctccccgttcacattgcgaacgccgcaacgncggacattatcgatagtcgacctgtagtgcacatcggactcgcaccgcaataagtaatagcgcccacccgcagacgcacagctattatacatattaacatngccgcgcattattccatacgtacgcgtgctgtatggtgctacgcgccncnccgcgacagcagggagcgtggttgaaagcacgagtgtgtntcctcctcgcggctatcgcggcgaggtatcacagtatgatgcgtacgttcttcggtggataatacccggccgcaggcatcgcgtgtctgtgattgggtgatagagcgcgngatgtataacgacanntncctctcgtgcatcgctcgagctcgcggctatattatatgatgacaagacccgcagccagcgcgagagcagaataacacataggcgtcatctatgtcagtgtaacacgcgactgcggncgcccgcatctgcagtatatatatacagtttctntacgctgtgatagtctcgctgtagatcgtattgcatgacgacgataatagtatgtatagatgacgccttctctataccnctctatacgccacatagtagagaacgn

SEQ ID NO: 2606 - DNA, 1794 bp, Glycine max
  misc_feature (113)..(113): n is a, c, g, or t
  misc_feature (298)..(298): n is a, c, g, or t
  misc_feature (485)..(485): n is a, c, g, or t
  misc_feature (798)..(798): n is a, c, g, or t
  misc_feature (919)..(919): n is a, c, g, or t
  misc_feature (1170)..(1170): n is a, c, g, or t
  misc_feature (1173)..(1173): n is a, c, g, or t
  misc_feature (1253)..(1253): n is a, c, g, or t
  misc_feature (1529)..(1529): n is a, c, g, or t
  misc_feature (1538)..(1538): n is a, c, g, or t
  misc_feature (1579)..(1579): n is a, c, g, or t
  misc_feature (1598)..(1598): n is a, c, g, or t
  misc_feature (1602)..(1603): n is a, c, g, or t
  misc_feature (1659)..(1659): n is a, c, g, or t
  misc_feature (1669)..(1670): n is a, c, g, or t
  misc_feature (1753)..(1753): n is a, c, g, or t
  misc_feature (1755)..(1758): n is a, c, g, or t
  misc_feature (1760)..(1761): n is a, c, g, or t
  Probeset Number=SeqID_12385
cgtgccaggagcggtgacagacggcgatcagacgagtcgtagggatggaggagctcggatgatgtatgagtccgtatctggtctgtgatgggcccctagtccaccacgcgctnacgagtctccagactcaggcgacgtcgtttggcacgcgcccgcactgaccgccgcgcggcgcgcgcccacggttcccgtgaggagagtcgtttcggtggagggcgcggtgtcgggtgtggtgttcgcgtcgcgtagccggtgctatattttctcctatttatagctctatagagatattacagtntggagtgcgtgtgtactggtctggtgagtgctgagcgttagatatgacagtcggtttgtcctgtgttgctggcttcgtcgagtatagtcgccccgcgtgtagacgtgtctctatgttgtgtgtgagatgtatatgagtgaggggcgcgcgagcgagaggggggcggtggcggcggcactcgtacgtntctgtccggcgtgataacgatatagtccaacgtatgtgttgtttccagcatgatctgtcgtgttcgtcttgttagtcatcgtagtcctctcctgtgttgtctgcggctgtgatgcgatagtgatatagagcgacgaacgcgggcttctggcgataccacatcgttgtcgatcaggcagtgacacagacgaagagcgacagtgatgggatgtgaagcatcataatcattaagtcgtggagagcgtgatgaggggtgctataatgatgtggggatgtgtgacttccagtgcgcgtggcgcccaccgcggactccnccagcgtgacctggagcgagagcgctgagaaatgcgtagcagacagcgagtcgctggtacttaggaaatctgccgcgcgacacatagctgatagcgcgcgggcgcaggcggtacaaccacnacacactccacctcagaacgtggcctgcggggcgcggcgcggatcgaagcggcgtggggagaaacaagcacggagatagaagcgggcgagaggcgagatctgctcttctttcgagttcttatctgatatgtgagtgcctcgtccgacacgacgaaccaccccgacgcggggcaaggggggggcgcgcctcatccatataaacattatcgtggttattattagtgtcaattattttatttcttctgtatccncgnccctcccccacaataaatacatacttttgcgtgcgtgtgtggtggatagttgttgaggcggtgggcgtgtttgggtggtntggtgggggggggttctctccgtcccctgaccctgtaagttttctgcagggggacagcggcgggcggagcaacggagtcgccgaaagtcatagacatacacactcggaaaatgatagacattttcctattaaaactctcaaatttctcttttttctccttctaaccataatctcgtctcgccgcgggccgcgcagtagccacacagtcgacgaatgcctcccgtatgacgtctgctctgaggcggttctggcatccgcatttcaacccacctcacncccgtcccngcggtatcggcggccgatgtcatattgctgaactaacacantcacttttccagtaggttntttnnttggttttattatcactttcaaccggttgcaaaattaaatccttcccttcgcccanccaccgcccnnaacgctcacaaacgactctcatctccccgcgccttggtagtgaacgggcgcgtggccgttttttgtttgtcttttttttatcngnnnntnnggggtggggatggatttaaagaggagaaaatag

SEQ ID NO: 2607 - DNA, 786 bp, Glycine max
  misc_feature (41)..(41): n is a, c, g, or t
  misc_feature (89)..(89): n is a, c, g, or t
  misc_feature (505)..(505): n is a, c, g, or t
  misc_feature (606)..(606): n is a, c, g, or t
  misc_feature (629)..(786): n is a, c, g, or t
  Peptide Sequence Number=SeqID_6251
  Probeset Number=SeqID_12386
aaaactcaacccacagttagtacaaaaaagggttacttcancttccacatatcttgaagaattgatcaatgggcaagtctgtagttganaagctactttggatggcaattgtgtgcttggtgctgggtgtaatttccattactcccaaggcccaagcagcagtgacatgcaaccaggtggtgagcaacctcaccccatgcatttcttatgtgctcaatggtggcaaaaccgtgcctggcccttgctgcaatgggatcaagaccctctttaacctcgctcactccacaccagaccgccaaaccgtttgcaagtgcataaagaacgctgttagtgcgttccattatggcaagtccaatgtggaccgtgctgctgctcttcctaagcagtgtggggttaacattccttaccagatcagcccttccaccgactgtaccagagtgcagtgaggttaatgatatatggagcggtactcgagaagagaaggattacaatatatagctagtgngtgaataagtggtggcttacgtagccacacattacattatgactggtggctggtattattacatcatcaactagcttgtatgagtattgattttttattgnagaacaaatatttaaaattatannnnnnnnnnnnnnnnnnnnnnnnnnnnnnnnnnnnnnnnnnnnnnnnnnnnnnnnnnnnnnnnnnnnnnnnnnnnnnnnnnnnnnnnnnnnnnnnnnnnnnnnnnnnnnnnnnnnnnnnnnnnnnnnnnnnnnnnnnnnnnnnnnnnnnnnnnnnnn

SEQ ID NO: 2608 - DNA, 549 bp, Glycine max
  misc_feature (439)..(439): n is a, c, g, or t
  Peptide Sequence Number=SeqID_6252
  Probeset Number=SeqID_12387
tagttcttcgctactgcgactgcgcttcagcacaatgggtgcctacaagtatgtgtcggagctatgacgcaagaagcagtctgatgttatgagattcttgcaccgagtgaggtgctgtgagtatcgccagcaaccttctattgtccgtttgacaaggtctactcgcccagatcatgctcgtcgcttgtatctcatggctaagcatcgttacatgatttagcgcgctcgcgtactgaaggatgtccgtaatacagcatctctgaggctatcgattatcgtcacgcccacatctaggctgtacgtctatgaaatttcacgcagcacgacgtctgttgccgaagaacatgcgaaaggagcctgttgactcaggatactcattcagactggtcgatgaggactccactacactatttgacgacatcttgtcgatgagccacancgctgtaagaatgatcaagaatcagtggctctgcatctagacataagacagggcactgcgtgactaactctggaggaaaagcataggtttatgggccctgactctcaccc

SEQ ID NO: 2609 - DNA, 1339 bp, Glycine max
  misc_feature (15)..(15): n is a, c, g, or t
  misc_feature (28)..(30): n is a, c, g, or t
  misc_feature (94)..(94): n is a, c, g, or t
  misc_feature (1074)..(1074): n is a, c, g, or t
  misc_feature (1324)..(1324): n is a, c, g, or t
  misc_feature (1339)..(1339): n is a, c, g, or t
  Peptide Sequence Number=SeqID_6253
  Probeset Number=SeqID_12388
tcaaaagtagccgancatcacatccacnnnttacgattctgcttatctttgcttccctctctgagtaaagagatctgggaggtctccatcctcngcttggcctgcgcccgctccacagcagactagggtgagtatcccccccgctgacttagcagaggaattaccatttttctcttcttcgttgtctactctcgctcaacgtatctatatctgttataagatagtgtcccatcaacaagtgcttcttctgagttctacgaggcctaatatgtgcgtgcgaagttcacgaccttctcacacagaagtcggtccagctagtcattgctttgacctttacaagataggttgaagtattcatataatcatatcttcgcgtccctaggatgaattgagcccatgaatggcactatcgagtacactagtgaggctattgtgcttttaccacctgaatataccgttcatctcaatagtgcgctatacaattgtaatagaccattccacaaagctctaagcgcaccatcagtggagcgttaccacactatgattcataaccactcagatgtatctaccatggttcttacatctactcttccattgatgaacctgtatctattaggctcccgctcatgattgaaaggtagagtgtgcgccctcgctcgatgtgatgtggattttcgtctatcactattctctacgctgcgacctctctaatttagacacgtagtagatcccggtcgttgttcacatccacgcttgtcgttctatctgtaccctccccgttgaactccctatctctagtctagtgatcgatcgtcttatgagcgacgcctgccaacacacatgggcaggagagtcaacacgagaggatccacttcatacctgataagctcttagcccattattccctcccttctgcatgtctaccatgagagtgtgctacctgtcgctacaacctggtatgatcgtgactctgctctcttgtatcattgattattcttggccgcgtctatatctgggtggtagcgttcccagtttcctagtgtcgatgacctcctcatctgtcttacactctcntcatcactgacgatccgtgtctagctaccctcccttcctcataatggatgcggtatcctcgttccatgggtacactttcgcgatggtcgtcacgacacacgccacacatgctatacactatactcatcctttcctgtgtgggatggtctgcctcacttgtaatacactcacacgcaaccatctagcgtgttgctgccgcctgccacgtcattgctgccgctcaactgaccatcgactatgttgcgtgtcntctgtgacgcacacn

SEQ ID NO: 2610 - DNA, 3157 bp, Glycine max
  misc_feature (3157)..(3157): n is a, c, g, or t
  Probeset Number=SeqID_12389
gaacggcatcgtgcttcgttgtagttgtagactagactagccttgctttcttgcaggattttggcgcatggaacctatcggcgtctccctgaatcgcgtttttctgttctaaactgcaaactgatatgatcagataaattttttttaaaaaaaagcagtactccagtaactactagtaattggcaacctacaatcctggccgtccgttccgttgaccgatgaatatcaaaaacaggcgattcgcacttcccattcccattgccatcgccagcgcatacatcgtatccaacagccgcaaacccttcctttcttcttcgtctcgttggtgtcccctctgatccgcgctggcacagaacccattgctggaccttccaaaccctagcggagccacgcgctgaatttcgatgcgatgatcgtgcgcacgtgaggcggcacttctttcgttgtttctcactgatgggaatttgtacgtatatgaaaagaaagatggcgcctggtgattcctcccaagttggtaagataaatcgttttttcggtttgccccagcacgtacaagtaagagtaaccctatcggggcatatgccccagggtgtcttaaataagtactcctcggggggcatttctttagcaacctggttgggcgaactttgaagtcaaatttgaaactccaaagcactgaacgaactcaattgaaaccctagcacatagtcgtagatagtagagtggataacagtgtgtgatgtggtgatcctaatcgcaagcatgatgaacaactcgaacggcatgatttcgaagacgtcgtcttcgtcgaatacggcacaatcgcaacaatcacaatccactggcctcaagatgcatttcaagactcccgagggccgatacaagcttcactgcgataagacttatccttccactcttcttcactacgctcatggcaaaaccgtctctcaggtaactctggcacatctcaaggacaagccagtgcctttgactccgactgggcagtcttcgactttcagtgccaccagtggggtacggtcagcggcagctagattgctgggaggaagcaacggaagccgggcacttagttttgttggaggcaacggtggcagcaagagtaatggaggaaatactaggattggttcgattggtgcttcaagtacaagtagtgcaatggcgaatccgaattttgacgggaaaggaacttacttgatcttcaatgtcggagatgcaattttcattagtgatttgaattcacaagacaaggaccccataaagtctattcacttcagtaactcgaatcctgtgtgccacgcatttgatcaggatgctaaggatgggcatgatttgctcattggtttgaactctggtgatgtctactcagtgtcattgagacagcaattacaggatgttggtaaaaagcctgtcggggcccagcattacaacaaagatggttctgtcaataacagtcgttgtacttgtattgcttgggtgcctggaggtgatgcttccttcgttgtttctcatgctgatgggaatttgtacgtatatgaaaagaacaaagatggtgctggtgattcttctttcccagttgtaaaggatcaaactcaattttcggttgcccatgcacgttacagtaagagtaatcctatagccagatggcatatatgccagggttcaattaatagtatttctttctcaatggatggggcatacttagcaactgttggacgagatggttatttacgagtgtttgattactcaaaagaacaacttatatgtggcgggaaaagttattatggtgctttgttatgttgtgcttggagcatggatggaaaatatattttgacgggaggggaagatgatttagttcaagtttggagcatggaagatcgcaaggttgtggcatggggtgagggacataactcatgggtcagtggagttgcttttgattcatattggtcatcaccaaattcaaatgacaatggagagactgttagatatcgatttggttctgttggtcaggacacacaattgcttctatgggacctggaaatggatgagattgtggtacccttgcgacgtccttctggtggatccccaacttacagtgctggaagccagtcatcccaatgggacagtgttgtcccgttgggtaccttgcagcctgctcctagtatgctggatgttctgaaaatctctccactcgttacccaccgtgttcatactgaaccactctcaggcttgatatttacccaggaatctgtacttactgcctgtcgggaggggcacataaaaatctggattagacctgcagctgctgagagccaatcaagcaacgctgaaactctcttatctaccagccttaaggagaagccttcaattttgagtaaggttggcaattctagccacagacaatgactaagatcttgctaataattgaaagggtattcactttgaagacccttttaataatttcttcaatgtccttcttagtctccctctatcccttttcacagggctaaaagccatgcaatttacttctcactggtgccttgagtggcctctggttttaaatcgagcctaatggcgctgcgtgatcaatgtagttgacctcacctagtgggttaaagttataattattgtttttaatatggtttatctttttatccggttgattacctagataaattttttattctggtaaagataaaccaactggtttcattttgtatatattgggatgagcgagtactttcgggcctccaaccgtaagttacgctctttcaagcaagatcagcagcaattctagctacaagcaatgattaaattttaatttaaagggaatttcaagaaattttttttatatggtttgtttatcttttatccagttggtttcctagttttaacatagtgattcaagtaaagatgaaccaactggtctattgtatattcagttatttacggatgagcatgccattgatggcactgagaggatgggagagagagttctctccggctgcctgctgtaattataaaacggctgttattaggatatctgactagtgattacaggaataatgtgaaaattggtccttggagatcggtacttttgaagtccatacatccaacccctttttttttgtgttggcctttn

SEQ ID NO: 2611 - DNA, 575 bp, Glycine max
  Peptide Sequence Number=SeqID_6254
  Probeset Number=SeqID_12390
cttgccagtgttgttttccaacctgaggacttcaaagaaggtttggagtgtgcagtttgcctctctgagattgtccaaggtgaaaagttgaggcttttgcccaaatgcaatcatgggtttcatgtggattgcattgacatgtggttccattcacactccacttgtcctctttgtaggaaccctgttgcttttgaatcctctaaatgtgaagagagtaatgtctcagggaatagtgattcatcatcatcatcatatgaagagaactcaggtggtgtgagtggtttggaaccttcaaattttcccacaaatgtgttggtttgggggaaccagacacaagttagttccattggggtttcattggaagaaaaagaagaagaagaagaagaaggtacttctcagtcccagcaaccaccttgttctacaccacctacagcatcttcttctgctagtagcaatgttaatggaaggtgtcatggaatgttggtgattgatattccaagtgagtgcacttcctcctctttgtcaccttctgggagtaggtgtgctgaagaggaggtgaaatcaccaatggctgc

SEQ ID NO: 2612 - DNA, 1642 bp, Glycine max
  misc_feature (17)..(19): n is a, c, g, or t
  misc_feature (28)..(28): n is a, c, g, or t
  misc_feature (41)..(43): n is a, c, g, or t
  misc_feature (54)..(55): n is a, c, g, or t
  misc_feature (62)..(62): n is a, c, g, or t
  misc_feature (83)..(85): n is a, c, g, or t
  misc_feature (87)..(87): n is a, c, g, or t
  misc_feature (89)..(89): n is a, c, g, or t
  misc_feature (99)..(99): n is a, c, g, or t
  misc_feature (128)..(128): n is a, c, g, or t
  misc_feature (132)..(132): n is a, c, g, or t
  misc_feature (136)..(136): n is a, c, g, or t
  misc_feature (179)..(179): n is a, c, g, or t
  misc_feature (249)..(249): n is a, c, g, or t
  misc_feature (344)..(344): n is a, c, g, or t
  misc_feature (515)..(515): n is a, c, g, or t
  misc_feature (558)..(558): n is a, c, g, or t
  misc_feature (580)..(580): n is a, c, g, or t
  misc_feature (582)..(582): n is a, c, g, or t
  misc_feature (660)..(660): n is a, c, g, or t
  misc_feature (664)..(664): n is a, c, g, or t
  misc_feature (678)..(678): n is a, c, g, or t
  misc_feature (682)..(682): n is a, c, g, or t
  misc_feature (815)..(815): n is a, c, g, or t
  misc_feature (821)..(821): n is a, c, g, or t
  misc_feature (884)..(884): n is a, c, g, or t
  misc_feature (899)..(899): n is a, c, g, or t
  misc_feature (975)..(975): n is a, c, g, or t
  misc_feature (1055)..(1055): n is a, c, g, or t
  misc_feature (1227)..(1227): n is a, c, g, or t
  misc_feature (1259)..(1259): n is a, c, g, or t
  misc_feature (1290)..(1290): n is a, c, g, or t
  misc_feature (1307)..(1307): n is a, c, g, or t
  misc_feature (1335)..(1335): n is a, c, g, or t
  misc_feature (1346)..(1346): n is a, c, g, or t
  misc_feature (1448)..(1448): n is a, c, g, or t
  misc_feature (1505)..(1505): n is a, c, g, or t
  misc_feature (1525)..(1525): n is a, c, g, or t
  misc_feature (1535)..(1535): n is a, c, g, or t
  misc_feature (1554)..(1554): n is a, c, g, or t
  Peptide Sequence Number=SeqID_6255
  Probeset Number=SeqID_12391
gtgggttgggttgcccnnnttttttctnttcttctctcttnnntttctcccccnnccccccnccgcccactcaccccccccannnancnattgttgtanaaataatattatgaaatcaccagaggaangaancaancagtatacgcagaagactctgtcagagatcgtcgtgatataanagtagtggagaataggagatagaacacaataccacatttgtttatgtgttggattgatgtaacccacccnccacgaggagcgcggcgcgcggtcgtatctaccacctaacttacatcgccccacccacacacatccagtgtgtatagagaagtagatctactganacttaatgctccgactctagagtagagaccacgagaagatatgacagtcacaacggcgatagagacgaggcttctagagatagcatacgcaggaaaagggtaagagaacaatgacgcgccaggaggcggcggtcgcgcgcggcccatcctgcttctttcgttataaacgantcgttaccacgcgggctcgaggagcatgaggaaggagacgtangagaatagtaggggaatgatgngnaataaaataatagaataaaccaaggagagaggggatactaagaacgagagaaggagaaacaaaaagacacacaccacnacanaaataatagatatnaaanacatagagaaagtaagggagagagtaggataaaccgaatataatagatgcacagccaggaccactatatcagcacacaacacctatcctcctactcgagtacactccgcacacgccgacgaggtagtacgcgntcaggncagcatcgctcaccagctattgtacaaagcatgaacgtatcgatacacaagatagtattatantaaacacaacacagntaaactaaagagtaataagttagacaatacaacaacaacagacaggctacgtgtacagaaccgcacactcccaccnctcgcgacttagcggagacgcacgctagctgcaggggtcgcgcgcggaatggcgcagccacgacacgcgcagagtatctncgacgacttgcatagcacgcgtcatctccctggtcggacagcacaaacttataacaaggacccgagctgacacgaagtaaccgaagaagctccaagctcacacactcgtgacatctacacacaatctctgagctaccagtctacgacgtcgcacgtcgctcaggcggcgagntgctgccgccgaataccagagcgtcacgtccntgcgaaccatatagcggacacgacaccatcnagcgtgagaggtgatgntgcgtgctctcagcgatgagtggacgtntactaagtgcnactcgtctctatagtctcgcgtcgacacccacgcacgctcacgacatacatgacgtgtggtataacgaccagcttgtgacctgactcgatgaccatcacctncgcatcagctctactggccctcgctcgtcactgacacatactgttatggagtattgntacagtctagatagagtganccatatgaancacgacgtgacacaatagnagatgatgttgagtcctaccggccagcagctgctacaccgtgcgtggacgaggcgtcacgtgctgctacatgacactgtactggctgg

SEQ ID NO: 2613 - DNA, 538 bp, Glycine max
  Probeset Number=SeqID_12392
acacacacacacacacacacacacacacactgacacgcacacacgcacacgctacagagcagagtcttgctccttctcctgactgtagagcatccatcacgtacgttcacggacaaacatgtctccggtgaaggtgttcggccatccgatgttgacaacgtcgcacgggtgatgctcttcctggaggaggtcgacaccgagtacgagctcgtggccatcgacttcgtcgacgtggagcacaagatgtcccaacacgtccagctaaacccgttcgcgaagatgcctgaggtccaagatggcgatctcatcctgttcgagtcgcgcgccatcgccaaataaattcctccgcaaagaccggtggaacggccgggcatggaacttcctccgaagaaaaccacggggatccaaaaaataaacaaggggggaaaatggggaccgcagggggaaagcccccaaaaaaaaaccccgcccatccccgcggagggggggtggaaaggaaataaaaattccccttaaaaaaccccgggcggggggggga

SEQ ID NO: 2614 - DNA, 1579 bp, Glycine max
  misc_feature (13)..(13): n is a, c, g, or t
  misc_feature (38)..(39): n is a, c, g, or t
  misc_feature (44)..(44): n is a, c, g, or t
  misc_feature (55)..(56): n is a, c, g, or t
  misc_feature (58)..(58): n is a, c, g, or t
  misc_feature (60)..(64): n is a, c, g, or t
  misc_feature (66)..(69): n is a, c, g, or t
  misc_feature (71)..(71): n is a, c, g, or t
  misc_feature (73)..(77): n is a, c, g, or t
  misc_feature (79)..(80): n is a, c, g, or t
  misc_feature (82)..(83): n is a, c, g, or t
  misc_feature (87)..(87): n is a, c, g, or t
  misc_feature (217)..(217): n is a, c, g, or t
  misc_feature (279)..(279): n is a, c, g, or t
  misc_feature (312)..(312): n is a, c, g, or t
  misc_feature (741)..(741): n is a, c, g, or t
  misc_feature (1024)..(1024): n is a, c, g, or t
  misc_feature (1192)..(1192): n is a, c, g, or t
  misc_feature (1473)..(1473): n is a, c, g, or t
  misc_feature (1494)..(1494): n is a, c, g, or t
  misc_feature (1499)..(1499): n is a, c, g, or t
  misc_feature (1502)..(1502): n is a, c, g, or t
  misc_feature (1579)..(1579): n is a, c, g, or t
  Peptide Sequence Number=SeqID_6256
  Probeset Number=SeqID_12393
aaattagaaacancatatcctcccaaaaaaaacaaccnnaaacnacaaaaaaaannancnnnnntnnnntncnnnnncnnanncccnttttcgctttctctttaggacacccacctccccatatagttaataatttgtaatatatatatatatgctgaattccacccacgcctaaatccacatacggctacacaactactaggccaactctggcccncactaataagtaattgtcacaaatctgcctgcctctatcttcttcggattgttcgtatatanttcttttgtattctgtcttggtatatttttctncaaactaaaccaccacctctcaaccattctcgccacataatgagccatacattgacacacatgacgctcacgctacctaaacaacacaaacaacaaaacacacaccccaaaccaaccatctcttacaatttatactaatattttggctatgtgtttaatgtattctattatagtttgttatagttaatatatgatagttgtatactctgtaggatcactgatcttcatagtactcatggttgcatcttgtcttgattctctaccacactatgactctgagcatcccacctctgttccttccctctctttctttgtccctctctctattctcctctcttcttgtcctatactctccgcgcttctatcagtcggcctacttcccacgcacagaactacagaagaagataatagaaataaacatatgaatangaagaagagtgcgaagaaacaaagacaattcaactatagcatctataataaatgcacctgcacagtgtaaaatctaattcattctcctatttaacaacacaacgataataacacgcaatcttaccccacaacattctatactcctcaccatcaccaacctccacctactattcaactaactctacctcaatactattcaccactctcttttcctccctccttctatacaccaccacactgactactatacgcactacacaagaacagtgagcacgctcgtgcnagctctcccctgctgtcataccctcctctgcgtcctctctctcacactacacacaatactcatatacaccgatacaatcaacataccgatacgatatacgctataacataatatcacctacacacaaatagattgaattatctatccgtatattatctataagctgtntgtcgtagactctgcacgagccataccccataatcttcctctcttgcattctatctcctccacatatactctcattatgcatctgtacatctctcatatttaatcatcaaatctaatatatatgagtaaaatcaatctataatcacgcatcccaattagtacacataatccaatatcttatatataaggatacagagaataatcacatattaaaaacacaacccacctctacttccactctcagtctcccatgtatctcatactgttgtcggtatacagtnaacacttaactcgactcccanggtcnccngaaccgcaccggtgccgagcgggtgagtcctattactcataaccatatacaccttctactacctcacacacatcacn

SEQ ID NO: 2615 - DNA, 399 bp, Glycine max
  Probeset Number=SeqID_12394
cttttccggtcagtgtagccatgggtatatcccgagatcactggcataaacggcgagcaactggtggtaaaaggaagcccatcaggaagaagaggaagtttgagttaggaagaccagctgccaataccaagcttggtgcccgtagaatccatgctgtgaggacaagaggaggaaacaagaagtacagggcgttacgtcttgaccatggaaacttctcgtggggttctgagtgttgcactcgcaagacacgtgtgattgatgtagtatacaatgcatctaacaatgaactggtcagaactaagacactagtaaagaacgctattgttgtaattgatgcgactcccttcagacagtggtatgaatcacattatgcgctaccaattggcaggaaaaagggag

SEQ ID NO: 2616 - DNA, 777 bp, Glycine max
  Peptide Sequence Number=SeqID_6257
  Probeset Number=SeqID_12395
ggctcggaaaaataaaagtcgccctcgcgtccgttagttagcatcaggagaaaaagaaaaaacaatcttaaaaagaagaaaaaaaatgtcgatggcgtgttcaatcccatgcatcaaaatcccaacacgttcctcttccccatcttgcacttcatccagttcatcctattctttgcggttctcttcttctaagcctcacaacagtgtcaccataaggaattctcaagctgaagggcctataagaaggccagtggcacccccaataagagaaccatcatcatcatcaagtgctccacagcttcagaagccaacacttccttctcagcctccatcaccatcctcttcaccccctcagaagccagctactgttgttggggatgataagaatgtcattacattggagtttcagaggcagaaggctaaggggctgccggggttcttccaacagaagaagcttgatgatgcaaatcaagggccctttctttgggttccttggccaaaacgggttttccaatggaagatgggcaatgtttggttttgctgttggattgctaacagagtatgcaccggggtcagattttgttggtcaagtaaagatccttttttcgaattttggaatagtaggtttgggatgaatcccctaagattatatcctggccatagtttcagggaactactccaaaaaaaaaaaacgttttttttttttatatagcaaccaagcggggatttttgttttccccttaatgaaggaaccataaaatcatggttttccttggc

SEQ ID NO: 2617 - DNA, 1468 bp, Glycine max
  misc_feature (257)..(257): n is a, c, g, or t
  misc_feature (264)..(264): n is a, c, g, or t
  misc_feature (275)..(275): n is a, c, g, or t
  misc_feature (312)..(312): n is a, c, g, or t
  misc_feature (339)..(339): n is a, c, g, or t
  misc_feature (341)..(341): n is a, c, g, or t
  misc_feature (392)..(392): n is a, c, g, or t
  misc_feature (437)..(437): n is a, c, g, or t
  misc_feature (590)..(590): n is a, c, g, or t
  misc_feature (612)..(612): n is a, c, g, or t
  misc_feature (695)..(695): n is a, c, g, or t
  misc_feature (708)..(708): n is a, c, g, or t
  misc_feature (711)..(712): n is a, c, g, or t
  misc_feature (720)..(720): n is a, c, g, or t
  misc_feature (723)..(723): n is a, c, g, or t
  misc_feature (725)..(727): n is a, c, g, or t
  misc_feature (733)..(733): n is a, c, g, or t
  misc_feature (736)..(736): n is a, c, g, or t
  misc_feature (839)..(839): n is a, c, g, or t
  misc_feature (854)..(854): n is a, c, g, or t
  misc_feature (1053)..(1053): n is a, c, g, or t
  misc_feature (1182)..(1182): n is a, c, g, or t
  misc_feature (1209)..(1209): n is a, c, g, or t
  misc_feature (1229)..(1229): n is a, c, g, or t
  misc_feature (1257)..(1257): n is a, c, g, or t
  misc_feature (1378)..(1379): n is a, c, g, or t
  misc_feature (1421)..(1421): n is a, c, g, or t
  misc_feature (1428)..(1428): n is a, c, g, or t
  misc_feature (1443)..(1443): n is a, c, g, or t
  misc_feature (1446)..(1446): n is a, c, g, or t
  Peptide Sequence Number=SeqID_6258
  Probeset Number=SeqID_12396
tggtaggacacgtagtgagagatgagtgaagaatgtgatagacagctcaagtggatgatcgtgacacgactaagagaagaagcagtactatacagagctatatgccagaggcacgcagagatcgcacgcgcgagggcaggaggtatcgacagagacggtgaggagagcggccgcgcgaccacgtcgtgcatacgtgatatggagtgagggaacgttgtgtagatatgtgcgtagcgacctggtagtggctgcggagngagtagntgcgtggtggnggtcagaagacaacagccatcgcgccagatcagtcantcagcatgagcgtgcgtagagtcgaanangcatatgtgtgtcagtcatgacagctgtctgacagtgtgagagggcgctgntcgagtaggtgagagagaagagagaagcgagcgcggccgatgacncaccaacagtacagaacatctgtccgcaggcatcagtaggcgtagagtgtcatgcgctagcgagctgacgaacacacagtagataatatagatgtgtgactcgagcagggagcgcgatggcgagggaagaagtatatccgagatactataatntaacatgtatttctctacatcnctctaatccaccaccacacacacgagtcagccagagggatgggacgtagcggctacagccatatattatgataggagggagtngcgcagaacgagngtnngacttggnttntnnntcttanctnactaattccacgtcagacccgtcgacaaccaatagacgccgcaactcaactcatcactaataatagcacgcgccactcacgctataccaataatatatatatnatcacaatctatcancacgacgatataacgatacagtaagtcgcacacgcgcacgcagagcggcgagagagacgagtcagtcgaaggcgagagtgggggagagtcatagagagagactactagagaggggcgtagcgagcgcgtgaagggatgtgagagaaacaccagaggaactacagcaacagacaatcgttagacaagttaagtctaagantaggagtggtacaagcgatggcatgcctggataatgtaatatacatatacactatggttattcttgatatatattataaataagttagttagagtgaacgaaagcgccgcgggtcacagaaggcgttgngggagtacagcgagatccagcgtcctncacgagagatgtgagtgggntggatgtaggagagtgacgcagctagtnttgacactcgaaaccgaggcagagcaccgtgacgtattatatatgttgtgagaagatacactatctattatacaatatcatggtggagagggagagtcctctgcggcgcggtggtgcgggnngtggtatagagaggagtagtcgtcacagctctgttgtggtgngtggctngtggatataaagtantanaacaacacacaccaccaactac

SEQ ID NO: 2618 - DNA, 1848 bp, Glycine max
  misc_feature (1)..(1): n is a, c, g, or t
  misc_feature (25)..(25): n is a, c, g, or t
  misc_feature (45)..(45): n is a, c, g, or t
  misc_feature (63)..(63): n is a, c, g, or t
  misc_feature (68)..(68): n is a, c, g, or t
  misc_feature (247)..(247): n is a, c, g, or t
  misc_feature (307)..(307): n is a, c, g, or t
  misc_feature (319)..(319): n is a, c, g, or t
  misc_feature (348)..(348): n is a, c, g, or t
  misc_feature (363)..(363): n is a, c, g, or t
  misc_feature (397)..(397): n is a, c, g, or t
  misc_feature (399)..(399): n is a, c, g, or t
  misc_feature (447)..(447): n is a, c, g, or t
  misc_feature (457)..(457): n is a, c, g, or t
  misc_feature (522)..(522): n is a, c, g, or t
  misc_feature (533)..(533): n is a, c, g, or t
  misc_feature (598)..(598): n is a, c, g, or t
  misc_feature (610)..(610): n is a, c, g, or t
  misc_feature (779)..(779): n is a, c, g, or t
  misc_feature (809)..(809): n is a, c, g, or t
  misc_feature (816)..(816): n is a, c, g, or t
  misc_feature (844)..(845): n is a, c, g, or t
  misc_feature (865)..(865): n is a, c, g, or t
  misc_feature (944)..(944): n is a, c, g, or t
  misc_feature (953)..(953): n is a, c, g, or t
  misc_feature (964)..(964): n is a, c, g, or t
  misc_feature (966)..(966): n is a, c, g, or t
  misc_feature (968)..(968): n is a, c, g, or t
  misc_feature (982)..(982): n is a, c, g, or t
  misc_feature (989)..(989): n is a, c, g, or t
  misc_feature (996)..(996): n is a, c, g, or t
  misc_feature (1027)..(1027): n is a, c, g, or t
  misc_feature (1061)..(1061): n is a, c, g, or t
  misc_feature (1069)..(1069): n is a, c, g, or t
  misc_feature (1073)..(1073): n is a, c, g, or t
  misc_feature (1125)..(1125): n is a, c, g, or t
  misc_feature (1145)..(1145): n is a, c, g, or t
  misc_feature (1185)..(1185): n is a, c, g, or t
  misc_feature (1240)..(1240): n is a, c, g, or t
  misc_feature (1244)..(1244): n is a, c, g, or t
  misc_feature (1253)..(1253): n is a, c, g, or t
  misc_feature (1262)..(1262): n is a, c, g, or t
  misc_feature (1297)..(1297): n is a, c, g, or t
  misc_feature (1335)..(1335): n is a, c, g, or t
  misc_feature (1375)..(1375): n is a, c, g, or t
  misc_feature (1524)..(1524): n is a, c, g, or t
  misc_feature (1545)..(1545): n is a, c, g, or t
  misc_feature (1577)..(1577): n is a, c, g, or t
  misc_feature (1589)..(1589): n is a, c, g, or t
  misc_feature (1596)..(1596): n is a, c, g, or t
  misc_feature (1600)..(1601): n is a, c, g, or t
  misc_feature (1606)..(1606): n is a, c, g, or t
  misc_feature (1708)..(1708): n is a, c, g, or t
  misc_feature (1718)..(1718): n is a, c, g, or t
  misc_feature (1734)..(1734): n is a, c, g, or t
  misc_feature (1736)..(1736): n is a, c, g, or t
  misc_feature (1748)..(1748): n is a, c, g, or t
  misc_feature (1785)..(1785): n is a, c, g, or t
  misc_feature (1803)..(1803): n is a, c, g, or t
  misc_feature (1811)..(1816): n is a, c, g, or t
  misc_feature (1823)..(1824): n is a, c, g, or t
  misc_feature (1830)..(1830): n is a, c, g, or t
  Probeset Number=SeqID_12397
ncgaggtatgtgtgcaactgatganggtgtgtatcgtgactcgtnggcatctcgtagagaagngctgntcgggagaatgtatacattggaacgtggtatcataggtcgcgctgccgcagagtgtatctagcgacatacgcgatcgagcccggcatgctcagagtaccacgatgcacatgacaccactgtcatggcgtcctctgtcacatcgggcttgacgtgatcattacatacacgccgcgtgcancgtcgccatgagtggctagagctgtcgcgtacgcgcgcgtgagaggtcgttcgcgacagnggacgtgaggcngtgtgcgccatcgtacataacccacatgnaggagagcgcactangatcacagtgagcagaactcacttcatgccaagnangatgatcatcatctacgtcaatactcacagagcgtatatgggtcgcanccatagtgangagaggatgttggtggagacgaatcaacctcatcatacgcgagtctgagacatgacgtacatatngctcgatgacnactacgtcactgcagcagatagtctatcttgctctatagtactctgtatcgagagttgttcgaanatgtgtgctcanttgcagtatgtgctaatatgctactatacagtatatgtcgtactacaggcatgttacgtggtgtacatagacgttgagagagtgatgcagatcgtgacaacgtcaacagtgcgtgggtgtgtggggggagacgagtagatcacatacaggcagacagacgcacagcatntagtcgccatcgatcagacagctgacccgntcatgtncatcatagtgctatgcgtcactcgcctnntttcgctgttgacctcgtancacacatctatagtcatcatacatgagagtcagtatcatatgtacactgtgtatagtgtagtgtagttgtgttgagtgncatgtgtgntattcgtgcgngncngtctcggcgtgcgntctgtgngtatccngctcctcgcctcgtcgtgcgcgagcactatntatgaagtttggtcttagtacatatcatacagcnttatttantgtntataatctctcatcctctacaatctcaactacataatagtcaactacatagnatatgtgctatcctgcggancatgtctactggtctgcggctcctgtctgtgctcatgtcntcactctcacaacatacacgtagtatacgagtgggactcagcacatatgcagtcntctntctccttcntctcttcantcacatccctacatacactctctctccttcatcanacgccagcacgctacatgggtgatgagatagtatgtgnaattctcatgcacacgcactgccatgtcgttctagcgcancagttctatgatgtcacagagtgagcagatgatgagagacgaatagatatcacacagacccaacaagctgtgcacgtagacgttacgccatacatatctatgtaaaagtagacagtctagcacacgagtgacgagacgggtgtcatctnatgtatagtctggacggtcantccgatatgacacacacctcatcatcacacantgatgagagtgnggttgtncatnnttatnattcaccacacaacctacctgagtacctataataaacaaaacagcaaacataatataagaatagattatattttctataacactcctaatatcatattccanccaattacangaagtttgtggtgctngngtcgtatagatnaaagtgtaacacacaacacaccgaggcagcgcccganccatcgtcacccacaagnctcccccnnnnnncgcgggnngggggnaggcactcacactcccac

SEQ ID NO: 2619 - DNA, 1334 bp, Glycine max
  misc_feature (26)..(27): n is a, c, g, or t
  misc_feature (59)..(61): n is a, c, g, or t
  misc_feature (80)..(81): n is a, c, g, or t
  misc_feature (305)..(305): n is a, c, g, or t
  misc_feature (1167)..(1167): n is a, c, g, or t
  Peptide Sequence Number=SeqID_6259
  Probeset Number=SeqID_12398
tttttgttgtttgttgttttttgttnntttgttgttccgtgtttgggatctattggggnnnggagtgggggcggggaggnnatttaatggataaggttattaaccagcagagggaataaagtaaataactctcaatttacatttacgcgccagcgcctcatttgactgccgctgtatgtgccggtgtatgcccttgcgctactctctctccccgatccccgccaccccgctttatttcacaacaagacaatacatatcaactcggcaccaggacacccccacacgggccccctcagcctcgcggncgggcacgcgttgtgcacgggatgttttgaccagtttgtgtgcgggcgcccatggagacacacgacaaaactcgccccccccagcctcccctttcccccgttgggccgctcatcgcccacggagtacccacgaccgcaaacttatacacaatctatccacacattatgaattttttacaatccttttctcccgtgcatcccccccgtttttgttttttgttttttttctcttaccaccagtacattaaaccacccaccatctttcttttcagatctcttttaaccacctcccacacctctcacctcttacataacagttcaccaaaccattggtgcagatatgtaggattactcaaacgttatcccacccgcccccgcacccgcctttattttaaaattttacaacttcttttcaacattcgtcttttcaacacccgccaccaaccctaccctttttatgcccacaaatgctcgttatgagaccaaaagaatttgaaaattcacgatatcgaccactatgtttgcgcatttgctaaaacactaagtgctttttatacaggcaacgaacatctccccacaattttgacctatatgacattgtttaactaacaatcaaaggaagcagacatgcaccatttacgccaccgaatttttatgtgctaattgtacacaacattatattataatatgattatgccgtccaccagcacccagcgccagtctgccgcgcactccctccgtcaactatcgcagaattaaagccaacacacccaaacactctccctcattacttgttctcacacccccccgcgcccacccccctctgttcttgagtatagtttgttgaaatacggaccgtgtnatacacacaaccgcgtgagcaatgacccactcaaaacaattgtgcaggtctgttttcgtccacaagacaatatgtttgattttttccgtgcatatggatcgtaaggctaagacgtcgcggaatagaaacgacgtacatcgacagacatccctctcgctgttctcgac

SEQ ID NO: 2620 - DNA, 1336 bp, Glycine max
  misc_feature (383)..(383): n is a, c, g, or t
  misc_feature (583)..(583): n is a, c, g, or t
  misc_feature (730)..(730): n is a, c, g, or t
  misc_feature (1084)..(1084): n is a, c, g, or t
  misc_feature (1120)..(1120): n is a, c, g, or t
  misc_feature (1159)..(1159): n is a, c, g, or t
  misc_feature (1210)..(1212): n is a, c, g, or t
  misc_feature (1214)..(1216): n is a, c, g, or t
  misc_feature (1265)..(1265): n is a, c, g, or t
  misc_feature (1270)..(1270): n is a, c, g, or t
  misc_feature (1292)..(1292): n is a, c, g, or t
  misc_feature (1309)..(1309): n is a, c, g, or t
  Probeset Number=SeqID_12399
ctcgtcgctctacgtaggacgaagcttgagcttatcggtatgtgagtgctctgcattcgtagctggagtatatacgtaatatactaatagactagtgaccactcttgtacgctctgtactcacgtcaaccactccacacgcacgagccaagctactacgtcgctacgtacaatgcactatatttcaggacgatgtgtgcatagtgtttcttgttttctggaatcactcaatgacacaccatactaaactataatgtaattcatatctgtatacacatcgctcatgctcacgcgtcgactacatcaatcaacgatgtgcacagtagagcgtatctacatagcgggtagatgtgtatgtaggatctagacttgagcgagactctnagtcgccgtgtgtcttatatctataatactactcctgcacgacgtactctctctacctatcagcagctcaatagtgatctgtagtatgagcgatagaatgtattgttgtaagtgctatagttgctactttcttgagtcttgtatctgctcgcgtgccattacttacgtcgtctattgatatagtttatgtttacttaggngcatggatattagaaattagtatgatatgatagattgctgtatttcttgcttctctccacgcctcgtcgctgctccgccgttgttagatatgatgattgatttgttatatgattaaggtaatatgttcagatatatatgttggtcgnatatagttcattatgtctgtattcttctctatatcggcttctgtacgctagactaatatatagagtgagaaatatgcgagatacagcgactgtgtgttattgattgagattattatgcatgaatatactccaccgtattgtgcctggtgaacactatagtattgagctgcctggtaacagatctctcgctcttactctatgatctctgtcaccatcagtcacgaccgatccgctccgcgcgcgcgagtcggatcagcgcacggcgcacgacgcagagggcgtgcataaccaaggcagctccatcaagagacagagagaagtagtagccaaacagacacgagacgccctactgcngtacctcgcacacaaacaagctcactcaggacttcngatcctaggcctgcctataatatctgtgcatacaatccnctttgtatttgtcaagtatgaggtcagtagataagcacgctgatgagtagnnnannncctctctctccctcttatcttattatacagcagattataagtatagttnagtgngtttataatgtttatattgctnctcccctcctccctcgnttccatctatttttcttttaatttttt

SEQ ID NO: 2621 - DNA, 1501 bp, Glycine max
  misc_feature (197)..(197): n is a, c, g, or t
  misc_feature (258)..(258): n is a, c, g, or t
  misc_feature (268)..(268): n is a, c, g, or t
  misc_feature (271)..(271): n is a, c, g, or t
  misc_feature (303)..(303): n is a, c, g, or t
  misc_feature (475)..(475): n is a, c, g, or t
  misc_feature (1224)..(1224): n is a, c, g, or t
  misc_feature (1251)..(1251): n is a, c, g, or t
  misc_feature (1271)..(1271): n is a, c, g, or t
  misc_feature (1440)..(1440): n is a, c, g, or t
  misc_feature (1476)..(1487): n is a, c, g, or t
  misc_feature (1489)..(1490): n is a, c, g, or t
  misc_feature (1501)..(1501): n is a, c, g, or t
  Peptide Sequence Number=SeqID_6260
  Probeset Number=SeqID_12400
ctatatatgtacgtcatgtggctggtcggaggatgcgagcgtaccgctgcgtgtgcggcgtagccaccgtagtacacgactcacacacacaacacgttattagtaatcttacataccaccaccacgtcttcgaggcgtcagagactccgctcatgtgcgtctgctgtgctcatgctcactctcagccgccgccgtgntgcgatcggtgtttcaggtgggtgtagtgtgagtgattatactcggttatcatctagagtnattatagatngcntggtaacgctataacacatagaggttgtgatntgtagcgtcatcgctgataaaaggtatggcgcgaggcagagctgagattcggaagatacaaggtataaacaactgaataagtcagcgcaacaccggcaacccacacgtaaatttgttgtccgcatgtgcggcgtactcacatgtgctaccaacaaggatatatcattccacnggcccgcgcaccaccaaattaatcggagtagagtaccacaatcacgaacgtcctaatcatctctcctgcgtctatataagtgttataacttttcgtacacatacgatagcgtagacgatgcagggtgagatataataatatacatcgatcagggcaggacataggttcggtagacttatgtgcgatatgattggtctgacgtgtcgagggttgtcgatagtggctatgcacacagcggcgtgcaccaagacgtcatgcgcgtctatagtatgtacttatctctcgtgtgtgaagcgcttggctcacaatcatccaatctacaggtagacgacagtcgcggtcacgcgagatgcgctcccagacgaaaacaaaaaacattagtcagggagaggcgtttagataggggagacgatgacagggggccattacctaactagagttatcatgagtgaatgtgttcaagtcttgattagcgaggtcgagtttattatctcctctcaccgcgtgcgcgcatgtcttacctaagatagactccaactagtatatttaataacacaccatcatagttcagcacactatcaaacatacaccacacaaacaacacacaagagggcaaacacaaaatacgcccaaaagaacaatacaaatacacacaccgaccaccacagacaacaccggaacgtcatccatgtactgagctatcaaattctggctcgcagttcgcgtccctccgtgatttgtttggtgtntcagctcaaaatgcacaagtacgttcntcctgtattttgtctcttcncaatctggctgcgaatgttgtgctggcacagagtgtccggtgacatgagggaggaatacaaagaaactcctttagcgcttttaaatctacgccctctatctcactattcactatcccataatttacatacattctctcaattctatattttaacatcacctgttattanacattaattataataattatataataaacataattnnnnnnnnnnnnannttttttaaaan

SEQ ID NO: 2622 - DNA, 599 bp, Glycine max
  Probeset Number=SeqID_12401
tacgcgggtgccaatgaaaatggatatgttcaaacaccaaatgtcgatccattaaaagaaatggttgacctcatcagcagctcaagatcatatgaagcaaacgtgactgctctaaatgcgaacaaaagcatgctgatgaaagctttagaaataggaaagtaaggtgaaaacaattggttaatgcaatatctcctttccagcttcaaactgctcagcaagcaagtgaattgacgaatgcatcgtccgttcaggcggctgcacctaaaagtcaaacgaatttctctgatgtgctgaagaattccattgaggcattgaatcaatcacagctgaaatcagaccagtatacaaatgcgcttgcacaaggaaaagatgtcaatcttgatgaagtcatgattgcttcacaaaaagcgagtgtcacactcacagctgcaacagagtttcgaaataaagcagtcgaagcgtaccaagagattatgagaatgcagatgtaggaggtgctggtggacaaaaaaagactgaatggaatgaccgggggttaagatgaatcgtactttaatgcaattaagaacaaaaacagttgagttttggcgaaatcgatc

SEQ ID NO: 2623 - DNA, 780 bp, Glycine max
  misc_feature (5)..(5): n is a, c, g, or t
  misc_feature (78)..(78): n is a, c, g, or t
  misc_feature (619)..(619): n is a, c, g, or t
  misc_feature (631)..(631): n is a, c, g, or t
  misc_feature (754)..(754): n is a, c, g, or t
  misc_feature (756)..(756): n is a, c, g, or t
  misc_feature (760)..(760): n is a, c, g, or t
  misc_feature (768)..(768): n is a, c, g, or t
  misc_feature (777)..(778): n is a, c, g, or t
  misc_feature (780)..(780): n is a, c, g, or t
  Peptide Sequence Number=SeqID_6261
  Probeset Number=SeqID_12402
gtgtnccgggccccccctcgagcaaccagttattgaaattgatttattctttattcaagtaagaaaaaatggaagcanttattacggaaaataccgttacgcctcagcaagataccaaatggtatgtgctgcgtgttgtaagtggtaaagagcgcaaagtgaaagagtatctggataaagatattatcagaagcggctggcaggaattgattaaacaggtgttcttacctatggagaaagtgtataaagtgcagaacggtaaaaaagtgatgcgcgagaaaaactatttccccgggtatgtaatgatggaagtattagaaggtaagttgaatgatgatatgattcaacatatcagcaatatcagcaatgttatgcactttcttacggatggtaaaggttcaaagggaaatattatcagtttacgtaaggccgaagtaaataagatgcttggcaaggtagatgaaatgaatgatcagggagttaccatgagtgagcctttcattgttggtgaaacaatcaaaatcatcgagggccgtttaatgactttaatggtgttatcgaagaggtaaatgatgagaagaagaaactcaaggtaccgtaagatctttggtagatctanccggttgactanctattccagtagaaaaattctaaatctaattatcatagtaacctttgtccggacaatgcttttattactttacttaatctaaggctttcaactaactaattacaaataaaaataatatcgtcncntttntcttcgcngcacgcgtnnan

SEQ ID NO: 2624 - DNA, 660 bp, Glycine max
  misc_feature (601)..(660): n is a, c, g, or t
  Peptide Sequence Number=SeqID_6262
  Probeset Number=SeqID_12403
aaggaatcagtaacataaaatggaggttcaatttgccctcccatttcactaacacacacatcacatcatatcagagactccatctccctctcgcacgcgacgagggagtcccgcttcggaatctcaccccctctttctgcgaattcgcaagatggttgctcagaaattcgttgtcgacttgaacaagccccttgtattccaggttgggcatcttggggaagcctacgatgattgggttcacgatcctatcgtaaagcaaagaaaggcctccggttttttcaaaagcggtttccctcgagttgttcacacgcactgcatggtgggtgattcccaaccgtttggggtgcccggtggcgaggtgggttcattttccaacttctgccaaatcaagccctccccttctcttgaatggaagctctggttcgtcttttctcgggaatcttttgtttgggcactttgggctgaaaaccaccttggcaccggttttccctccttccactggtaaaaaacccaagagggttactgggggagaaaaaaccctttgcaatttaatcctcccccccatggggttggccaacccacaaagccaaccccaattggnnnnnnnnnnnnnnnnnnnnnnnnnnnnnnnnnnnnnnnnnnnnnnnnnnnnnnnnnnnn

SEQ ID NO: 2625 - DNA, 598 bp, Glycine max
  misc_feature (116)..(116): n is a, c, g, or t
  misc_feature (120)..(122): n is a, c, g, or t
  misc_feature (125)..(125): n is a, c, g, or t
  misc_feature (131)..(132): n is a, c, g, or t
  misc_feature (140)..(140): n is a, c, g, or t
  misc_feature (142)..(142): n is a, c, g, or t
  misc_feature (147)..(147): n is a, c, g, or t
  misc_feature (155)..(155): n is a, c, g, or t
  misc_feature (164)..(164): n is a, c, g, or t
  misc_feature (172)..(172): n is a, c, g, or t
  misc_feature (174)..(175): n is a, c, g, or t
  misc_feature (180)..(180): n is a, c, g, or t
  misc_feature (185)..(185): n is a, c, g, or t
  misc_feature (188)..(189): n is a, c, g, or t
  misc_feature (202)..(202): n is a, c, g, or t
  misc_feature (206)..(206): n is a, c, g, or t
  misc_feature (224)..(224): n is a, c, g, or t
  misc_feature (226)..(226): n is a, c, g, or t
  misc_feature (232)..(233): n is a, c, g, or t
  misc_feature (239)..(241): n is a, c, g, or t
  misc_feature (244)..(244): n is a, c, g, or t
  misc_feature (252)..(252): n is a, c, g, or t
  misc_feature (264)..(265): n is a, c, g, or t
  misc_feature (267)..(267): n is a, c, g, or t
  misc_feature (272)..(272): n is a, c, g, or t
  misc_feature (274)..(274): n is a, c, g, or t
  misc_feature (279)..(279): n is a, c, g, or t
  misc_feature (282)..(282): n is a, c, g, or t
  misc_feature (284)..(284): n is a, c, g, or t
  misc_feature (296)..(296): n is a, c, g, or t
  misc_feature (304)..(304): n is a, c, g, or t
  misc_feature (307)..(309): n is a, c, g, or t
  misc_feature (324)..(324): n is a, c, g, or t
  misc_feature (328)..(328): n is a, c, g, or t
  misc_feature (334)..(335): n is a, c, g, or t
  misc_feature (343)..(343): n is a, c, g, or t
  misc_feature (360)..(360): n is a, c, g, or t
  misc_feature (362)..(362): n is a, c, g, or t
  misc_feature (385)..(385): n is a, c, g, or t
  misc_feature (401)..(401): n is a, c, g, or t
  misc_feature (403)..(403): n is a, c, g, or t
  misc_feature (408)..(408): n is a, c, g, or t
  misc_feature (417)..(418): n is a, c, g, or t
  misc_feature (420)..(422): n is a, c, g, or t
  misc_feature (425)..(425): n is a, c, g, or t
  misc_feature (427)..(428): n is a, c, g, or t
  misc_feature (430)..(430): n is a, c, g, or t
  misc_feature (433)..(434): n is a, c, g, or t
  misc_feature (449)..(450): n is a, c, g, or t
  misc_feature (453)..(453): n is a, c, g, or t
  misc_feature (458)..(458): n is a, c, g, or t
  misc_feature (472)..(473): n is a, c, g, or t
  misc_feature (476)..(476): n is a, c, g, or t
  misc_feature (479)..(479): n is a, c, g, or t
  misc_feature (482)..(482): n is a, c, g, or t
  misc_feature (484)..(484): n is a, c, g, or t
  misc_feature (486)..(487): n is a, c, g, or t
  misc_feature (489)..(489): n is a, c, g, or t
  misc_feature (493)..(493): n is a, c, g, or t
  misc_feature (495)..(495): n is a, c, g, or t
  misc_feature (497)..(499): n is a, c, g, or t
  misc_feature (502)..(502): n is a, c, g, or t
  misc_feature (508)..(508): n is a, c, g, or t
  misc_feature (511)..(511): n is a, c, g, or t
  misc_feature (513)..(513): n is a, c, g, or t
  misc_feature (516)..(516): n is a, c, g, or t
  misc_feature (521)..(521): n is a, c, g, or t
  misc_feature (532)..(532): n is a, c, g, or t
  misc_feature (534)..(534): n is a, c, g, or t
  misc_feature (537)..(537): n is a, c, g, or t
  misc_feature (544)..(544): n is a, c, g, or t
  misc_feature (548)..(550): n is a, c, g, or t
  misc_feature (562)..(562): n is a, c, g, or t
  misc_feature (569)..(569): n is a, c, g, or t
  misc_feature (573)..(573): n is a, c, g, or t
  misc_feature (578)..(578): n is a, c, g, or t
  misc_feature (582)..(582): n is a, c, g, or t
  misc_feature (589)..(589): n is a, c, g, or t
  Peptide Sequence Number=SeqID_6263
  Probeset Number=SeqID_12404
tgttagacgcttcttgctagtagtgcaccctcgttgccttgcgtgcgccggttgcgcatccccctatcgtgcgcatcccccccaatcacctttccgaatctactaacaccagtctnaacnnncgnccaccnncgcctcanancccanatcttggnttccactcncccagccntnnccaangcgcntgnntacaccgatgtcnacgncctccgccccaaagagtncngggatnncaagtnnntcnccgttcangggggcgatcannangattntnaggtngcncncctagtgggaangggagatnacnnngtggttcttgaaggnttanacggtnnaggcatgngcgctgataatcaatantnttaaccttgttgctaaatgtganattataggagagattnantactnctaaccttnngnnnagncnnanttnnacatccctttgattnncanaaatnagtccttttcactnnaantantangngnntngcanantnnnaanttattnttnancanccggntcggatatggntnccnttcattnatgnnnttttagcataantctgccntccnagggntatncttaatntgacttttt

SEQ ID NO: 2626 - DNA, 1386 bp, Glycine max
  misc_feature (78)..(78): n is a, c, g, or t
  misc_feature (420)..(420): n is a, c, g, or t
  misc_feature (462)..(462): n is a, c, g, or t
  misc_feature (527)..(528): n is a, c, g, or t
  misc_feature (548)..(548): n is a, c, g, or t
  misc_feature (564)..(564): n is a, c, g, or t
  misc_feature (569)..(569): n is a, c, g, or t
  misc_feature (890)..(890): n is a, c, g, or t
  misc_feature (1114)..(1114): n is a, c, g, or t
  misc_feature (1297)..(1297): n is a, c, g, or t
  misc_feature (1359)..(1359): n is a, c, g, or t
  misc_feature (1385)..(1386): n is a, c, g, or t
  Probeset Number=SeqID_12405
cgacgcgacacacgcatccgcgcatccaaaatcaacgccaaatctaccactgcgcgcacagtgtggtgtgtgaacacnatcatattgatgattgtgtgctcatgtttttgtatgtgtatgcttaagatgttatatattgtggtggtgttctgatattgctcgtgtcttcgcgtgtcagcacgccatctcctgtctgtctcattcatactatatgccatatcggtcagcacaatgactcacgaattagccgacactgaacccgaccacatcatctcgatctcttcctcttatatgagttgtcaatacgtgacgtaatatatcgtgctcactgctggtgacacgcgacagcgctgacggcacccacgatcacacgacaattacaacatagctgacgcgtgcgcacgcgcgagaggccacacntcataatcataggagagtgtcggagcagacactacagagctngcagaggcgtcgaccacatacacttccgcataatcaacaccatatccatacgtgagtgacatagnnagttgctaacaactcgtacntacatgctcatcacgnaatcntcacagagatactaccatcatctcgacgctcgcatgatacactatacgctatatgtattcgaactgagcacgctccatatatatctcgtcgagtcgagtcgtagagttatgacactacgtcatctttcgcacatgtgtggcgcggaccggcgagtgctgcgctcgacacaagactagacactagatagatggtggagtgtagtgatgcgagatagcaatagacacaagagggaccacaccctacagaatatcaacatattagcgcaatcattatagacgtggtaggcagaccatatatcaattcgtatgggctgagatagnaactaccacaacacagtacataatgcgcgcatcattatgcacaccctctaccaataaccccaacactcacaactacgcgtcgccccataccgtgacgacctgtccacacatagaccggaagcgtcagcgagaggacgtggacagtatcttgctggcgtcgattagagtaatctgcatgagcgccatatcacgccaatcaccagtcttcgccctcaccacacacnccatcaatcccgacacgccgaagacactcctacaactgacaccatacacacagcagaggacgagtcatccactgatcacatctttctcctactagtcgctgcgcgtacacagcgagtatttagtggagtgtagaaccactcacgccattattgagatgaatgaggcgggcggagagcgattgntttataactaacatcaacaaaccacagtgatcctaaaatgctcgcaggatctaaacaaatcnacacgccacccacattgccaataaann

SEQ ID NO: 2627 - DNA, 1564 bp, Glycine max
  misc_feature (1)..(1): n is a, c, g, or t
  misc_feature (46)..(46): n is a, c, g, or t
  misc_feature (94)..(94): n is a, c, g, or t
  misc_feature (110)..(110): n is a, c, g, or t
  misc_feature (112)..(112): n is a, c, g, or t
  misc_feature (131)..(131): n is a, c, g, or t
  misc_feature (143)..(143): n is a, c, g, or t
  misc_feature (158)..(158): n is a, c, g, or t
  misc_feature (225)..(225): n is a, c, g, or t
  misc_feature (293)..(293): n is a, c, g, or t
  misc_feature (317)..(317): n is a, c, g, or t
  misc_feature (361)..(361): n is a, c, g, or t
  misc_feature (869)..(869): n is a, c, g, or t
  misc_feature (977)..(979): n is a, c, g, or t
  misc_feature (1351)..(1351): n is a, c, g, or t
  misc_feature (1374)..(1375): n is a, c, g, or t
  misc_feature (1418)..(1418): n is a, c, g, or t
  misc_feature (1470)..(1470): n is a, c, g, or t
  misc_feature (1507)..(1507): n is a, c, g, or t
  misc_feature (1536)..(1536): n is a, c, g, or t
  misc_feature (1547)..(1547): n is a, c, g, or t
  misc_feature (1549)..(1549): n is a, c, g, or t
  misc_feature (1554)..(1555): n is a, c, g, or t
  Peptide Sequence Number=SeqID_6264
  Probeset Number=SeqID_12406
natcgagatatatatcatacggtcatggatgatcatcgcacggatnacgctcgtggttatgagtgcgtagatgagaatcacactcatacgaagnaagtcgtgtgtgtacngncgtctcgttgatgcttatngtgtagatatantcgtagagatatcanccgcactcctataaatcgatatcgagctgtgctccgcgacgctgcaccacaagcatccacaacgccnatacacagcggagagtagtcagacgtgaggtgtgagatagttcagcagaacgatcgtgtgattcgcgnttataattcccctagccacaaagntacctcgttgtgagatctaatcgtgcatattaatgtatgactantatatgtgaagatacgctcatttatatagaaaacgctcggagtcacagacagacaacgtcggtgcgcgcgcgagatcacatagttagcgactagagacaatcgtgacgaacatacataagcgtgacgatattatttgtgcttctgtaatatgttgattgacagagataatgagataacttcctagtagcatagtctgatgacacgcgagactgtgcaatgatggtagtatctatctgatcaatcagtattgaacgcgctgctactcgcgataggttgtagtctgacgagagggcgactaatgcagtggacgacgccagacgaagataagccgagagatttactatcgcctatgtatatgatcagctccttcattctaattctccgctccgcttagtgtgtggtgggattgcattaaagaaacagagagacagataggcagtagtatgtaatagagcatcatacatgggctccgtgcagacatcacgtcactcctagcgtgcgatgcantataacatcagtggtatagtgcggcgcctcacaaccaatgacaagcacacacattcaataactgtgaccactaatatcctatatgtgctagtgacgtactagatattnnnattgtctctctcgtgctcgtccgtcgtgctgtgattgtatatacgacccagttcatatcatgactcgaaatcacgtatatacaatactcagctatacagacgacagtatgtggcagtgtctacgaatctgctgttcgtacgtatgacctacgagcggagcgtgtccgttctccacgcgtgtgtgtaacgagaccgatgcgggctgaggctacacatgtcgatcgcggacccctaatactactcgccagaacagcgtgagagcagtgcaggagtcggacgtgggtgagagtgggaaggggtgagtagggtatagatagaatatagtgatcatgtctcggatgtggcatacgggcctcatgtacaaattacagntacatcaagatagtcgttgcggnntcgcgtatatgtcgacatgtctctctcattatatagcatggtnccatcttctcgcggtcctgaataatattcgtgtacctcctattctctttagntggtctgcttccgttttttctcttctgatatatatcnagatcatatatactatcttcgtgcgcatnatattagatantntatannatttattat

SEQ ID NO: 2628 - DNA, 1418 bp, Glycine max
  misc_feature (97)..(97): n is a, c, g, or t
  misc_feature (154)..(154): n is a, c, g, or t
  misc_feature (219)..(219): n is a, c, g, or t
  misc_feature (234)..(234): n is a, c, g, or t
  misc_feature (300)..(300): n is a, c, g, or t
  misc_feature (399)..(399): n is a, c, g, or t
  misc_feature (629)..(629): n is a, c, g, or t
  misc_feature (686)..(686): n is a, c, g, or t
  misc_feature (709)..(709): n is a, c, g, or t
  misc_feature (1163)..(1163): n is a, c, g, or t
  misc_feature (1248)..(1248): n is a, c, g, or t
  misc_feature (1278)..(1278): n is a, c, g, or t
  misc_feature (1316)..(1316): n is a, c, g, or t
  misc_feature (1335)..(1335): n is a, c, g, or t
  misc_feature (1345)..(1346): n is a, c, g, or t
  Probeset Number=SeqID_12407
gggtagcgactgagatgcagactagacgctcgtctagagtcgggttacatagagctgcgtagtgtcatattgctagtatgtcgtagagcgtgtctanttagtagagagttggagtctgtgtactgacaggctgctatatacacacatacgagtngcactacatgtcgaccgcgatctgctcgtgcaatatcggtcatgtaatacctaatatcagcggtngtcgcgagttgtgcncggcagagagatgaacgcactaggcctgtgttacgatctatatatcatcgtctgtggtctatttantgtagcgtatggttcatctgcgttagattaactactagctatcgtatgattagacatcggaccgttcgccgagaacgaagcgagatcagtgcgagtggnctatgttgcgtctagtgaggtctatcaatcctgttgtgtcctcatctcttcacggcacctatctgtgtgacaaagatctgtctgtctacgtatattgtcggtaaattcagtactatgtgtagtatcacagacgttaatatgatagtgcgatcctgactgctgtgagcatgactagtcgtgtcgtgatgcagacgcatgatgctctgacactgagctgagagtgataaganatatactagcacaagttatccttagacttagtacttgatctctctgtgccggcatcntgtatcttttgttgcaccgtgtngggttcggctgcctgcagacgtcatccgagttactatccctgcctgtgtgtgaatccgcactatgcaataatgtaacgctaggctcacagtgtggcgcactcaactactgcgtacgtcgcgcaatcgatatgcgcacacccgcatgaatgtcaattgcgatgtgtctttcttaatacatcaacactgtactagatatcaggtgtaggctggctaaacaagaacagccgcgcgcgacgcgctagcagcgcgtccaccgccggcgttgcgtgcgataaaaaagagatagacttaatcagagtgatgagtaataatagagagagatagagaatatgtgatggggctgtgctacatgcggtctatctctatggcttagtggtctatcggataacttatacttagtatacacattgatcatttcatctcatctacactgtcgtgaaagaatgatgagangtgaagagtacatgtggattcggcgtatgcaccgcgtggcgctgcgggtgtgatgaagaagcgtgggcagaggataaggagatgnagcagaattgtcgattcaatcactcgcagntagattgacttactaatttacatttatcatatataatntaataaagaatctcgcggnaggcgataanntactctctccctctccctccgctgcgtgcctgttacgtatgctggtggctagtatcgtgctgacggtgtgtg

SEQ ID NO: 2629 - DNA, 406 bp, Glycine max
  Peptide Sequence Number=SeqID_6280
  Probeset Number=SeqID_12408
gtacatacacccaggaagtgtcggatcctaatcggaaggaacttcccttgatcggaatccaatcgacgacctcctccaaatacagcttggacgtgcctcgccttctacatccagagccctcgccatcaacacctatgaccgctcctcctcttcccgcttatccgtctacaaggactctggctacgactgcgtcacctgatctatctccaagaattccgacgcttccaacaaagaatctgatacagacatctaggagtctgatgtcagtggctactacagagatgacacatcgtggatctcgtggatctgcactttgctacgaaatgacttcttctgcacaggtgatgacgattacatccatcaccacttcgacgtgtgaggtttgatcagtaaagtgccttactat

SEQ ID NO: 2630 - DNA, 950 bp, Glycine max
  misc_feature (345)..(345): n is a, c, g, or t
  misc_feature (854)..(855): n is a, c, g, or t
  misc_feature (935)..(935): n is a, c, g, or t
  misc_feature (943)..(943): n is a, c, g, or t
  Peptide Sequence Number=SeqID_6281
  Probeset Number=SeqID_12409
taccattctctttcaccaaccgtccatccaacatatcaatacccgataatctttaccctggccatgacctcgctaggggttctactaccttcctcgtcggtgatcggactatcatttcacgcaaagcaagaccgcacaatgcttaccataatacagaattacaatccacttcgggcagattccgtcccaattaacattcagattaatatagccaccaaatatacaatgatctcgaactatatttcgttccgaattgcaatacaattgcaatacagtattttcgtgtgttaactaaagtattttttatgatattgttgcccccaccctatacattccatttaaatntctgctttcactcttttattaatagaaatggaattgaattattaatccaattccaagggaagccgggacgagattcccgagtttcactccgaatttcaattagggccagaattagacccctattccgtcacagagcctaacttattctatgacgaaaagtaaaaaaaagaagaaataaaagacgaaataaagaagaggagattaattacatattaatcacacacagttaagacccaattggatctataatcttcctcacccccttccgtgtcaataactagaatgaaaaaaaagggaatatcaatgcatctggaaaaaaaacgattgatctccatcaagagacccgccaaagccccgaaccatagagtacttactccgggtgccacggaaagatatgtttttagatctcgcatttcccatcctccttggtaatgcgttttcaatataaaatttatttgaagggtaatattcctttcggattaatctaaagaatattagctacatttcgnnagaatcctttttttgccggatcatatcctatttccaaaacaaaggaaaggaaactaaaaaaaagggcagcccacctcagnaaaaactncgagccg

SEQ ID NO: 2631 - DNA, 1136 bp, Glycine max
  Peptide Sequence Number=SeqID_6282
  Probeset Number=SeqID_12410
aattaattaattaaaataaaagaatttatgacaggagtcaagcaacaagccgtcctctccaagtaccaaccttcccaacatgccgaagataaagaggaaaaggctatgcttaacagcaaattacaacttactaaaaaggaacgtttccttttagaacttatcatgctcagccctattcttatcgtcctcactgtcctccacaccactcactcctttgtactcactctcttccttttccatgtcgttcttactgtcttccccatcctcttcctcagaaaaaagaacatccacattgactggaaaggacttctcaagcacgaccttgctaaatacaccagagtcctcaataacgacgtcaagcttatcgctatccctgctatgttgctcactgccatctataccacttatagattcatgttcccagactatccttatgatagattcagaatccctcaattaagtgataaattggctgctattgtcttgactattgagtttgtgatcttaaacccaatcgttgaagaacttttctggagattctttgctgatcttttcactggaagaagcaagactatccttaacagattggacttaagcatccactttggactttaccactggtttgtggcttactatttgtcacaagaccttttgttggctacaggtggattcatcggtgtggcttctttgggctttattttaacctatgtgaaacaaaaagccggattggttacagcaatgattttacatgttggtgttgacttggctgctgctattgtcattgtcgacatgcaaaacagattcattcccttctattaataaatatttcagaaagcaagattttataaaaaaaactcaagaacttgatcgttttattttttttctttaatcgtaatttgtaactaaagggaaataaaagctttcagagcttttttggctgtaatttcatgtgcatgcagttttctgtcttttgttcgggctttttgcaacttatgcaatcaaaatccaaaataaatgattgtgtatacaccttttatttagtttagttcgacttctgtctcttttattttattcatatcatttatgctttatttatcttaaagcttgtaataatttttcttcaactttcctctcgt

SEQ ID NO: 2632 - DNA, 654 bp, Glycine max
  Peptide Sequence Number=SeqID_6283
  Probeset Number=SeqID_12411
actgttctctaatctaaatctaatttcacctttcctacaaaacctaaaacctttttcttattacacaacctaaaagtctctaagtttctgacaatgtcggaagagttcgacgaatctgagatcattttctccgacagcttcttcccaattcgccgccgcgaggacgtgatcgagaaagagaatcgtccggttaatttccgagaaaactccgaaagcagaatgagaaacacatcgaggctgagtaaaacgacgccgttgccttcaccggcggttttctcatcgtcgcttccagtgaatattccgggaaggaggtattctgaggatgaggaatattcggaagacggaggaaggagaatggttccgccgcatctgatcgttggacggaggatcgaaagcggtcaaatggcgttttccgtttgtacaggtcagggaaggactcttaaaggccgagatctgagccgggttcgtaattcggttctcaggttaaccggttttttggaggcttaaatatggaccggtttttgatttattaaaaaaattcgtcttccaatttttttttttatttagcggaagaaatcagttgtctgatattgttgttagtttagtcacttgaacgaatgtcaaaaggaaaatgtcaaaaagaacatttatttc

SEQ ID NO: 2633 - DNA, 446 bp, Glycine max
  Peptide Sequence Number=SeqID_6284
  Probeset Number=SeqID_12412
cggatgcgacaagacaacggaggggggccatactttatgattctgaggctaatgggcaaaccatgatctttgacacggacgcttaagcgaatcgtgtggaatacagtggcattattcagaaaggattggggcttgaagctcaatgatgctctatgggcctatatgacaacgctcaagaccctatatggggttatcaccgatgcagccagagtgtgggaagacatgccatttaccagtggagctggagcataaagcatattgcgctctgcgattgcttaactttgacaataatgcatgcggcgaaaagaggaaagagcactttcaggagttagacgagatgagactgaatgcctatgaatcgtgcagaatttacaaggaaacaacgatagcatatcatgataagaagctgcagaggagagaatttcagccaggacagcgagtattgc

SEQ ID NO: 2634 - DNA, 1946 bp, Glycine max
  misc_feature (1)..(1): n is a, c, g, or t
  misc_feature (19)..(19): n is a, c, g, or t
  misc_feature (21)..(21): n is a, c, g, or t
  misc_feature (23)..(23): n is a, c, g, or t
  misc_feature (25)..(26): n is a, c, g, or t
  misc_feature (53)..(53): n is a, c, g, or t
  misc_feature (60)..(60): n is a, c, g, or t
  misc_feature (102)..(102): n is a, c, g, or t
  misc_feature (120)..(120): n is a, c, g, or t
  misc_feature (122)..(123): n is a, c, g, or t
  misc_feature (158)..(158): n is a, c, g, or t
  misc_feature (180)..(180): n is a, c, g, or t
  misc_feature (189)..(189): n is a, c, g, or t
  misc_feature (221)..(221): n is a, c, g, or t
  misc_feature (547)..(547): n is a, c, g, or t
  misc_feature (580)..(580): n is a, c, g, or t
  misc_feature (681)..(681): n is a, c, g, or t
  misc_feature (789)..(789): n is a, c, g, or t
  misc_feature (975)..(975): n is a, c, g, or t
  misc_feature (1046)..(1046): n is a, c, g, or t
  misc_feature (1099)..(1099): n is a, c, g, or t
  misc_feature (1130)..(1130): n is a, c, g, or t
  misc_feature (1135)..(1135): n is a, c, g, or t
  misc_feature (1181)..(1181): n is a, c, g, or t
  misc_feature (1268)..(1268): n is a, c, g, or t
  misc_feature (1270)..(1270): n is a, c, g, or t
  misc_feature (1344)..(1344): n is a, c, g, or t
  misc_feature (1380)..(1380): n is a, c, g, or t
  misc_feature (1395)..(1395): n is a, c, g, or t
  misc_feature (1397)..(1397): n is a, c, g, or t
  misc_feature (1409)..(1409): n is a, c, g, or t
  misc_feature (1434)..(1434): n is a, c, g, or t
  misc_feature (1465)..(1465): n is a, c, g, or t
  misc_feature (1496)..(1496): n is a, c, g, or t
  misc_feature (1511)..(1511): n is a, c, g, or t
  misc_feature (1520)..(1520): n is a, c, g, or t
  misc_feature (1552)..(1552): n is a, c, g, or t
  misc_feature (1557)..(1557): n is a, c, g, or t
  misc_feature (1559)..(1559): n is a, c, g, or t
  misc_feature (1574)..(1574): n is a, c, g, or t
  misc_feature (1584)..(1584): n is a, c, g, or t
  misc_feature (1688)..(1688): n is a, c, g, or t
  misc_feature (1735)..(1736): n is a, c, g, or t
  misc_feature (1794)..(1794): n is a, c, g, or t
  misc_feature (1845)..(1845): n is a, c, g, or t
  misc_feature (1888)..(1888): n is a, c, g, or t
  misc_feature (1946)..(1946): n is a, c, g, or t
  Peptide Sequence Number=SeqID_6285
  Probeset Number=SeqID_12413
ntgtagtattagtgagtanananannttttttattatttattttttaatgaancaataancaggcacgcctagaaggtaatgtaatcaacaacatagatgangagattataacacgaatnannaacacccccccctacaccaccgctctccccccccncagccgcctcgaccctgcgtanatagcagcnctccacgtaccatatcactagcatcgcactanttatgtctcgctcacacctatacattgagccctgctactacatgcacctcgactcagactacttgatcaagaggagtgtgtaatatagtcagtcattataattatatatgttattaatcatacaactctctatcactgactcacgtccctctgtctactgatcctagttattgagaaagagttgatataactatcgacgacactgcacagacacccccacgacacgcttcagagaagaatataatgatatatctataaattgttacatgtatatatctgcagcgtgtgagagtgccgtctatagacacatcttcaactctacagcntgcacactacaataggttgagacagcacaaganatcgagtacaagagagcgagcgactgcaatatatgctacacaagatgagaagatattaataattcatgtacaggaacaatgatacttaatactcagtaccnaagacagacgattccaacgcgcacacacagaatctattatgaaacactaatatcagcctttagtatcaatagataagttacgcacacagaactttacacagaaatatntatatatctctgtcgtcctcatcatctctacttccgacagtcacagtacgaggcactgctattctgacattgtgcagcgctacgggagctcagtctataatgtatcacacgacactcacctactgctgctgactcactcatagatcacatgactacatatatcatgtcacagtgcaagagagctgntatgatcgcgtcactccgaatatagtactacctcacacatcctactctcgtacgtatgccacagctcgccnctagtactccacatcatacgacgctactgatctatcatattctcgtcggctcntagtgtcatcatcgtgtgacgtcgcgtgcantgatngtgaggtgtgatgactatgctagatagtatgcagaagagacagttnccgccaccgtgcgtctgatattgcatattctgtcgtcgacgtgtatgatgctcacactcaactacatcatatcaattacaatgagtntntgtgtgcgtgttctctttctgcttctctgcactcgccgtctaattctgtctcctacatggatatcacaacgtanatcttacatgatgctgtattgacagtgtccaatgantcacatcactcgcgnantactgtgtacanagagtacactaccacattatgtcgncgtctcactatcgactctctgcatgcatgtnctgctcctgcgtctcttgcactgatcattantatacatgctttgantaccgtagncctactactgattgtgtagtgacgtccatctntgtcncntatatgattctatantcacacatgntagcgatcatgctctacatctatgcgacactgtgtctgacccactgcatgtgtgtatgtatctgcccagttgcatgaacgtagaagactctgcgtccactacgncgtggcactcgactatgcgacacgtcctgccgtgtgtgctagtcagnnatgctctcacgcagcagatagatcgcaggtgagcctggtcccgcgcatgctgtgatgngccacgcatgagagcggtgacgagactgatcatctgaatccagactagtcngatcgacgtgtgaagcagtgatagctactctgcacagctgcgntgtcagtctgagacagtaaatgtcagtagctacgtctcatgcagtgtgctgcgccacn

SEQ ID NO: 2635 - DNA, 1449 bp, Glycine max
  misc_feature (22)..(23): n is a, c, g, or t
  misc_feature (33)..(33): n is a, c, g, or t
  misc_feature (108)..(108): n is a, c, g, or t
  misc_feature (209)..(209): n is a, c, g, or t
  misc_feature (861)..(861): n is a, c, g, or t
  misc_feature (894)..(894): n is a, c, g, or t
  misc_feature (1201)..(1201): n is a, c, g, or t
  misc_feature (1374)..(1374): n is a, c, g, or t
  Probeset Number=SeqID_12414
aagagattaccacacaaaacannaaaacacaanaatacgaatacatatgatacaaaatagatgaaataaaaaacaagaaataatatcaagtaaacacaaagagagcanaccagcaccacgaccagacagcgaacgtgataccctatcccccagcgtatttgcggtgctcataaaatactaatatcagcaatatatattggatgaaaacntaatataacaaggctaacccccgtgtggttctcggctcgacaatcgggcgaggggtgatgtaaatatctatgtactctaattatcttcgtctatcgtcttaagacaaaaatatatcaaataaaacgaggagggagaaacgagagtgaggcaaacaactaacagcagggcggcgccggtggcgcgaactaggcgagaggtcagggggttgttacaacatcgttgcgtcgtctgtactgtgactttcccgtttgatttttttgcctatgtttctggtatcactatttcatcactcgtgtcggggttttcatcactattataaattacgtcttgtgctatattctattgtctttctcacctgcggatctatatccatataaagagtcgtgtaggctattatatctaactcatattcatttacatacctcactatgtcactcatctacatctacgtgatcatcacctatcttcctatcgtatctgttctctttccctccctacgccgcgcgtctcgacgctcgcgcgcatttgtctgtcgctttattaccgtcgtctcttagttgttgtgatcagttttatgtacttaacctcatctacacggcgcgaatctaacacaagctgtacgtagccagcgagcgagcgactagacgttcntgtgctccggtgcatgtggttgttgtttgaagnattaatcccgaccactaccgagtcgcatctgatcgaatgcagtgagagtatctttgctgcgttactactccacaactagcgacagtagggctggtcgcggccacttggcggtgaggagagctagagattaatatctgagtgaactccgagcgaatatattcatacttcgtgatatttactactcttacccttgatcagaatgatgcactacatctatcacaatagatactcctgtttgataccagatatcatgtctctcctgttaaatgtggataacctgtgcgctgcgacagaggacggacgatanacatctagatagtatctatgctccagtatcatgtactgtatgctgttacgctctatgtgatctcgtaatgcactacctaccctactaacagacacgtacacatgtgagtgtgtcgcgcgatgcgcgacgagcgtgccgagcgaaggtacccaagtgtggtgggtggtgctatncgcgggattacttaattgttatgtgtatactcacataagttatgattactagtgcacgatgactaccacgtctta

SEQ ID NO: 2636 - DNA, 414 bp, Glycine max
  Peptide Sequence Number=SeqID_6286
  Probeset Number=SeqID_12415
agaagattatagtgtcagtaaaggtgacagcttttctgtgtccaaaatctggttgtggccaaagaaggggaaattgcctacttctttggatggtcaatttggcaggccaatgccttcttatctaaaccagattttccaaggatgagggaaacagaagggcatgaaaggatcctcccatgttttacttttttttttcctttcctattcaccttgaattcgtttcaatccctgaattaaagttggtttcccccattttgctttaaaatttcaaaaaaaaaaatggggggggcgatattttttaacactttgaaaaacacagatttggccccccccacctttgggggggttaaaaagagtgtgctccttctagaaaaaaaaaaaaaaaaaaggggggggtttttttttttttttttt

SEQ ID NO: 2637 - DNA, 800 bp, Glycine max
  misc_feature (799)..(800): n is a, c, g, or t
  Probeset Number=SeqID_12416
cgaaaactattttgttttttaatcctgtccggttgcctctccgagctccggcggccggcgaccatggagtgctcccaaacccccgcgtgccaatagggcaaccgaccggcacgtttcggttccgaccgaaccgaccgagccgtaacccctaagttgctcaaggtctgctcactgcctcaccgcatcgcatcctcgcttctcgccgctcaaccaccagcaccggcgacggcgagtaacctcaagggcgcggcgctggctcttctccgtctcctcgctgccacggacgtccacgacctcctccccctcatacccacccacccctcccaactccaatggcagcatgcccgccagctgctcgacgaaacgaaacggccgaccaactgaccagcatccatgcccaatctactccatgtgaatgtaagatttctgcctatgagagtactggtactgagggaggcagatgctggacctctcagcggggagcaaagttttctgaggatgacccttttgcaccagttgaaatcctctaatgtagatggcgctcgcaactgaggtcttcaacagtcaacacacacgcgcggcgcatgaatgcaggcaggcacacgtttttggagagctaacctgaatatctctgatggttctgtagtgagtgctgtaatgtttacctcaagttgctactctgtgtttgcatgaggatgaggtgtgcttgatgtgagtgtggcttgttccaaccgtggatgtacctagttgctctgtgacgagagataattcaaggaatccttgccttcggtggtgggtnn

SEQ ID NO: 2638 - DNA, 1428 bp, Glycine max
  misc_feature (8)..(10): n is a, c, g, or t
  misc_feature (18)..(18): n is a, c, g, or t
  misc_feature (21)..(22): n is a, c, g, or t
  misc_feature (24)..(27): n is a, c, g, or t
  misc_feature (62)..(62): n is a, c, g, or t
  misc_feature (101)..(101): n is a, c, g, or t
  misc_feature (138)..(138): n is a, c, g, or t
  misc_feature (216)..(216): n is a, c, g, or t
  misc_feature (417)..(417): n is a, c, g, or t
  misc_feature (462)..(462): n is a, c, g, or t
  misc_feature (629)..(629): n is a, c, g, or t
  misc_feature (710)..(710): n is a, c, g, or t
  misc_feature (724)..(724): n is a, c, g, or t
  misc_feature (733)..(733): n is a, c, g, or t
  misc_feature (789)..(789): n is a, c, g, or t
  misc_feature (839)..(839): n is a, c, g, or t
  misc_feature (930)..(930): n is a, c, g, or t
  misc_feature (1069)..(1069): n is a, c, g, or t
  misc_feature (1159)..(1159): n is a, c, g, or t
  misc_feature (1306)..(1306): n is a, c, g, or t
  misc_feature (1324)..(1324): n is a, c, g, or t
  misc_feature (1421)..(1421): n is a, c, g, or t
  misc_feature (1428)..(1428): n is a, c, g, or t
  Peptide Sequence Number=SeqID_6287
  Probeset Number=SeqID_12417
tttttttnnntgttttgnctnntnnnngccgggtcccggctcggtatcttctccttctcccngccaccaggtcttatccgacgacagagagacccactgcntacacatatagaagtacaagcaatcataataactcancacccacctcataaatgccaccaactgctaaacggcatgagagcatgtgaggggcgcgatctctccctgtgattgccntcattctattagtgtgttgatataatgtgtaactgcggtggactcgtagtgcctccacaccaacgtatgtatacttatagctgagacatgcttcaacgcctcaccagggtctcacctcatacacaccttcaaatagctctcgcatgtaggtaatctagtgtgccagcctatggttgtctcctgctgttatatcacctctangatatactccgttcaagcgtcgcccctcttctctgtccttatatntgaggttgccatccttctcctcagatcgtctttcctgtactatatgcgtgattatagctctgctagtgtctctatatcggccgattcacccgccaccacactcttatcctgccatggtgcgctggcgtgtctcgcttctacgcacgaatctcacgagactcttctcnacgtaatcgataatgcatacgtaatctatgtgtattgagtgtagatgatggatagtagtgattgaataaagtaataataanagagccaatatcanaacaaaaancaaacgactacttctcgaccaatatcaacatcgtcctctctacatccctctacacnctcaatatagctcgtgatatggagtcatatgtcgagatgaatcacttgcnacctcatataatttgtattaatgttgtgatgttgtgaaagcgacagcacacctcactactcgcaccgatgccagtatactaaagtgcaaangtgcactacatacagtacgtaacgcctctctctctatacacttctcgtctagtgtgttggcatgcgagtgcatactagtaccactctctgcatcttctgttatgtcagagacacgagagctacgtactctactatctcntctccatctgacacactctcatcacactagttattacacactaggcgcgacacctacatcctgtaagcgtgcgacgcagtctgcataatnctataatctctcgatctatatggagtgagacgcatagagtgtagtggcacgggcaccacactcgagccatatcatgcggtggattgtgtacagtacgaccgctcagatgacagctgcgtgcggtgacacgcctgttcgtctcgcccngcacgtgtgacgtgcgtnagacaaggtacagtgtgcacgtgactcacattcgctatatcgcctctcgtctctcatccccccacgagacatcgtctgcatcagtgtcgcgtcgctngacgcgn

SEQ ID NO: 2639 - DNA, 1601 bp, Glycine max
  misc_feature (32)..(33): n is a, c, g, or t
  misc_feature (43)..(44): n is a, c, g, or t
  misc_feature (47)..(47): n is a, c, g, or t
  misc_feature (101)..(102): n is a, c, g, or t
  misc_feature (104)..(106): n is a, c, g, or t
  misc_feature (110)..(110): n is a, c, g, or t
  misc_feature (132)..(134): n is a, c, g, or t
  misc_feature (145)..(147): n is a, c, g, or t
  misc_feature (149)..(149): n is a, c, g, or t
  misc_feature (160)..(160): n is a, c, g, or t
  misc_feature (162)..(162): n is a, c, g, or t
  misc_feature (168)..(168): n is a, c, g, or t
  misc_feature (174)..(174): n is a, c, g, or t
  misc_feature (192)..(194): n is a, c, g, or t
  misc_feature (204)..(213): n is a, c, g, or t
  misc_feature (224)..(224): n is a, c, g, or t
  misc_feature (227)..(227): n is a, c, g, or t
  misc_feature (229)..(229): n is a, c, g, or t
  misc_feature (233)..(237): n is a, c, g, or t
  misc_feature (249)..(252): n is a, c, g, or t
  misc_feature (254)..(254): n is a, c, g, or t
  misc_feature (305)..(305): n is a, c, g, or t
  misc_feature (310)..(310): n is a, c, g, or t
  misc_feature (348)..(348): n is a, c, g, or t
  misc_feature (353)..(353): n is a, c, g, or t
  misc_feature (412)..(412): n is a, c, g, or t
  misc_feature (433)..(433): n is a, c, g, or t
  misc_feature (446)..(446): n is a, c, g, or t
  misc_feature (531)..(531): n is a, c, g, or t
  misc_feature (552)..(552): n is a, c, g, or t
  misc_feature (641)..(641): n is a, c, g, or t
  misc_feature (657)..(657): n is a, c, g, or t
  misc_feature (719)..(719): n is a, c, g, or t
  misc_feature (772)..(772): n is a, c, g, or t
  misc_feature (832)..(832): n is a, c, g, or t
  misc_feature (860)..(860): n is a, c, g, or t
  misc_feature (883)..(883): n is a, c, g, or t
  misc_feature (893)..(893): n is a, c, g, or t
  misc_feature (1092)..(1092): n is a, c, g, or t
  misc_feature (1095)..(1095): n is a, c, g, or t
  misc_feature (1159)..(1159): n is a, c, g, or t
  misc_feature (1328)..(1328): n is a, c, g, or t
  misc_feature (1413)..(1413): n is a, c, g, or t
  misc_feature (1497)..(1497): n is a, c, g, or t
  misc_feature (1502)..(1502): n is a, c, g, or t
  misc_feature (1508)..(1512): n is a, c, g, or t
  misc_feature (1516)..(1518): n is a, c, g, or t
  misc_feature (1522)..(1522): n is a, c, g, or t
  misc_feature (1524)..(1524): n is a, c, g, or t
  misc_feature (1526)..(1527): n is a, c, g, or t
  misc_feature (1531)..(1531): n is a, c, g, or t
  misc_feature (1533)..(1539): n is a, c, g, or t
  misc_feature (1541)..(1541): n is a, c, g, or t
  misc_feature (1544)..(1545): n is a, c, g, or t
  misc_feature (1553)..(1554): n is a, c, g, or t
  misc_feature (1561)..(1562): n is a, c, g, or t
  misc_feature (1568)..(1569): n is a, c, g, or t
  misc_feature (1574)..(1576): n is a, c, g, or t
  misc_feature (1578)..(1578): n is a, c, g, or t
  misc_feature (1586)..(1586): n is a, c, g, or t
  misc_feature (1593)..(1595): n is a, c, g, or t
  Probeset Number=SeqID_12418
cgcctatctgttcgtgtgatgtatatgtagannggagtgacgnncanacaacaatcagctagcttagactctctcctccgcgcctcgagcgtcatgtctgnntnnnctcnctcgacacccgctctgattatnnnttatataatannnanagatctatagngngggggngcaacnctagagagggcccctaannngggggattgnnnnnnnnnngaaggagagangananaaannnnnagagacgcacannnnanctgccgccccgccgacgccgagagaaacgcagccacacacgaattattatnatcantgtcatcagcgaggcgtacagcgcccactatctctatncactnctctcgacttgcaaacgacactcagctcatctcgatgtcacgtgatatatgtagtatanacatcggatcgccagatatgnctatagagtatgnacaattatcatcacaaatcgccacagatatatgtgtgtacagcgagtctagttcatagctatatagtggtgatcgagtgaagtcntgtatatatatggtcgtgagntcgtgcgttgttcgttgcgcgcacaagcgccgattcgcgcgacgcccactatatatatgtttggaacagcatagaataataacatacgnatatcaatatatatantcattaagcgacgaggttagttatgtgttaagcatgcaccacagagaggaggcgcgcggaangcgtgattgtgatacagtcatagcgattcgtgtcttacaatcatacaagattnatttgttgcgcgcgctgctcgcacccgcgcgccgcgctaatggtcgtgtttctctccgcngcccacacgcgcgcgacgctattcgatngtgcgatgtgtctagacgaggtngtttccgctngagaaggagacgggcacgcaggcgcgcggcgagagagggcgtgcgagttgggaggatgccacgatatcaccagggagagtgactaagaggcccgaaggtggagaagagcaccaccagcacacactctcgtacaccgctaacggcgagacgagaagcgaggagagaaggacagcaagactcacagatgcagaatagtaancgnagcgacacctactatgttatagacgccagcgtgtgtctatcgatctcgtatttattgcttcatntatattatatattgtttacactactttatattacgactacagattgtatatgtgtagtatgacatcaccagtgttacacgtgttacagatcgagtactctcgacatcgatcttaccaccccgcgccagtgattgttagagtgtcttgttgctgccccctcccgcccgcngaagcagactgatgtaagagagtagtgcagtgtgagtaacatttgttagtatgtaagaacccccactaatatactctgtgtgtgngaagcgactgctgatctgtgacacttacatatgaaggatctgcccacgcacccatttctgtgtggtggtgtatttatcccagcntacancgcctnnnnncccnnntcgnananncctntnnnnnnngnttnntccccccnntttctcnnccgccnnttttnnncncccccccnttttccnnntttttt

SEQ ID NO: 2640 - DNA, 1951 bp, Glycine max
  misc_feature (19)..(19): n is a, c, g, or t
  misc_feature (22)..(22): n is a, c, g, or t
  misc_feature (27)..(28): n is a, c, g, or t
  misc_feature (99)..(99): n is a, c, g, or t
  misc_feature (274)..(274): n is a, c, g, or t
  misc_feature (292)..(292): n is a, c, g, or t
  misc_feature (354)..(354): n is a, c, g, or t
  misc_feature (456)..(456): n is a, c, g, or t
  misc_feature (491)..(491): n is a, c, g, or t
  misc_feature (546)..(546): n is a, c, g, or t
  misc_feature (642)..(642): n is a, c, g, or t
  misc_feature (779)..(779): n is a, c, g, or t
  misc_feature (805)..(805): n is a, c, g, or t
  misc_feature (909)..(909): n is a, c, g, or t
  misc_feature (911)..(911): n is a, c, g, or t
  misc_feature (982)..(982): n is a, c, g, or t
  misc_feature (1038)..(1038): n is a, c, g, or t
  misc_feature (1090)..(1090): n is a, c, g, or t
  misc_feature (1099)..(1099): n is a, c, g, or t
  misc_feature (1164)..(1164): n is a, c, g, or t
  misc_feature (1180)..(1180): n is a, c, g, or t
  misc_feature (1203)..(1203): n is a, c, g, or t
  misc_feature (1310)..(1310): n is a, c, g, or t
  misc_feature (1337)..(1337): n is a, c, g, or t
  misc_feature (1365)..(1365): n is a, c, g, or t
  misc_feature (1377)..(1377): n is a, c, g, or t
  misc_feature (1384)..(1384): n is a, c, g, or t
  misc_feature (1395)..(1395): n is a, c, g, or t
  misc_feature (1403)..(1403): n is a, c, g, or t
  misc_feature (1420)..(1420): n is a, c, g, or t
  misc_feature (1432)..(1432): n is a, c, g, or t
  misc_feature (1470)..(1470): n is a, c, g, or t
  misc_feature (1520)..(1520): n is a, c, g, or t
  misc_feature (1541)..(1541): n is a, c, g, or t
  misc_feature (1575)..(1575): n is a, c, g, or t
  misc_feature (1614)..(1614): n is a, c, g, or t
  misc_feature (1631)..(1631): n is a, c, g, or t
  misc_feature (1634)..(1634): n is a, c, g, or t
  misc_feature (1636)..(1636): n is a, c, g, or t
  misc_feature (1641)..(1641): n is a, c, g, or t
  misc_feature (1667)..(1667): n is a, c, g, or t
  misc_feature (1688)..(1688): n is a, c, g, or t
  misc_feature (1696)..(1696): n is a, c, g, or t
  misc_feature (1711)..(1711): n is a, c, g, or t
  misc_feature (1745)..(1745): n is a, c, g, or t
  misc_feature (1808)..(1808): n is a, c, g, or t
  misc_feature (1835)..(1835): n is a, c, g, or t
  misc_feature (1856)..(1857): n is a, c, g, or t
  misc_feature (1864)..(1864): n is a, c, g, or t
  misc_feature (1873)..(1873): n is a, c, g, or t
  misc_feature (1894)..(1894): n is a, c, g, or t
  misc_feature (1896)..(1896): n is a, c, g, or t
  misc_feature (1903)..(1903): n is a, c, g, or t
  misc_feature (1911)..(1911): n is a, c, g, or t
  misc_feature (1919)..(1919): n is a, c, g, or t
  misc_feature (1927)..(1927): n is a, c, g, or t
  Peptide Sequence Number=SeqID_6288
  Probeset Number=SeqID_12419
agtttcgaccaccacactntcnccccnncctccccatacatctcctcgcgactacatataactcttatgctattctgtcatacaccctagactctgcgngtatataaataatatagtgcaaggtgctcgcatcacaccacccgtttagggccggggcgccaggcattaactttaggatatacatagagtgtagaggatatactctctccgcgagtaggcgcagcccgaagagcgggtactgccacgctacgtgtgtcgtcttacattctacgcnttctgttacgagtaccancctacactatattttcctgtctttatcacattatttgatgcctctatattctgccgacgagntctatatgctacgtagcttctacctgtactcctatagagtgctgctgctgtgcgtgaagattatgctagcccgctcttccactgaagagtatcaaagtttcnattctagagctagtggatattgtcgtcatcatccnatgcctgtccaattcagacactgctatatatgagctacgtcacgctactactgcnccatgatataactagtctatgcactaacgaatacgcctcttgctccacgtattctccttcctagttgcaagtggtgtacatatctctactcagaantacaagcgtcaacgcctctctcctctcatgtatcgcatactatccacaagacgctctgcgctccgtattcgagcgtgaggactctcgctacattctcacgtgtatgcgtcatctgcaggcagcccacacacttgcantgcacgatcagttgtctgcggcttgntcattaaccagattgtttctatagatacatatctacaatctagagaacatataccagtatagtgtctcgatgctcactcgctggagcgatgttgcatgtgagangngttgtagttgttccgacgactaccattaatacgtgtaacatcacactccacattctcgcatgtgtacactncactgtatcgctccgtactatgcgctctcgcttagtataacacaccggactagcancatcgatatgaggctattgctgtgctgtgtcggtactcatgtcgctttctanagcgctgcngccatcgtcgcgcgcgagctagatctgagcgcctctgtatattatggttagatctactcctccancagtggcacgcacatngagagagagatgagtattgtacnctctactactcatacgacacgctgcaggtgtacagctgctacgtaccgcactactatgatgatatggtgcgcgatcactagcagaaaacattcctgtgcttgacgcntatattgtagtgtttaactctacacanactatctctctacgcacgtgacgataancgatgcgactanttgcttnctagtgcgatngactatanctactcgagagagggtngtcctctactgntatgactgtactcaagtgtttctatactcgactctgtntctgggataagatagccttcatgcaacttgtgatagacgcacgtgctgancatacgtgtcatactctcatncatgcgccatcctctaatgcccagtcgtactctntaactaaacgtatttccactacatgaatgctaagtgtanacagattactggtgggncgngntcaancgtagcgacgagtacatctgcgactnatatcgacgactacacaacanctatgggnctgctgtttactgtngtctcactgacctcgtcgcgggttgatcgcaccntgcctagtactatttccggctgcgtgacgagatctctgctagcggtcgcgctgaattatcttntgctattagagtctgtgctgtactagntcgtgacagcactcgtgcaanncaagacngatacgagnataggctaagcagcacgtcancnatcagantacggctncgatagantgacgcgnactgtacccatgcaccatgatcag

SEQ ID NO: 2641 - DNA, 668 bp, Glycine max
  misc_feature (601)..(668): n is a, c, g, or t
  Peptide Sequence Number=SeqID_6289
  Probeset Number=SeqID_12420
cttccgccactcgtaccaaacggctgaaggagaccacaggatgggattcccacatctcctccggatttagagtctacccggttcaattagccctggttgatcagaatctgaattttgagggtgaaaaggatggaaaggaatgcggtaaagggaggagcaatccaacttctgcgggtgctctgcaacaacatgcaggcaattacaatgccatcgatgcgtgacgtggctcccaggggtgccgtgaagcgtatcaacggtttgatctacgacgagactcgcggtgttctcaagatcttcttggacaatgtcatccgtgacgccgttacttacccggagcacgctaggaggaagactcgttacggctatggacgttgtttatgcgctgaacaggcagggaaaggaccctctacggatttggccggttagggttcctgcttgattttcctcgccagggaaaagtcttgctgccaagaaaaacatacgaggcatggattggggtagtttttttttattttttatggtggtgtttgtagtgaatggggaaaattaggagcaattttatgcttacttgttggtgccaattatgtgatgtaaccccggnnnnnnnnnnnnnnnnnnnnnnnnnnnnnnnnnnnnnnnnnnnnnnnnnnnnnnnnnnnnnnnnnnnn

SEQ ID NO: 2642 - DNA, 484 bp, Glycine max
  Peptide Sequence Number=SeqID_6290
  Probeset Number=SeqID_12421
acggagtacgagagcagagaactggtgttcggtagtagaatagatccatggcgacaatagtacagtgtctttcttcctgtgcgaccctcaattccaaattcaaatccctttctcttaacggagcttcttcatcatcatcatcatctccaacttcttccttctccattcgtcgtggtgtctgctcctcccttagcttcgctcagagcgtttctcaatgtgtcgccttctcctccgggactatgtgggtacagaagaagacagtgaggcattcgattgtgtgcgaggctgctcccacgaagaaagctgattcagctgccaagagagctcgccaagccgagaagaggcgcgtttacaacaagtctaaaaaatctgaagcccgcacacgtatgaagaaggtcttggaagcactcgatgggctcaagaagaaagcagatgcggtacctgacgagattgtgacggtggagaaactaataggagaggctta

SEQ ID NO: 2643 - DNA, 1649 bp, Glycine max
  misc_feature (16)..(17): n is a, c, g, or t
  misc_feature (34)..(35): n is a, c, g, or t
  misc_feature (37)..(39): n is a, c, g, or t
  misc_feature (41)..(41): n is a, c, g, or t
  misc_feature (43)..(44): n is a, c, g, or t
  misc_feature (47)..(52): n is a, c, g, or t
  misc_feature (54)..(55): n is a, c, g, or t
  misc_feature (69)..(71): n is a, c, g, or t
  misc_feature (202)..(202): n is a, c, g, or t
  misc_feature (259)..(259): n is a, c, g, or t
  misc_feature (453)..(453): n is a, c, g, or t
  misc_feature (569)..(569): n is a, c, g, or t
  misc_feature (584)..(584): n is a, c, g, or t
  misc_feature (706)..(706): n is a, c, g, or t
  misc_feature (757)..(757): n is a, c, g, or t
  misc_feature (780)..(780): n is a, c, g, or t
  misc_feature (785)..(785): n is a, c, g, or t
  misc_feature (790)..(790): n is a, c, g, or t
  misc_feature (815)..(817): n is a, c, g, or t
  misc_feature (876)..(878): n is a, c, g, or t
  misc_feature (892)..(892): n is a, c, g, or t
  misc_feature (917)..(917): n is a, c, g, or t
  misc_feature (919)..(919): n is a, c, g, or t
  misc_feature (1011)..(1011): n is a, c, g, or t
  misc_feature (1040)..(1040): n is a, c, g, or t
  misc_feature (1066)..(1066): n is a, c, g, or t
  misc_feature (1121)..(1121): n is a, c, g, or t
  misc_feature (1172)..(1172): n is a, c, g, or t
  misc_feature (1325)..(1325): n is a, c, g, or t
  misc_feature (1360)..(1360): n is a, c, g, or t
  misc_feature (1561)..(1561): n is a, c, g, or t
  misc_feature (1624)..(1624): n is a, c, g, or t
  misc_feature (1626)..(1626): n is a, c, g, or t
  Peptide Sequence Number=SeqID_6291
  Probeset Number=SeqID_12422
tttttggtttgttggnnggtgtgcgtctgtgggnncnnncncnnccnnnnnngnncgcccccgcccacnnntcttggctctcagtgcgccgcacaccactcctctctacatacactcaataccacaccacgcagcccgaacaccagctgatataccaccactcatgcgtcgcacataatctacttcaaatcataagaagctnatcgtagaacaagagacaagaggcgctgtgccgactacgtgagagaggcggataaanatgagaaatatattatagtgaagaaaacgatacggtatcatataatatcggattatttaataataaatttgtgaatgagtaccaacgacacacacacgcaagcagacgcatacgcgtgagatgtgtggtgtgatagtaatgctatactgaatcataatgtgatgataattatgccattttatgatatatgcatngatacgtcctatacctatatagaaataaatgtaaatatattatgtatggtggaagactaaacacctacatattatagacacatttaagataacataacacaatagtgagacatagnagggagatgagaganaattatataagatatatatataaatacaatcaaaatgtataatacacacacaacaacacactgtaaacttataatttatctgcgttctcatactcataacactcatctacaagtactaaatnagacgtggaggtctgagtgaggctagtcgtgaaatggatacatcatacaanactcatacacagacccgctcgcncgcanccccnacactgcgagcacgcacccgcgcgnnngcatccttctcattctctgctcaatgtgctgctctcttctcgtccacacactatgctannntacatcacttcatngcctgtctacctatacactatatcntntgtttgttgtaagataagaactagatctagtcgactgggtgcaatagtatctatagctagatgattatggtaggtgtggtgaactaagtgtnaatcctcataccacacacacacacgaccncacaacatctcacgcaatgcgagatnaggttgtggatggctcctctttcactttcttcgctcgctccccacgacatatccnatccaccgactccgatcacacatgcgctcgagtggaacgaaatatgggtgngtggtgatcgatgcagctctcgaacactacactatataggagacaaatgagaaggtatagtgatgatgggtggtggtaacacgtgacacaacaactgctcatctagttcttgaggagatatggtaaggagcaaataacacctcatccatcacnacacatcgcactgactagccgccgcgcgcgcgcgngaccgttagacttatctcacatatgtttgtcatctatctatatacatatgacacgtgagctctaatatacacgcgcagcgcgagagacacagacgtcgtgttgggtgtactgttcaacttgtctgcgcgctgtctcggcattcgtactcctcctcatcgtgagtcagtcgtcttctcgtgtgtgtctctcacactcgacgncgtacttatagacatagacacgacgatacgacacatacgacggagagagaggcgatgtatgananttagtatcatacgtacggacgtg

SEQ ID NO: 2644 - DNA, 501 bp, Glycine max
  misc_feature (10)..(10): n is a, c, g, or t
  misc_feature (301)..(301): n is a, c, g, or t
  misc_feature (345)..(345): n is a, c, g, or t
  misc_feature (420)..(420): n is a, c, g, or t
  Probeset Number=SeqID_12423
taccgttggnatcatccccacggggtgatgaagaatggaaatccattcccccccccctccggtataacattagaatgccacatcccggaaaggaatctgactgttgaaggctgttcggataaatttgtgggaactccactatttcactttaaaatccccccccatcatataggtctcgccggcccaaagagtgttacctccctctagaaagatgttcttttctcgcgaacccggctgaaaaaccatcggccggggtctccgcgagatctggacctctttctggaggaggagtctcccctgnctggagccgtgcccatgggatcggcgcgcttagggttttcgcgncggcgggggcggaggaataattcgcgccttcggtggcggtgacggaaaatgatgcccgccgcggccgccttattnatagggaggaagctcggagaagggaatcgggaccagaggagaggagagagacgggaaggagaaagcggggaggttgttgat

SEQ ID NO: 2645 - DNA, 452 bp, Glycine max
  misc_feature (409)..(409): n is a, c, g, or t
  misc_feature (415)..(415): n is a, c, g, or t
  Peptide Sequence Number=SeqID_6292
  Probeset Number=SeqID_12424
agggtttctcgtccccgcctccaccatgagctccgccacggttctcgacggcgataattatgctgctgaagaggtttgtattcgtaatgaatctttgatgagcagtgcacagaggagaaaactagcggatattagcaatttggagggtcaagcaaagcaaacgaacagagaagagacgcaccagcagcaagatatactcttctcttgtaaagaatatgctgagaagcttgaaaaggcatttccttttgcacttttattttggtgccttttgtggtggctgactgttattttgttgattctcggttgcaagtaaccatcttcatctttagaatgtgttggtttctgagcgttacttttggtggtgatgcttgttttttttttgttttggtggttcagtagcttacttcangctttngtatatccaagtcaaaggttatctttgacttcctctt

SEQ ID NO: 2646 - DNA, 1463 bp, Glycine max
  misc_feature (107)..(107): n is a, c, g, or t
  misc_feature (551)..(551): n is a, c, g, or t
  misc_feature (553)..(553): n is a, c, g, or t
  misc_feature (814)..(814): n is a, c, g, or t
  misc_feature (890)..(890): n is a, c, g, or t
  misc_feature (1161)..(1161): n is a, c, g, or t
  misc_feature (1258)..(1258): n is a, c, g, or t
  misc_feature (1345)..(1345): n is a, c, g, or t
  misc_feature (1385)..(1385): n is a, c, g, or t
  misc_feature (1436)..(1436): n is a, c, g, or t
  misc_feature (1459)..(1459): n is a, c, g, or t
  misc_feature (1463)..(1463): n is a, c, g, or t
  Peptide Sequence Number=SeqID_6293
  Probeset Number=SeqID_12425
tggtgacccgcactatcctcttctattactaccaggcactgccaagaatacactgttttggccacacggcccacccaccagtaccgaccgcggctgacacggaagangaccgcaccgttataaccgttatcttacccatagctatacgataaagaaataacattatgagtcgcactgccagagtgcaatatgtcgtatattatccgacgccgcacccctaacagcgctccacgcgctgataatatgatagagttttagaatcgtgcctgtccgcgatatagcatcgcgcctctatcgtaaaagcgaaggggtgacaacaacaagagcggacgtagcacacagcgagcttaagcgacaacgtgggcgatcagcaccacgattgtatacgagtgacgttccgcttcttaatgcgagtatgtgcgcccgtctactgctgcacacacgatggtgatagcgtagacgcaagatcgacagacgtgcgaataattgacggcggtactgatacgctcaggactcaacagggacgcacctcacctgatacgctttctatngncgtcgcctgtttgtgtatacatattatcatgctcgctcgcagcacgcatcgaaatcaatactcgtcttacggccacgactcccacactatacaagcggatcggtgatacgatattcgtatacccgactcctaatacgtaaccgtatgatacacagcagtcgtgcgattgttcgtgccgacggttattaatgtcggtaacaccactacgataacacaatatcgcgagaaccgcataggaatgtagatagattagagccatangaacgcgcttcatatagtggtgtgaagacgcatcatacaccacgcgcaccgtgcacgcataatgtgtaatctccantagtcgtataggactcttcgtcggagaatatgctcgcactacgatacacacgctattacatatagtgtctacgcgataagacgagaacactgtctattattctcacgccgcaccgctgagagtgctgtccagtgtagttatctcgactctatccaccacgcacacatgatgctgtcaacaactatgatcacattgcatatactattcttctatctcgccggcgactgctgtgtctctgctatatattgctaatacctcatcaacgcgttanctgcggatcgctctcgcgcgtatgccgcaccgcgcgagctgataaatgtatattgatgcagccgccgagcgcagctctgcgatagacacataacacnatctacgttgatctatcgtatcgtatacacacacactcccgatcggcgacatagacggatatatatatatacgttaccttcacgccntgcagtcacgacgcgcgtgcgtcatattctgtcacatcanaactatatgatacactctgtatcgcgccgcatgctgcgctacgcgagtgtnatagctcctgacgatgagacatnaaan

SEQ ID NO: 2647 - DNA, 1419 bp, Glycine max
  misc_feature (542)..(542): n is a, c, g, or t
  misc_feature (968)..(968): n is a, c, g, or t
  misc_feature (982)..(982): n is a, c, g, or t
  misc_feature (1120)..(1120): n is a, c, g, or t
  misc_feature (1249)..(1249): n is a, c, g, or t
  misc_feature (1285)..(1285): n is a, c, g, or t
  misc_feature (1332)..(1332): n is a, c, g, or t
  misc_feature (1345)..(1345): n is a, c, g, or t
  misc_feature (1369)..(1369): n is a, c, g, or t
  Probeset Number=SeqID_12426
gtggggaccgtgtgtgtgtatatatcactacctttcataaacacaattttcctaataaaagcacgggcggcgaccaacaccgcacatctctctctcttactgcagaccagagcacgcaccgccaacccacccccacatctcgcctacctcctattgctgctgtcctctcctaacaatgggcgccacttgggtggtgtggtgggaaatagatataacaactttcgcactgatattttcgttttttctctttcttctatatcatctatgttcctcttgtttaacttcttcctctcctgaacttaacatataacctccatgtgggtgagaccaacaaagggggggtctaacttcggggcgacaattcagtgctgcatgtcttgttttctttacctctcttcgtgtagacgatctgatactaatccgcgccgcctgcgctactctcattgtggtgtttgtgcgatgtttatttgtgttggtcttggatataacacatatcgcggtcgactctctttattatagacttcttcttgttttgctgtctngtcgtttggtccactccgtgcggagaggcgggtgtgtaactataggcggtctccctcctcctccacctctcacttcttctgtcttctctcttctcttgtgtaagttaacatagtgcgggggggtgggcgccgcctacatattcaattgctacattattgtgatgtttgttgtaattatgttaatacacgtcttataatacacggtaaagtgaaaacaataggggaagtatgcattgacttattatgtttgacctaactatttagtctattattaccccatcatactctgtcgttatatgaatgatatgtagttatgagcagacctctcctactactttgtgtcttgtatactacaaagtgctataccctgccttgcgctcaattgccgatctcccttgcatacacacttatatttctcttactatnatcatcctccttancgcgccgaccgctttctcacagcttcgtatgactcgccctctactttctgtatgtactaatcaacatcgttttcgcctatctctcgccattcatctttcgcgtctggtgagcatctagtacatctacgctctacgtcntactcactctcacctattactacatctctatcacacctccattttctctatgcttctttctatgtgtgctctcaccataacacactcttgtgtatatcaaacaacagctcgctaacaacataatgtttncgccaacattaacacaatatacgttcatcttcacancacacctcttcgctctacaagacctctgtacaacatcctctacacangctccaatcaccnacatctgtgtacagtgtctctaanacaacacttgagtgttatatgtcacaatacacacatcttatgtctcctag

SEQ ID NO: 2648 - DNA, 1719 bp, Glycine max
  misc_feature (96)..(96): n is a, c, g, or t
  misc_feature (213)..(213): n is a, c, g, or t
  misc_feature (260)..(260): n is a, c, g, or t
  misc_feature (296)..(296): n is a, c, g, or t
  misc_feature (298)..(298): n is a, c, g, or t
  misc_feature (305)..(305): n is a, c, g, or t
  misc_feature (342)..(342): n is a, c, g, or t
  misc_feature (401)..(401): n is a, c, g, or t
  misc_feature (663)..(663): n is a, c, g, or t
  misc_feature (1221)..(1221): n is a, c, g, or t
  misc_feature (1581)..(1581): n is a, c, g, or t
  Peptide Sequence Number=SeqID_6294
  Probeset Number=SeqID_12427
ccgcattgagcgtggctcgcattctcgattacaatatctgatagcctctcagacgtcggtcatacgacgcacgactgtggtgcgcgtcggttattntgattatgatttcaccagcgattaggcacacttctcgtgctagcgctgtaaatgcacatatatcacatagacatacattcgtacgcgctatatctccagctagcgtaaatagcgctncatcacgctcttactaatacgtcggtcgcaccgctctactcgacatntcaggacggacggtatgagcgcccatactatcatangnacctatnctaagtagctagacattctggtactcgcatcgaccgntcggcgagagcgacgagcgcagagcttgatgtgtggtccgcgttctacgtacgtacatntctgtctcatctcacggctttacatgcaatgcgtgttcgtggtgttcttcagcataccgaatcgtgacgtagcattcactactctgagtacttattgaccctcccatggttctacatctattatagcttatcatctacacaccaagtgcacaccgttgtctaatagtctctgttgtattaaactcgcatgatttgtgttctatcactagaatatcattgtccgcgtgatttgaatcagctatccgctggtaactgtccgagntctctttgatgactacgacatttgttatcagtctaggtgcacggtactgacgctagtttctatatttacttcacagttgctgcgtcacatgctaccgcatactcctacacatgtatatcggtaccgatttgatcgctactcatgctgcggctcgaacaatcgttactcaggtatacaggacacccagcggcgcatcggttttggctctcgactctcatgctccctactcgtgagcgagttggagatcttggtctagtctccttcgtcgcgcgttcactactacactctgatccgacattgcggctgtatatctacactccttacgcgctcactttacgcccgagtgtacacgttctcgactgttaagcacttagcgtgttatagagaacaactacattgtatttgagccgaacgttgtatcaggcaattatgaccagaatagaatgctctggaagccaatagatgcaaacagtggtcgagagaagctactatagttcacgtccgccgtatcgtactagaattgcacatgcgtatgttcgctagctacatcttagtatnaccacgttcttccctcaccgctgtcgtataattcgacattcggcagttacagtagcgcgactagtgctagtagcaatatatagagcatattgttaaatatgccgtgcactcaagattctacgatggctcttaatcgcgtatagctgtcttctcgttgtcatgtgcgtcgcgcatgcgctaggtgctgacctttataacaaagcagaatacgatcttcacagaagcgggaggtgaagaaataccacttccgtgtgtttatactattatgtccgtccttcccgtagtgttcccactctctatcttctcagtctatattctgaggatatcgctgtcatccctccttgtgctcgtgggtttctntcttttctctatttctgtcatctgctgcctctcggtttcttgtgtgctctcatcctgatctctcatagtcttggcgtgccagtctcttcgcaccacacaacacgcacccgaccgaggtgagaaatatgttatcagaca

SEQ ID NO: 2649 - DNA, 390 bp, Glycine max
  Probeset Number=SeqID_12428
atctttcatcctcgaagaagttcactctacgaagatgagagccaagtggagaaagaagcgcgttcgccgtctcaagcgtaagagaagaaagatgagggctagaagcaaataaaccactcgcccaatccatctcagcttcttatgctaagctcgatgttgaacgctaaacacgacaagagaaaatgacgacgtcacgatgatgattccctgttatgatcgtttcgtggttcgcttcctccaatgaggacctatctggtcgagaacaactgctctttatacctatctttttcgatctcggaatccgctgttcgactggaacttccatcactgaaaggttgtggaattccatccaacctccacggattcgtcaacgtcttcgattgttctctg

SEQ ID NO: 2650 - DNA, 453 bp, Glycine max
  misc_feature (436)..(436): n is a, c, g, or t
  Peptide Sequence Number=SeqID_6295
  Probeset Number=SeqID_12429
acgaaaggttaggtaggtaaaggtcacaatttagttctcaacgaaaaatctcgattcgatctgatcatcgtttcccagctcaccgatcatcttcctggaagcagcgagtacagttcaagatggcttcaaaaagaatcaacaaggagcttagggacctccaaagggatcctccagtctcatgcagtgccggtcctgtgggtgatgatatgttccactggcaagcgactatcatgggtccaactgatagcccattctccggaggtgtgtttcttgtttccattcacttcccaccagattaccccttcaagccaccaaaggtttctttccgcaccaaggtttaccacccgaatatcaacagcaatggcagcatctgtcttgacattctgaaagagcagtggagccctgcgcttaccatatccaaggtccttctttcganatgctcactgctgacag

SEQ ID NO: 2651 - DNA, 1528 bp, Glycine max
  misc_feature (492)..(492): n is a, c, g, or t
  misc_feature (497)..(497): n is a, c, g, or t
  misc_feature (513)..(513): n is a, c, g, or t
  misc_feature (903)..(903): n is a, c, g, or t
  Peptide Sequence Number=SeqID_6296
  Probeset Number=SeqID_12430
cgactaccgcggctagcagcagacacgactcgcgctctccgcgcggccgcgacccgtcgagacccacatatgtcgtgacgagtctaatcgtccacgcgttctgtaggcgggtatggcaatgtcatagggtcgatcacgcgcagaaacacaggacgttcgtctccgcgaacgaccgtcgcgcagcacatgagcatcgcgccgagaaagaagatgagagttatgcatgcatagtaagaagtgatgatactgcatcttgtatcctcgttcaaaacggagtacaggtgcacaggacgtgtgcggattgcgtcgaggccatagatacagcgccgacacttacactccggctagggagtcgagtgtgatacacatcattacagagggggcgtgcgcgtgggctagaagtagctgagtaggagcgtgtgtcgtcgtctgacgctgcggcacatcgattagacggtggtccgtagagctctgcgcgacgggcaaggcgcngcaanagtatggcgcggagcnctccagaagtcgagactagcatagctgtatagacgtactccagatcctcgcgtcgactatcataagcagcggtacgcacgtcgcgtcgcacagcgtcgcatgcgtcgtaggcggcgctcagacgatatcgaacatgcgcgttcaggtgagcgacattatactcacgcgcgccgtgcgcgcttaaggtcggtagctctcatcgcgcgcatcggggtggcgctggcacgcggccgttgtcatatagatggtctgcgtgcgtcgatcgatggagcgacttaagaaagcgatattgtccggcttaagtatagtgcgcatccatcgcgaagtgtgatgtctccgatactctacaaccttacacttacccacgcgtacctgcaccgcccggtcacntgcgatagtccgattattctcctgtaccccgtctgttgtcgagttgtatactggttggtggtgtagataatctgtatcctgatcaagctattgcataaccgtcgtgagtaggccgtcgcgacgcgtctgacgcgtgtgtagtagtcggtggggtgggtgcgagggccgcgcgccggcgcgcgctgcggcatccacggactgagaaccgacgctgcggccgctcacttacgccagggtgcgctcgctccactcagcccgctatttatgtgctgcctatcaacccgcagccgccctgcgagcccgagacacacgagggacgcgacggcgcgcggagggacgccagacggcggagcttagccgtcgcagagtgcgctacttatcagcggctatctatatcgttattcgttgtttcatcctgtagcaacaactaaataaggctgatgagtcgtgcatgtccggatagagtgtctgagccagccgcggccgtcctccaccacggttcccgcccctcgcaattggcgtggtgatcacctgctcatcccttcacgcttcgccgccgtacacaatcccatactcttagggtgcggcgagcagcggagggcgcgagcacacgacgcacccccgc

SEQ ID NO: 2652 - DNA, 448 bp, Glycine max
  Probeset Number=SeqID_12431
tcgagtagctacgtaggccccccccccttctgtgcacagttccttcgttccgattacggtcagatttagttaaaattggttagaataatggcctctgtacctaatagagttgaagaggaagttaacggagattcggatgaattgcagcaagattctgacaagtcacagaaaaaatccgccaaacatgactcgggagcgtcagatctggagaaagtcacggactttatggaagagaaggaaattaaacatagcgaattccttgaaggggcattatcaatacttggtgctcagagagaaagagatttagctgctaaacgagagcgtgaggttgagctttctaaagtgtctatcaaaaaggatgatgttgaattaatagttagagaaatggaaatttcacgcactttagctgagagaaagttaagagaacaccggggaaatgttgttgaag

SEQ ID NO: 2653 - DNA, 1367 bp, Glycine max
  misc_feature (28)..(28): n is a, c, g, or t
  misc_feature (30)..(30): n is a, c, g, or t
  misc_feature (39)..(39): n is a, c, g, or t
  misc_feature (46)..(46): n is a, c, g, or t
  misc_feature (86)..(86): n is a, c, g, or t
  misc_feature (195)..(195): n is a, c, g, or t
  misc_feature (210)..(210): n is a, c, g, or t
  misc_feature (426)..(426): n is a, c, g, or t
  misc_feature (1326)..(1326): n is a, c, g, or t
  Peptide Sequence Number=SeqID_6297
  Probeset Number=SeqID_12432
ccgctatagaccgcatcacatctctgtntnactgctacnctctcanatccactcgccccgctgttgttatccatacgttctgatangatcaatgcgtctacacttgaactagctacgccgcgtcgatgcctgtgatagagtacgtcacacatgacatgctttactcaagtacacatatcgatctgacgcgcgcgngatgcgcacgacatngtggtcgcagatcttaatacttcactgagccattcagctacatgatacatcaggtcgagctctagcttatagcggcgcgcgagtccgcctatgtaagaccccaatattattctcgcaccagtcagagtcgcgacaatcagcttccatcttacgctatattatatctactccagcatatatacaaaagatgcatggaatcatctaacctatattctngctcacgttcaataatcgcagcgtcgcggcgtctgaaagagtacatagttcacgtcttaatttggctcactatcatcgctaacctactatcgaactcatcgtcactcatctcaacgccgcgtacttactggcggagacatcgcgcctctggactacgagctacaacgtcatctacgaagtagcagcgttttcactgttctgtactttacacccagcacccgctgtccagctgggcggggttagcgaagtatatatacacgtgcgtcagataacagctactcaatgaccccgcggctcgaacagtggcatatcaatgataggtgcccacacgctagttcaacaagtgcatggaattggggaataacgacacagcagtcatatgtcgcgtcatctcggggtccggcagcccgccaacacagcacgccccacacttaaacctcataagtattagaatgtataacgtaacactagatttgggacgaggcggattaaacatgattgtgtgcatacgcaacggggctattcgcgtatcatagaacgaacgcggataggtattgacccgatgccatatcccacgtccctctcgttccacccgctcccctgaccgttatctgctccttctcaactatcatattgaggtccggcggggggcggttcgttacatggtatatagatacggcagagaaatttcttcccccaatacgacctgcccggactacatcatattacttgtgttggggggcgcataataagcgatgcgacaaatttaaggtgcaacaattatgatagggcggtggcgtatgtagagaaaaacatcatgcgtgtcgccatccaagctcttggaaaaccgccgcgcccgactgcctcgtatcgccgataactctcccgccgtagcatctnaaaccccaccttaaaatagatgactacaaaaaccctcatcg

SEQ ID NO: 2654 - DNA, 553 bp, Glycine max
  misc_feature (32)..(33): n is a, c, g, or t
  misc_feature (355)..(358): n is a, c, g, or t
  misc_feature (386)..(387): n is a, c, g, or t
  misc_feature (429)..(430): n is a, c, g, or t
  misc_feature (432)..(433): n is a, c, g, or t
  misc_feature (443)..(443): n is a, c, g, or t
  misc_feature (491)..(492): n is a, c, g, or t
  misc_feature (495)..(495): n is a, c, g, or t
  misc_feature (537)..(539): n is a, c, g, or t
  misc_feature (542)..(544): n is a, c, g, or t
  Probeset Number=SeqID_12433
agatgaggcaagtttgttctccacgagacatnnaaagagaagcaaccaacccgagcatagcatagcataggattacagaagaaatcggaaaaattggggcccaacttcttagcttcaacaattctttagaggctgctgtggatggtatctggaaagtgtgtcctcgggctggtggacccattctgttccctggctttaatggcgaattaatctgccctgcatatcatgagctctgtaactcagaaccagtggtcgcgtctgggcaatgtcccagcgcatgtaatttcaacggagactgtgttgatggaaggtgccactgctttcttggatttcatggtcacgattgcagtagatnnnnctgccccagcaattgcactggcaatggnncgtgcctctccagcggaatacgtgaatgtaaaactggctatnntnncattgactgntctaccgccgtctgcgatgagcaatgcagccttcatggtggggtttgnnacnatggactttgcgaatttcgctgctctgactatccgggatatnnntgnnngaacagctc

SEQ ID NO: 2655 - DNA, 1419 bp, Glycine max
  misc_feature (16)..(16): n is a, c, g, or t
  misc_feature (22)..(22): n is a, c, g, or t
  misc_feature (25)..(26): n is a, c, g, or t
  misc_feature (52)..(53): n is a, c, g, or t
  misc_feature (80)..(80): n is a, c, g, or t
  misc_feature (88)..(88): n is a, c, g, or t
  misc_feature (135)..(135): n is a, c, g, or t
  misc_feature (215)..(215): n is a, c, g, or t
  misc_feature (229)..(229): n is a, c, g, or t
  misc_feature (262)..(262): n is a, c, g, or t
  misc_feature (589)..(589): n is a, c, g, or t
  misc_feature (734)..(734): n is a, c, g, or t
  misc_feature (766)..(766): n is a, c, g, or t
  misc_feature (803)..(803): n is a, c, g, or t
  misc_feature (807)..(807): n is a, c, g, or t
  misc_feature (924)..(924): n is a, c, g, or t
  misc_feature (1056)..(1056): n is a, c, g, or t
  misc_feature (1139)..(1139): n is a, c, g, or t
  misc_feature (1206)..(1206): n is a, c, g, or t
  misc_feature (1257)..(1257): n is a, c, g, or t
  misc_feature (1306)..(1306): n is a, c, g, or t
  misc_feature (1363)..(1363): n is a, c, g, or t
  misc_feature (1365)..(1365): n is a, c, g, or t
  misc_feature (1412)..(1412): n is a, c, g, or t
  Peptide Sequence Number=SeqID_6298
  Probeset Number=SeqID_12434
ggttggtgtgtcgttngcgccnccnncccacccacctccgcggcacgcggannaataatagaagtagggatgtagtgaanaatataantattacatatattatgtacttttgatgtgtacttcgcggtgagaggnactaaataaagggaagacgtaataatcaattgtgtctgcgtcgtgttgtctcgacagtatgtcactgatgagacgagtanaacaacataacacncacacttcgctctgtcctcacctcagtgatatntctatattattatactgagatgcaagatgatgtgagatacgtgaagcaggagtgtctctattaaacactaatctatgtcactcatatatatgtgtatgacatagaatatacatgatgtcaatacatacaactagtaagcgcagacagcacagacgacgcgtgagaccagcgctctagacgacaccgcacgagagaagagagagggacgagcgtgatgagggtgcgcacgcgtcaatataactaaccataagcgagcgtcaccatagtgcgctcgcctatgtaccgacaacactggttgtacacgcacacaatagagtacaaggtagncagacgtgatatgctagtgcgcttgtgtatgagtagggcggtatatgtaactctggcggcggtgcaccgaatgcgactatgcggacttgctgctctctgtaagtattgggataaaaagaatgtaggtggatgagatggagagatnaatatgataggaggatagaaaaagttgaacgngtgatgcgtatccacgtactatactcacactctcccncgcnatcatcgcgttgtgtaggaagatgatggatgtagttaagtagcaccacaccccacccttcctcttgcgtgtgctgtgctggtggttgtcgcgcccaccctctcagtgatatctagangacgatactgattccgcgctgcctccgtagcttcgttcaggctctctctggtttgtcgcgctcgctgctcagcgtcgctcggtcgcggagttgtgctagtgacggcgttggctggtcgggcgcctgcgtcgnctatgacgagtgagtcgcgagtgattgtacgacggaccgtcggtcgcagtacggccgtgatgtctgaactctatctcagtgantatatgatatgagagacgatatgcgtcagtcgtagctgcgtgcatacttgtgagtaccacggcgcgncacactgattgtgtgtgactcgtgagcatcctacgcaccgtggcgtcgctngctatcacacatgacggatacactgacacgcgtatgatgcgcgatgcanctcgcccactgcggtgtgctacgctcgtatgccgagcgtctgcgtgcactacgcgcncntcgcacgcgtcgtctggtgcgacatgcagtacgtgcctctcagctcntgacgtg

SEQ ID NO: 2656 - DNA, 703 bp, Glycine max
  Probeset Number=SeqID_12435
gttcttgattgctagcggacgctgtcacagcatccacgctaaccgatgcaaccataccacggagaatttccgctatactgctacgtatttttaatccgctgtgagctaccacactgacacaccacagaaaacacctatgctgttcatgagattacaccgatggcaatcaatcccaggttaacgagatgttgtctcactataacaatgcaacgtataagcacgcctgctacaatcagctgttttagatcgtggccagcatgagactggcgcgtgggctacctcattactgcgctggatgcgtgaggtatacacgcagagggtcctctcatacggccagatgactgatccacattcctattccatgtttaatctagcttaggctgcacaagtaccatctgttgcccttgaggaacatacaccttggatgatactaggttcacgaggaatagagcaatacttattgaaacactcgggagagaagcgcagtgaggtgacaccagatgggttgctttctgctgaagaaatggaatgcatgctatgctgtgtgaatgctcctatgatatacagggactgatgattcaaacggatcagagggatatacttataattacttagaagatgtaaccacagagaaagtatgtgagatagtagataagctgagaaagggtgagaagccaacgcacggcacccagaatccccgacg

SEQ ID NO: 2657 - DNA, 686 bp, Glycine max
  Peptide Sequence Number=SeqID_6299
  Probeset Number=SeqID_12436
gggagacctttttttcttttttctttcccccccaaccattcccatccccccctcctcctttcccaggttttggttccaagtacattttcaaatcccccccccccccggtttatttttttggttcccccccccccccttttttcaagtaagctcaaattgggaaagcccccttccggggggaccctgtttttgttttcctcgggggataaaggccagcttttttttgggcccaggggaaccttttttttcccgtttaagttttttgaaaaaaagttggaaggggtcctttttttgctccaaagtttttggttccgatccgggtggttttttttttttgggggcccttttccccgccccgatttttttgggttcaaggggggggcaaatcccacccgggaaggggggtttgaaatgtaaatccccagtaaatgggaaaagtcccgcccctttttaggggtctctttaatttttttgttcaaagaataaaagggggggggagggttgctttttttttttttggggcctttttgggttgtcccccgttgttgggtttcccaaaattttttgtaataaagccgccaattccatttgggttcccgcccccaaaaaaaaaaaaaaaaaaaaaaaaaaaaaaaaaaaaaaaaaaaaaaaaaaaaaaaaaaaaaaaaagaaaaaaaaaaaaaaaa

SEQ ID NO: 2658 - DNA, 707 bp, Glycine max
  Probeset Number=SeqID_12437
acaattggctagggagaacctgacataagcttgggcaatagattatctatctgttgctgcttacgaccccttgattccagctcaccttgttttttgaaaggcagggaaatcattctcgtggaaggcctgaagcttgattatgtggcagcaggaatatatcggtccattgcttaccttttagggtggctggtgctgagggatcccccataagatgccttttcctccaaaaattagtcaccagctagcagttccaaagccgacccgtcatgcagccgggggttatgctttggaaaggggtcttaattaccaggcatagggttgggttccaaggtggttttcttaaacccgaataagttggaaaaataaatataaagtggtgtcccgggcccatttggagcaaggtatcataaatgcttagcaaagtgcataaacgctcctccaaatcatttcagaaataaaccagtatggatattggatgatatataaagtactatgtaatatccagtgaaggtataccaaatgtcaaatagcaattattcttgcgtacttttaaatcccctatatggatggatgtttggaattattattttttaagaagaggatgtttggatttgtttctttaccaataaaaataaatcaatttttgaaaaaaaaaattttttataaatttcttatactatattttttattttgggggggggcttttt

SEQ ID NO: 2659 - DNA, 361 bp, Glycine max
  Peptide Sequence Number=SeqID_6300
  Probeset Number=SeqID_12438
tcaaacctgaacgtctggacccttattctcgttttccgaaccctaaatactccgtacatgagacctttaaagcgtgggggtctaccacttgctaaatccattgctgctgaatgtgaataccaccaaactgattgcataaggcccttcacaatgcctcttatgagacttgcttgcactgccttagaaatagttccactcacaacgagcaaagttattgataatttgattaataaatttaattaatatttattattttgtcgtgcacctaatgactatgagctgtcaagctatgttcatgctcctcaggtttagaaaatagatccattgcttccttggtgtagtcagattttgcctttaatcc

SEQ ID NO: 2660 - DNA, 1640 bp, Glycine max
  misc_feature (5)..(5): n is a, c, g, or t
  misc_feature (168)..(168): n is a, c, g, or t
  misc_feature (220)..(220): n is a, c, g, or t
  misc_feature (824)..(824): n is a, c, g, or t
  misc_feature (922)..(922): n is a, c, g, or t
  misc_feature (1093)..(1093): n is a, c, g, or t
  misc_feature (1100)..(1100): n is a, c, g, or t
  misc_feature (1265)..(1265): n is a, c, g, or t
  misc_feature (1364)..(1364): n is a, c, g, or t
  misc_feature (1387)..(1387): n is a, c, g, or t
  misc_feature (1404)..(1404): n is a, c, g, or t
  misc_feature (1412)..(1412): n is a, c, g, or t
  misc_feature (1522)..(1522): n is a, c, g, or t
  misc_feature (1611)..(1611): n is a, c, g, or t
  Peptide Sequence Number=SeqID_6301
  Probeset Number=SeqID_12439
gttgngatcgcggtctcatggctagcaactcttttttatagacagtgtatatcattgaagaaaatatattcgagagctaatggacgtgtatggtgcgggagcttagtaaatatatatgtatattatataaattatatatgatatgctctatgtataataatcttcaanatataataaatatatatagatttattaatatttatatagacgtagatatatntgttatattgattacatttgtagaatagtgatattagataattaacgttgtgatatatatactcatgtatattattatgctgtcgctctttctcagcgaatagtgcgtagttgatgtgcaggtgtctctgtgtactagatagataatatatagatattagatagacgaagagtaatagcatgtgtaattcatagatatcatagttagtaatgaaagttatcagaggtttgttcgtagtgagactagagacgttgttgagtagtaggtataatataaattatatatataagaatagtgatcgtgtgtgctacaatttacatcgtgtcatgtgatgtgttgtatgtgtacgctgtcgtgctaagctttcttataagtgtgcgacgtacttgtattgtcttgtatctatcagtatagtacggaacgcgcagaggtataatgctatatatagtggatatggattatatatatatgataatatcattattcgcgatggtgtctcgcgtgtgtattatgttattatttgtctctttctctacacaatcatattagattagtaaatagcaatcaatatattcgatagatcgagttgtgatcgacggtctanacgtagtgtgcgcgatgttatattgtatctcaccagcaacgaatcaaatatctctcgtacccaacacacaaataaagtgattcatatcacatatatcntcacacaaggagaccgaaggaggaggcgagagtggtgaacaagaggaatagaaatgatcgactgtagtagatatgaataaaatgaaacataaaccaaaatatattaactatattcaaatatatgagttcatatactcttcgttctacaaaaattaactcgatttattcaanataatanatgcacgcgatgtcatagcgcacgagtgtgtatgacagacgacttgtcgagtgtatgttgttgctgttacttgttatgtatacatgtgatgtgtgtcgtaattcggtaagtcttgtgctctttgctgtgtgtgtctatattccctaatccgattttagatagtcncctatcattcagtctatagcatcacgtcaattattatctcagccatctgcgtcatcgcttgtagctcatcaatccctacgtatcctattctcttctgtntccgctgcatatcttcattcatngcttctattcttctctncgtgtgcnattaaatcccagcagaatattgtttccgtgtgcacactgtgtacatcacatagtgtttgttgatttatcctctcctctctcgttacactctttattcttatcatattatntgtgttcttcctttccctttcctttattgttacgtccttcttagctgttattcttatatgtcttggttgtgttcgcatatagagcatanaaacaaaaacaaaacacaacaacacaaca

SEQ ID NO: 2661 - DNA, 1698 bp, Glycine max
  misc_feature (30)..(30): n is a, c, g, or t
  misc_feature (43)..(43): n is a, c, g, or t
  misc_feature (84)..(84): n is a, c, g, or t
  misc_feature (1042)..(1042): n is a, c, g, or t
  misc_feature (1048)..(1048): n is a, c, g, or t
  misc_feature (1069)..(1069): n is a, c, g, or t
  misc_feature (1225)..(1225): n is a, c, g, or t
  misc_feature (1307)..(1307): n is a, c, g, or t
  misc_feature (1318)..(1318): n is a, c, g, or t
  misc_feature (1505)..(1505): n is a, c, g, or t
  misc_feature (1525)..(1525): n is a, c, g, or t
  misc_feature (1536)..(1536): n is a, c, g, or t
  misc_feature (1546)..(1546): n is a, c, g, or t
  misc_feature (1559)..(1559): n is a, c, g, or t
  misc_feature (1632)..(1632): n is a, c, g, or t
  misc_feature (1639)..(1639): n is a, c, g, or t
  misc_feature (1652)..(1652): n is a, c, g, or t
  misc_feature (1685)..(1685): n is a, c, g, or t
  Probeset Number=SeqID_12440
ttcttttcattctctccccccacccccccntcctcaactctcntcctacacctctatgtacacatacctatatttcattctctntatattcacacattatctcctctccatagcaattccatagccgcgagcaccgctcctccctcctccactcgttattgcacagccactcccgtatctctgcgtcacgcatatacatatagtgtccgacacgagaaaaccagaatacacacgcaggtacaaaacagtagatcctactctcaatacaattcccccctacaacacacacctaccgccgagcataatctaaactgtgtacagctacgaacgcgcatcacgtacctccatacaccacataacccatccaactcatcccatcactcccagaaacggaaatatcccatgtatcacttctgcgtgctccccatccctccaccgctattctttctcttcccgcctctcgttctcaccatcccacctaccactctcccacccctcatcactccactatctacactaatctatacattatgtgaattaagagcgtcatctcatcctccaggaatatattaaaataccaacattctacacacacacacagccctctccaccaacacccatcacatatctcacccgcctaatccaccaactaccaacattactcactacatactgacacgccacagccactgactcctgtgtcctttcttctcgtcctcatatatatactccgattcttatatacatcatctcaccgcatccgctcttcgcctgcacactcaactccatctccgactacatcttcgcgactccctattatccatcatctctcactaacacttcgcacctcccaacccactatcttattgatcacttcaatatagattggtcgaccaatatatacctgtatacgacgattctatctctccaccactcattacacatatacgctaactccactcaatcatctacattttctcactcatcaaaccgcacaatcataccaacacgacgccctgctccggcactctacgtcaagatnatcaantcgacaccacaccgctacacnatactctatatcagcactaccgtcgtccgctcctatcactaatactattcatccgcctagtacatatctctgtctcacacatacctctatcacgacgtacgacgacacgtacgatctcgtcgacatcgcgtcgcagcatcttaatatcgtcataantaacacatacatctcgttcgacatcataccccacgatactattctgtaccacgcacacgctcacctcatgggaccacacctngctcgtgcttncacctgcgaggcgagacatcctgtactctgtactaccgatcatatctatcatatctccccgctacgcgcaaccagtcacacgcacgcgtactaagactcgtgtgatgcgactcgtagctatctcgtcgtcgcgtgtgtaagtatgactcgcgtcgcgtctataccacgtagtcatgctactagtaanatgacggctgcttactcttnctctatatcanctatcgacantatcatcacaagnacctaccaatctctccattcgtacatcagtaactcgtcttcacgtaccgatatgtcacatgactaattcctgntactcanatcactcaacccntgcgacatcgtctgtgctagcataatctgacgntcctatcactaat

SEQ ID NO: 2662 - DNA, 426 bp, Glycine max
  Peptide Sequence Number=SeqID_6302
  Probeset Number=SeqID_12441
gactaatgtagccaccatcacaggggcgcaatcatggggtcttctagcttttgttatatttacaggttcagtaggcaagatacctggaactatctgcgctccactttgatgccaaggtccttttaatgaagctttaagtgactagggtccttgatgaagcgcaaggccttgcctgaattaatagacctcaacatgggaaatacaggaaaggttctgaatgatcacacctctgccattatggctcttatggctggctttactaccttcatcaccactcctctcgtgactggtgtgtataagcctgccagaaagggaaaaataacaaattacaaatatagaacaattggaaggaaaaatgcaaatagccaactgaggattcttgcctgctttcatggtgcaagaaatatttcatcgatgataaatttg

SEQ ID NO: 2663 - DNA, 834 bp, Glycine max
  misc_feature (375)..(375): n is a, c, g, or t
  Peptide Sequence Number=SeqID_6303
  Probeset Number=SeqID_12442
cacagccttgaacttgaactatcgtgtcttcttggctttctctgttcaggatcaacatggatattgtatcacgagctttgctatttccgtgggctatactcgagctcatattaagcacaccttgctcatgcgcttacgggaccagtggatctaatgtgaaaacagctatctttgtgtgccccactcacatacttgataccatgtttcagagaccccatcattactggagggcgcggctataatcacttgtgttggagggaatgatcaagaagaagcagaacgatcaatggacataatgtggcgagtgattaatcccaaattaggttctaatgtagttgctgtcaaacctcctgcttcattaattgccaatgtggngtctgcatggtcttttctcctctctactgtgagcaatttgaagctaaattcaaaaaactggcagaattcatatatcctatttatctagtcttctagacaaggaagataggtctgtacgaattgctgctggtgaagcacttgctctaatttttgaaaggggagttatagataaatcttctgccgagtcagacagtgcacgtgatacaacgcaagaagggtgttaaccacttgaatgctacatatttttacaaggattgaaaggaaaggtgatatatcatatgctaattctctctataaaggctgggagaatatgttctgcctactaagatcttactcgtcagaggaacttcgtttagaggttgtcggatcatttgtagatttgctacaagcctgatttcatttcttggaagagatggctcatgcttgagcggttgatgatttcttccgtgtgccatgttc

SEQ ID NO: 2664 - DNA, 1382 bp, Glycine max
  Peptide Sequence Number=SeqID_6304
  Probeset Number=SeqID_12443
taaaaattttttgtttttttcgaatcaaccaagcttctctctaatggacgccactaaaactagacctgaaattggtaaattctatggtttcgatcacgttcttttctgggtcggaaacgccagacaagctgccagcttctatacttctagatttggttttgaataccttgcctacaaaggtcttgaaactggtgaaagaaacgttgctacccacgttgtcagaaacggtaaaatcgtgtttgccttcgccaccacctatggtccttatgaaaataaggatgaaaccatggccaagcacttggctcaacacggtgacggtgttagagatatggctatgaccgttgaagatgccaagagagtttacgatcttgctgtcaagagaggtgccaagtctgtcgctgaacccaagactctctccgatgaacacggctctgttatcatcgccagtgtccaaaccttacggagacaccatccacactttcgttcaaagaaacgtcaacggacaagagtacaagggcgctttcctccccggcttcaaggaacactaccttagagaccctcttaacgaagttcttgcccctaccaagctcgacgttattgaccatattgtcggaaaccaatctgaaaacgagatggtccccactgccgaatggtatgaaaagaccctcgatttccacagattctggtccatcgatgataagatgatgcacactgaatactctgctctcaattctattgtcgtggctgactttgatgaggttatcaagcttcccatcaacgaacccgccaagggcaagaagaagagtcaaattcaagaatactgcgatttttacgtcggagctggtgtccaacatcttgctctcaagaccgaaaatatcattgagtctgttgccgctttaagaaaaagaggtgttgagtttctctccattcccaagtcttactacgacaacttcagaaaggctctccccaacctcagtatcgaagtcaaggaagatatcgacaccattgaaaagttgggcttgttgatcgattacgatgacaatggctatttgttgcaactcttcactaagcctctcgaagacagacctaccgtcttcattgaaatcatccaaagaagaaacttctggggcttcggtgccggtaacttcaagagcttgttcaaggccttggaagacgaacaagagaagagaggaaacttgactgatatgtaaaacaatactgaatataataataactcatttgattatttaaacaactcataagagtatgattcataattattattatttgatatataagggtgagtccatgaacttttaataagcttaccttactcatcataaaagcttcttccttcccaataagctttatatctaaaccct

SEQ ID NO: 2665 - DNA, 1650 bp, Glycine max
  misc_feature (33)..(33): n is a, c, g, or t
  misc_feature (141)..(141): n is a, c, g, or t
  misc_feature (174)..(174): n is a, c, g, or t
  misc_feature (192)..(192): n is a, c, g, or t
  misc_feature (312)..(312): n is a, c, g, or t
  misc_feature (421)..(421): n is a, c, g, or t
  misc_feature (489)..(489): n is a, c, g, or t
  misc_feature (602)..(602): n is a, c, g, or t
  misc_feature (646)..(646): n is a, c, g, or t
  misc_feature (680)..(680): n is a, c, g, or t
  misc_feature (775)..(775): n is a, c, g, or t
  misc_feature (781)..(781): n is a, c, g, or t
  misc_feature (840)..(840): n is a, c, g, or t
  misc_feature (902)..(902): n is a, c, g, or t
  misc_feature (1030)..(1030): n is a, c, g, or t
  misc_feature (1098)..(1098): n is a, c, g, or t
  misc_feature (1109)..(1109): n is a, c, g, or t
  misc_feature (1118)..(1118): n is a, c, g, or t
  misc_feature (1179)..(1180): n is a, c, g, or t
  misc_feature (1187)..(1188): n is a, c, g, or t
  misc_feature (1207)..(1207): n is a, c, g, or t
  misc_feature (1215)..(1215): n is a, c, g, or t
  misc_feature (1217)..(1217): n is a, c, g, or t
  misc_feature (1226)..(1226): n is a, c, g, or t
  misc_feature (1241)..(1241): n is a, c, g, or t
  misc_feature (1245)..(1245): n is a, c, g, or t
  misc_feature (1286)..(1287): n is a, c, g, or t
  misc_feature (1343)..(1343): n is a, c, g, or t
  misc_feature (1354)..(1354): n is a, c, g, or t
  misc_feature (1361)..(1361): n is a, c, g, or t
  misc_feature (1404)..(1404): n is a, c, g, or t
  misc_feature (1432)..(1432): n is a, c, g, or t
  misc_feature (1463)..(1463): n is a, c, g, or t
  misc_feature (1473)..(1473): n is a, c, g, or t
  misc_feature (1479)..(1479): n is a, c, g, or t
  misc_feature (1513)..(1513): n is a, c, g, or t
  misc_feature (1545)..(1545): n is a, c, g, or t
  misc_feature (1550)..(1550): n is a, c, g, or t
  misc_feature (1552)..(1552): n is a, c, g, or t
  misc_feature (1554)..(1554): n is a, c, g, or t
  misc_feature (1558)..(1559): n is a, c, g, or t
  misc_feature (1561)..(1566): n is a, c, g, or t
  misc_feature (1568)..(1569): n is a, c, g, or t
  misc_feature (1571)..(1576): n is a, c, g, or t
  misc_feature (1578)..(1580): n is a, c, g, or t
  misc_feature (1582)..(1582): n is a, c, g, or t
  misc_feature (1586)..(1586): n is a, c, g, or t
  misc_feature (1589)..(1589): n is a, c, g, or t
  misc_feature (1593)..(1594): n is a, c, g, or t
  misc_feature (1600)..(1600): n is a, c, g, or t
  misc_feature (1602)..(1602): n is a, c, g, or t
  misc_feature (1604)..(1606): n is a, c, g, or t
  misc_feature (1616)..(1617): n is a, c, g, or t
  misc_feature (1619)..(1619): n is a, c, g, or t
  misc_feature (1621)..(1621): n is a, c, g, or t
  misc_feature (1624)..(1624): n is a, c, g, or t
  misc_feature (1630)..(1632): n is a, c, g, or t
  misc_feature (1637)..(1637): n is a, c, g, or t
  Peptide Sequence Number=SeqID_6305
  Probeset Number=SeqID_12444
cggtagttgatggtcgcggtgcgtagatgcgcnctcgcgcgtctctaggtaggggtgcaggtcgagggcgcgtgtcgtgagtagagcgttcatgcgatcatacactactcagagggggtcgtcgtgctatgtatctactcnactttcgatcaacagtgccgcgttgcgcgatancatacatacatccacgcngagtcacatcgacactcacttaaatagcatcgaatgatcacgagagatagccgtgcgatatgcgttatatctcttgagattatgaggtatgtagtcgtcatgatgagtcgtgcagccganttgatcctcgctactctactcgcgagccgatcgcggtgcgtcggtcggtagattctgactatgccgcgactcgtagtaactcagcgagatcggtgacgctatgatgtgntcgcgacggcgcgatgccgcgtgtccatggatagagtgcgtatccgtcgcagcagctactgacgtacnccagtcatctatgttgtgatgtgagctactcgcaaccgattatctcttagcacgccgcacgtacgtcgcgcacgcgctattgtggtccgatgctagattgattcatcatctgntagatactctatgagatgctgttgagcaatgataggtgtagcgntatatggtcgctgtcgagcgtgatactggagggnagagatggtgcgcaagacaagcgtgtgtcgtcgagtgtgtatatcgatgatatgtctgatgacgtgagagtgatacgtacgcatgaagtaagtgnagagangtgacgtatagactcgatgcgatgagatatgtgagcgggtcgatggtgcactagatcantagtatatgcgcgctctgtgcgcacgtaagcgtgtgagatttagaagtagcgtgatgaggtncagcgtgaggagtgattctgcagcacgatatatgctagtcgctctgaccgacgctatgtattgcgtgcatactaagtcacgcatcacgcagcgacaataaaccatcacactacgaatgagagagaatnagttcgagaatactgagcagcgagaaacgtagaggagtcagagtcgactatacgtagaggtgtcggcnagggtcacacngttgagagngtagcgatcagatcgcggtgttcgatgtgatggttatctgcatgagatgactagagatganngtgtggnngcaagagagaaacagcctncacaaganantcacgcatncaacactagatcttnccgnggcagacaggaaatacccataggcgagcgcagacaccaccnncggcggaccggcgcccgcgcgcaggcgcatgcagatacgtgccagtagtcgcggcngcgtatgcagnaatgacnatcttatattatacgcaagctcattatctatttatgcaggtantggtatctcttgcctgtgacaggcgccncccgtgcccgccactctctcgcccgacacgnattgcggcgncagatnccctccaggcagaccgtagtcacaattcacagcncaacctgaatgttgacgactcctgttatcttntttcncncncgtnncnnnnnnanncnnnnnnannnanatanaanaggnnagagananannngagacaaagnnananaanaaagannnaaaanaaaaaaaaaaaaa

SEQ ID NO: 2666 - DNA, 484 bp, Glycine max
  Probeset Number=SeqID_12445
ctataacccagcagtacagttggtattgaagcatctcaaggaagtagaaatcaaatgtcataaggaagacgaggtggtttgccagattgtgaagatcttgagtacctttggagtactttctgatcaaattgacatccaagttatccaaaaggcatatgtttctggaagtttcagcttcgagcagactgagatcctggattgatgatggatcttcagtctcctgatcgcttgggcacctgtctactacagctatgagtttgtggccttctgatctggatgttctagcagtcttgctttatctgaaccttgcgttctgagtgagtaccaggacgtccatgttagctcaggatcactatgctggttaaaattggtctcaagttcgtttgcatttcgtgtgggtgtccgttatgcaatggttgcccttggaaacatggttgatgggcttcaaagtgttgtttgttatctgtccttggattagttcggc

SEQ ID NO: 2667 - DNA, 1719 bp, Glycine max
  misc_feature (9)..(9): n is a, c, g, or t
  misc_feature (52)..(52): n is a, c, g, or t
  misc_feature (54)..(54): n is a, c, g, or t
  misc_feature (869)..(869): n is a, c, g, or t
  misc_feature (1041)..(1041): n is a, c, g, or t
  misc_feature (1260)..(1260): n is a, c, g, or t
  misc_feature (1382)..(1382): n is a, c, g, or t
  misc_feature (1407)..(1407): n is a, c, g, or t
  misc_feature (1416)..(1416): n is a, c, g, or t
  misc_feature (1422)..(1422): n is a, c, g, or t
  misc_feature (1433)..(1433): n is a, c, g, or t
  misc_feature (1488)..(1488): n is a, c, g, or t
  misc_feature (1629)..(1629): n is a, c, g, or t
  misc_feature (1706)..(1706): n is a, c, g, or t
  misc_feature (1708)..(1708): n is a, c, g, or t
  Peptide Sequence Number=SeqID_6306
  Probeset Number=SeqID_12446
ttccatccncccgcttcctatgccgggtgttcagccgaatctaacacacttncncgcggtatagatgcactggtatcctccgcatcgaggcctgctcggctatggttctccccccccccccccaatttttttattttcacagagattccttgtgctgttatccctggagcgccccgcgatgaggttatatatacggctggaccacatatgttctctctcggcgggacgacgtcatctatatccctgcgaggcgcacaagaacaatcgtgtcccacctcgcaggagtagtttcgttgggagaaagtacattctgatggtttcgcttgctccctctctttcacgtttcgtcataacccttcgtcttatccatacatacaaatgttccaactcacttcactggcccacggttactaccgtactcggcctcttggaccacaatcgcgagacatgcacgcatgcccatggtagacgagaaatgcccttcccgctatcatctaaatttgcactcgagtccttttgcagaaacattaaataccgtgacggagtcgccccttcgcctatcctacgggcgcctacaccctggaagcacctactccactcgcgggcgacggccccacccgcacaggctactagccccgatgatcgacctcgccctcggatagttagaggatgcctgtcatcaaccggctgccctcgtcctcgcgttgtgtcgcgcaccatcggcgcgccacctccccccccccttttatgtgcccgcactgccacgcacatctccgtactcgaatgctcagacacatagccaaagaactattaaacgtagccgccaccgacctttcggctttgtggccgacgctatacgctttatgctnactgacatacattcgagcagtgtgacgtgtcttactgaccatgtttagatacttaatgactcattaaaacatagaaacacgtagcgcgattcgcactctctgctctgtttatacgtgagtggtatctgtacgtctttgtgcgcacatattaaagtcctatgcataattctcnacataagatatataatccccgcatcgacggctcgccacaccgccaatctgacgtggagcgagcgcagcctatacgtagctctccgtctattcgagtcacgagctgcgcgcagcatacgataatctctctctacacacgtgtgatgtcatcgggcgatgagctcgagtcacgctatgcctctgcacggccgcggagcggcacggtgttgagtctttgtcntccttcacatgagcaattagtcgttgcgactcgctcgccgatgtagcgacgtagtggacatctctcccacacgttatgaccaagtaggacggagcggtcactgtatcaagcacctgcctccntctttcgcactctccatctccgatntcggtgtcntactgncacgcgtcccngcatattcgccatatcagcagctgtctcgagtgtgttatgacatcagtatgactncactcaacgcgatatcgttacgcgagtcacacagaggtcgttgatctcacgaccacactataccggtctacatcacagcggcgagcgggtccatatactctctcgaggatcgtctactcatatcagaatcgttttctgcgncgactaatacatcgacatacgtacgatctattctaaatgcgtcgacatcacggtggtacctcgcgtcggatcacatntnacgaacacttt

SEQ ID NO: 2668 - DNA, 1539 bp, Glycine max
  misc_feature (1)..(44): n is a, c, g, or t
  misc_feature (51)..(51): n is a, c, g, or t
  misc_feature (59)..(62): n is a, c, g, or t
  misc_feature (73)..(73): n is a, c, g, or t
  misc_feature (77)..(77): n is a, c, g, or t
  misc_feature (103)..(103): n is a, c, g, or t
  misc_feature (118)..(118): n is a, c, g, or t
  misc_feature (191)..(191): n is a, c, g, or t
  misc_feature (201)..(201): n is a, c, g, or t
  misc_feature (275)..(275): n is a, c, g, or t
  misc_feature (308)..(308): n is a, c, g, or t
  misc_feature (344)..(344): n is a, c, g, or t
  misc_feature (1044)..(1044): n is a, c, g, or t
  misc_feature (1139)..(1139): n is a, c, g, or t
  misc_feature (1327)..(1327): n is a, c, g, or t
  misc_feature (1399)..(1399): n is a, c, g, or t
  misc_feature (1408)..(1408): n is a, c, g, or t
  Probeset Number=SeqID_12447
nnnnnnnnnnnnnnnnnnnnnnnnnnnnnnnnnnnnnnnnnnnnttttttnttggagcnnnnatttattaggngganggcgagcgggactcgttacctagcgngcggctgtaatcgtnagctatgtcttctgatgtcccggagcagaatacgagccggagcgcgcacacgcttatccgggcgagccgctgncacatctgtnaaatagtaagacctgcgttctcattatacctcctctatactattgattctagtgtcagacacactgtataaggnacacaaacatgcaacaccagcggtgtctgtgtnaccacgcgaacaaatatagatatagcgtcggtgcanacttgcagcagagacatacacctggctgcaacgactctcatacttcaccaagtctgccacatgctacactctctgtactcaccacaagatcctctctccctctgacgccatcgcccgcctactctctgccctccctccactacctcccctcctcccctgcaactgctcgcgctctaacaccacctcctgcccttcccactctatcgcatcgataaactaccgcacacctcacctcgctcctgcatccatttagacacccaacaaaccattaggttcggacaagtatgctagttctatgccccaacgtagtcttatgcggctagtcgcacgacttacaagcgctcactatccctctcactctctcaagcccactcaaacattccattttcgcactattacacacccgacaacccccttctatcctttctcctcctcttataccgactgatgcactacttcactctgaacataggctctcgcccacgaatacttgtgaggaacattttgatcgcgaccgtagcagaactatagttggcacatccagtgtcctctgtctcctccaatctactctcactatgtctcactgtctatcccgcgcaatctccaccaccttcaaacgctccttcccacccacgctatatgacctcactcgccccccaaccctatctgttacgcacctcgcgactcccacatcatagtnatctcgggcgtgaaccgcgcgaagtacacataacatacaatcattgttctgcaatgtctcacacccacatctatatacacctcttgtgctcctgnatgtaagccactatcaccgcttggacatcactcttctaactcccgtcatcttattccatctcgcggctagcactctcttcgcgcgatctgaatcgggccgcgcgctaccctccgtcgttcgcatagtctcgctacggcgcgccaccctcccaccccctcgccgattcacgagagtgctcctcccgcgnctcacctgtgtccgcgtatgcgttacacaccactatcagcgcccctctccctacaaccactctctccccatnaatatgtanattgtaacaccaaactaaacttctagagatatattatgtagtctgctccccacactccctagctcactaaatgcatgatcggcttattctcctcatctccatctacttataacaacgactgcagtctggca

SEQ ID NO: 2669 - DNA, 1398 bp, Glycine max
  misc_feature (110)..(110): n is a, c, g, or t
  misc_feature (330)..(330): n is a, c, g, or t
  misc_feature (567)..(567): n is a, c, g, or t
  misc_feature (806)..(806): n is a, c, g, or t
  misc_feature (1299)..(1299): n is a, c, g, or t
  misc_feature (1373)..(1373): n is a, c, g, or t
  Peptide Sequence Number=SeqID_6307
  Probeset Number=SeqID_12448
cgttagatgtgcggtacgttagagtgtatacagacagaattggatgggtggatgctcatttgcagaggtggtgcggttccatgtcgtcgtgtcgagtgtgagtgatggcncacgcgtactcttacgtgtagtgcatagatcagaatgtgcaggggcgggagaacaaggaagagatgatgacagagctctcgcggtacgtcggaggtagttgtgattgtgatccagataatgtagtgggctgtcgtggtgattatggcattggagtgctgatgggcacgccgagagaggtagactgtgaccatttctgttgtgggagggaggagatatggntagatttagatatatgtgaaggtcgcgttgttgagatggttcattggaggtgcggttcggtggtgtgcttcattctatcctcgccctcgtctgctcgtgcggatagatgttgtggcttaattgtgtatggtgctgcgtgtacgtgtgtggtgtacattactcacgacataggctagttcgtttcatggcggtacccgtggcatagaatgaggaggagatagtagcgtagatgaatgntattgcagagagagaatagcatttgtattagacgatgggccgtgtatattaatatatttgtaatctatggtgtcatcggtagtacagttctacctgtcggtagtagttgggtgccgtattatatatatatattttgttgttcacgttatatgtggagttgtgtatgtatttattttgtgttttagtagtctggtgtttagtctgtagggtgtatagcacatcgtagagagcgttattcngtccaccgcgcgacagagagggcggcgcacgtagcgcttgtgtgggggcgttgcgtacgctataaaggagggagagggcggccctggtcgaacagagcggaggagggtaatgattgaagacctatattagataacaatggcgctcctgaaggtgtgagggatgtggtggtggagggggtggaggcgtatgtgggcacatgagccaacatacgtgaggatgatcacgatcgctgggctgcgccccccgtgctccatactgggcgtgtagtgtgggataaaaatatgtgtgttataagctaaggtgggtacctgacctcgttcatctatattactgtggtgtgattatctactaaagtgtataagtatggatatgagaaatcatatatgaaaaacctaggagcggacttgtttggttgtgtgtagagacctcaattacattttttttttggcatctggttgttctgggggttggagggatttggttggagggacnaggtctccacaccccctcctcctcttaggtcacgtcatcgttgttgtttgttgttctctcttattattgtaaanaaaagatcagttataatgatatatt

SEQ ID NO: 2670 - DNA, 1800 bp, Glycine max
  misc_feature (33)..(33): n is a, c, g, or t
  misc_feature (57)..(57): n is a, c, g, or t
  misc_feature (65)..(65): n is a, c, g, or t
  misc_feature (83)..(83): n is a, c, g, or t
  misc_feature (87)..(87): n is a, c, g, or t
  misc_feature (104)..(104): n is a, c, g, or t
  misc_feature (126)..(126): n is a, c, g, or t
  misc_feature (145)..(145): n is a, c, g, or t
  misc_feature (209)..(209): n is a, c, g, or t
  misc_feature (216)..(216): n is a, c, g, or t
  misc_feature (224)..(224): n is a, c, g, or t
  misc_feature (232)..(232): n is a, c, g, or t
  misc_feature (316)..(316): n is a, c, g, or t
  misc_feature (331)..(331): n is a, c, g, or t
  misc_feature (395)..(395): n is a, c, g, or t
  misc_feature (410)..(410): n is a, c, g, or t
  misc_feature (418)..(418): n is a, c, g, or t
  misc_feature (430)..(430): n is a, c, g, or t
  misc_feature (441)..(441): n is a, c, g, or t
  misc_feature (452)..(452): n is a, c, g, or t
  misc_feature (473)..(473): n is a, c, g, or t
  misc_feature (530)..(530): n is a, c, g, or t
  misc_feature (601)..(601): n is a, c, g, or t
  misc_feature (623)..(623): n is a, c, g, or t
  misc_feature (647)..(647): n is a, c, g, or t
  misc_feature (658)..(658): n is a, c, g, or t
  misc_feature (692)..(692): n is a, c, g, or t
  misc_feature (708)..(708): n is a, c, g, or t
  misc_feature (771)..(771): n is a, c, g, or t
  misc_feature (844)..(844): n is a, c, g, or t
  misc_feature (872)..(872): n is a, c, g, or t
  misc_feature (910)..(910): n is a, c, g, or t
  misc_feature (955)..(955): n is a, c, g, or t
  misc_feature (998)..(998): n is a, c, g, or t
  misc_feature (1000)..(1000): n is a, c, g, or t
  misc_feature (1006)..(1006): n is a, c, g, or t
  misc_feature (1032)..(1032): n is a, c, g, or t
  misc_feature (1043)..(1043): n is a, c, g, or t
  misc_feature (1070)..(1070): n is a, c, g, or t
  misc_feature (1095)..(1095): n is a, c, g, or t
  misc_feature (1106)..(1106): n is a, c, g, or t
  misc_feature (1142)..(1142): n is a, c, g, or t
  misc_feature (1156)..(1156): n is a, c, g, or t
  misc_feature (1172)..(1172): n is a, c, g, or t
  misc_feature (1239)..(1239): n is a, c, g, or t
  misc_feature (1251)..(1251): n is a, c, g, or t
  misc_feature (1309)..(1309): n is a, c, g, or t
  misc_feature (1379)..(1379): n is a, c, g, or t
  misc_feature (1445)..(1445): n is a, c, g, or t
  misc_feature (1473)..(1473): n is a, c, g, or t
  misc_feature (1592)..(1592): n is a, c, g, or t
  misc_feature (1658)..(1658): n is a, c, g, or t
  misc_feature (1660)..(1660): n is a, c, g, or t
  misc_feature (1677)..(1677): n is a, c, g, or t
  misc_feature (1695)..(1695): n is a, c, g, or t
  misc_feature (1698)..(1698): n is a, c, g, or t
  misc_feature (1706)..(1706): n is a, c, g, or t
  misc_feature (1722)..(1722): n is a, c, g, or t
  misc_feature (1724)..(1724): n is a, c, g, or t
  misc_feature (1733)..(1733): n is a, c, g, or t
  misc_feature (1742)..(1742): n is a, c, g, or t
  misc_feature (1746)..(1746): n is a, c, g, or t
  misc_feature (1763)..(1763): n is a, c, g, or t
  misc_feature (1768)..(1768): n is a, c, g, or t
  misc_feature (1771)..(1771): n is a, c, g, or t
  misc_feature (1776)..(1776): n is a, c, g, or t
  misc_feature (1779)..(1779): n is a, c, g, or t
  misc_feature (1782)..(1786): n is a, c, g, or t
  misc_feature (1794)..(1794): n is a, c, g, or t
  Probeset Number=SeqID_12449
cctactgcagacgacgcgatcacacatcgcatncgctacatcctctagtcagtcgtncgtcgacntgcgcatacgcagcatanatancgcatcgactcagccgncgccgaaggatgcatacagcantacgcagagccgtacagtnacgcagacgagtgacgcagccaggatcatgacacacgcaagatcgagacagcatcgctcagacnagcacanccacgcanatgcagangtatgcgagtgaagtgcagtagcggatatagtagagatatacagagtacatacaacgtcacaagaatgacaaagtcatgacatnactattctcgtcacnactcagtacatcacgctacgctctagctacatcgcagtacgtctgttcactctcactgaggatncacacactgcgcgcntaccatgngtatagcgcagngatagcatggnatagcgctagnggaggaagcgagcgatagtangtcggcaccgtgagagccgacgagcggacgcgtcggctcgcgctctatcctgcccgntctactgactggtcgtgctaactgcagttatatatgatatatcatcatgtatatgattgtcatgcaacgtnattctgctatgtgtgtcacctnatctcgacgcgtgtgacagatcantgatattgtangcatgtcgtacgcgacacgatacgtgcgtagagnatgcgcagcgagagcnagatccggtgcggcacgcgagacgacgccgacgtgcgtcttaatatatgtgttgtactctagntgcatgagtatctgtgtatgagatgtaatcgtcacgtccataaaacgatcatgctgctcttgagagagactgntatgcaacgagaggattatctcagctangtagttctgcgactaagcgacctagcgagcgagcatanccgcacgagaagtggcagacgagaagagcacaccacagagagagngcgacagcaagtagtgaccttctctacacgtacgaacatagtngntctacnaatcaagtaagagtcgacgcagtagnaaggagaaatntactgatacgatcgatgtcatctatgnagtgtagtacggctgcgtcgtggtncgtgtgtgtgngcatagtgtctcagagctcatcgctacgcgtcgcgngcagcgccagacgntgcaactatagtactnaatatacgtgtgcagaagtacaatcgagcgtcgtctgctagagcagagatcgcgcactacgtttctnctaagtgtactnacacgaactgacacaagatatggtagaaagtaagtcatgtagttagtttagtagatgnagcaccatcatgaagagagtgcgacggagcgacggtgagagagtagctctcgaggcggcgacgtgagtgngctgtcagatctcatcgtagatgtgccttaatatatgtgctatgtttgcgaatatagaggatgatnaaagctggtgagaaggagagatgcgacngcgccatgcgctctatgaacacatgagatgatgcagtagaggtaatacagagacgaagcggacgtatactatatgtatctccttgtatatctacgtgcctctactctagtgtgtgatanaaagagaggggatgacggcgtggagtgcggatgctacatgcagccctatgccatagagaaagaganancagctcactcctccttnctctgctggtctacgtanttntaacatcnacgatgtggtgggatntngcgagcggngtgtggagngggnggcgggggggggagggnggggnggnggggnccnggnnnnnaaaaaaanaaccaa

SEQ ID NO: 2671 - DNA, 472 bp, Glycine max
  Peptide Sequence Number=SeqID_6308
  Probeset Number=SeqID_12450
gaatatttgaagactacaaggcccagatagctgactttaacctttctaatcaggcccctgacatggctagacacattcattgatctcgtgaatagggaacttttgcttatcatgctccacaatatgcaatgactgggcagttgactcaaaaaagtcttttctataatcttggagagcgccttcttcatcttcttacaagaagaaaacctgctgaccataccatgcctagaggacagcagaatcttgccacatggtctatcttcagattaagtgaatataaagtgaaacaccgccttgacctcaaactgattggagaatacccacccaaacgcgttgctaagcttggacctactgcagcactgtgcgtgccgtatgaagacgactttatgcacaatatgagcattgttgttaaaacactccaaccacttctgaagattcctgctcctgcccctgctcctgtttcagaaagttg

SEQ ID NO: 2672 - DNA, 1672 bp, Glycine max
  misc_feature (26)..(26): n is a, c, g, or t
  misc_feature (44)..(44): n is a, c, g, or t
  misc_feature (48)..(48): n is a, c, g, or t
  misc_feature (78)..(78): n is a, c, g, or t
  misc_feature (105)..(105): n is a, c, g, or t
  misc_feature (112)..(112): n is a, c, g, or t
  misc_feature (125)..(125): n is a, c, g, or t
  misc_feature (130)..(130): n is a, c, g, or t
  misc_feature (241)..(241): n is a, c, g, or t
  misc_feature (243)..(243): n is a, c, g, or t
  misc_feature (261)..(261): n is a, c, g, or t
  misc_feature (269)..(269): n is a, c, g, or t
  misc_feature (287)..(287): n is a, c, g, or t
  misc_feature (293)..(293): n is a, c, g, or t
  misc_feature (296)..(296): n is a, c, g, or t
  misc_feature (309)..(309): n is a, c, g, or t
  misc_feature (314)..(314): n is a, c, g, or t
  misc_feature (317)..(317): n is a, c, g, or t
  misc_feature (332)..(332): n is a, c, g, or t
  misc_feature (428)..(428): n is a, c, g, or t
  misc_feature (468)..(468): n is a, c, g, or t
  misc_feature (667)..(667): n is a, c, g, or t
  misc_feature (767)..(767): n is a, c, g, or t
  misc_feature (792)..(792): n is a, c, g, or t
  misc_feature (969)..(969): n is a, c, g, or t
  misc_feature (1142)..(1142): n is a, c, g, or t
  misc_feature (1183)..(1183): n is a, c, g, or t
  misc_feature (1190)..(1190): n is a, c, g, or t
  misc_feature (1192)..(1192): n is a, c, g, or t
  misc_feature (1206)..(1206): n is a, c, g, or t
  misc_feature (1310)..(1310): n is a, c, g, or t
  misc_feature (1317)..(1317): n is a, c, g, or t
  misc_feature (1321)..(1321): n is a, c, g, or t
  misc_feature (1393)..(1393): n is a, c, g, or t
  misc_feature (1432)..(1432): n is a, c, g, or t
  misc_feature (1439)..(1439): n is a, c, g, or t
  misc_feature (1536)..(1536): n is a, c, g, or t
  misc_feature (1553)..(1553): n is a, c, g, or t
  misc_feature (1566)..(1566): n is a, c, g, or t
  misc_feature (1573)..(1573): n is a, c, g, or t
  misc_feature (1599)..(1599): n is a, c, g, or t
  Peptide Sequence Number=SeqID_6309
  Probeset Number=SeqID_12451
ctctagtacctcgtcatgtaagtgtnatgaatgtgatctatatncgancgtcgatatcacattctgctgacagtagancgtgatcgtgcggcgtcgtagcgtgtntgtagangcgtatagtgctntgagntgtctacgatcatacattcatcgtgagtatgactgtgaacgcgtagcgtcgagcaagatagagagagtgcgaaactcgctgctctagtcaacgactcacgatagcatctcnantacggtggagagcgagtngcgtctgncacgatcactacacacangtacangtntccatcactctgntatantcnggatcatcatagcgngaagcgcactggcgttagtcgtgtatatattaggtgcagataatactactcatccaatgcacgacacacgtgcacatcatgcacatatcgatcagntggagctcgtgatagtagctacgtcagtgactacacactncgtagcagtgcgcagacgtctcattcacactagcacctcgacaactaatcgagcttgtgcaactatgtgcagtgtcgctatatgtgatagttgattacagtattcatcgagacaacattgatcgatgcagatgatgtaagactacgtaatcatatatatattgtgcactctatctatagatattatcgtaacgatgcgntagtcgacatagataatatcactaccacgatgactatgcgcgcaggcgatatataatgtatacacttctctgtcctattgtcgtgagtgcgtctatgagnctatataagtagcacggagtatgtnagatgtatcgagatatgtatatcatagtatctattagtatatacacacacacacatatataacaagtgacagacggagatatatatcgatgactctcacactgaagtagagacaacaagatacatcgagtagatatatatatcatcacatgtgcatagtagtctatcatgtgcagcntcagtcatatctaatatagcgtgcatgcatttcgtctatgtctagagtgcggtgctgctgtgtcgttggcgagtctacgttgtcatggtgtattgagctataacagatctgcttagaggaagatgcaagctgcgtatatacttacatcatttaggtgatctgcgtgtggcctntgcccagagcgcgatgcagattcggcgtccgtgcgcgacgncgcaccncnaggcgaatgaaagnagatagttgcatagtttcttctgggtgatattagtacgcgtagttgcgagaatacggaaacattcagctgtagacatgacatatagatgcatatgtacacacancgcaagntacnagtgggaatatatatatattacactatatacgcggaggacgcgtgtggtttgtgtagtgggcgtgtgctagnatactgtatatctcagataaagttcctctgtcactccgncgtctanctcactactaatacatgaggtttgtgtctttctctgtgtatatactctatctatgcggccgttgatgtattctatatactgcgtaggaggtgcgtgnttgagtagaagaggtcnagcgttttattcnactagtncgtactcgcgcgatcccatatacgtntgttattctaaaacatattaactttcgcgagcgccgccagagaagcacgaacctccaacaccaccacaccaca

SEQ ID NO: 2673 - DNA, 1761 bp, Glycine max
  misc_feature (1)..(2): n is a, c, g, or t
  misc_feature (1582)..(1582): n is a, c, g, or t
  Probeset Number=SeqID_12452
nncacattgctcctcacagcacgacttgttcaccgatcagagctgattttcgcggctgttaccggtcaccggagattctatccgaaatcgttttccgatgacgataaaaactgttaaagtcagtaacgtttccttgggagcaactgagcaagacattaaggagttcttttcattttctggtgatattgaatatgttgaactacggagccatgatgaacgatctcaaattgcttatattaccttcaaggattcacagggagctgagactgcactactgctttcaggggcaacaatagtcgatatgccagttacaataactcaggatccagattaccagcttccacctgctgcgttagcgtcatctgtaagagaaactcaaactcctggtggtgctgactctgctttacggaaggcagaggatgtggtctccggcatgctagccaagggctttatcttagggctcgaggctgtcaacaaagcaaagacctttgatgagaagcaccagttatcgtcgacagcctcagcaaaagttgcatctttcgatcagaaaattgggcttagcgagaaaataagtgctggtccacttctcgaactctatcactcactactgtagcaccagcacttgctgctgcagaacagacagtgagtaatgctggctctgccctaatgaagaatcgctatgtgcttactggggcatcctgggtaactggcgcttttagtaaggtttctaaggcggctggggaagtaggacagaagacaaaagagaaagtagagggtgcagaagaacatcagaaacgaaaagtggaagatcaatatgcacaagtcctttctgagtccccaaaagcagcagaagcaagtgagcagaaatcttccaagcctgctcctgctcagggtttgatcctttggttgagctcgttgtattgatatatatatacttcctcttaaactcccaaagtttttcaagatgattactgtgcccacctttgtttttatcctcaagtcctctacatttttgtggttagtggggcatcctgggtaactggcgcttttagtaaggtttctaaggcggctggggaagtaggccagaagccaaaagagaaagtagaggggtgcagaaaaacatcagaaccgaaaatgggaggatcaatatgcccaagtcctttttgagtccccaaaaccagcagaagcaagtgagcagaattcttccaagcctgctcctgctcagggtgggatcctttgatttctttcttaatcccaaagtttttcatcttttcaagtcctcattttgttccaaaagtggacccaaagtttcaggtttcagagaagacccaatcagcctttgcagctgcaaaacagacaatgagtaatgctggttctgccaaaaagaaaaatcgctatgtgcttaccggggcattctgggtaacaggtgcttttagtaaggtttttaaggcggctggtgaagttggtcttatttgaaaaaaaaagtggagggtgccgaagaacccccaaaaccaaaagtggggggggggggggccccagtcctttttgggtcccccaaagccgccgaagcaagtgagcaaantattccaagcctgttcctgcccaggggttgatcccttgatttgcttcttggattgataaaaaaacttcctcgggccgcccttttttttttcccgatcgaaagtgaatgtagggctgattttctgttgggaaaaaaaaaaaaaaaaaaaaaaaaaaaaaaaaaaaaaaaaaaaagaaaaa

SEQ ID NO: 2674 - DNA, 1798 bp, Glycine max
  misc_feature (75)..(75): n is a, c, g, or t
  misc_feature (78)..(78): n is a, c, g, or t
  misc_feature (83)..(85): n is a, c, g, or t
  misc_feature (117)..(117): n is a, c, g, or t
  misc_feature (130)..(130): n is a, c, g, or t
  misc_feature (134)..(134): n is a, c, g, or t
  misc_feature (379)..(379): n is a, c, g, or t
  misc_feature (427)..(427): n is a, c, g, or t
  misc_feature (436)..(436): n is a, c, g, or t
  misc_feature (467)..(467): n is a, c, g, or t
  misc_feature (475)..(475): n is a, c, g, or t
  misc_feature (538)..(538): n is a, c, g, or t
  misc_feature (590)..(590): n is a, c, g, or t
  misc_feature (648)..(648): n is a, c, g, or t
  misc_feature (856)..(856): n is a, c, g, or t
  misc_feature (1274)..(1275): n is a, c, g, or t
  misc_feature (1285)..(1285): n is a, c, g, or t
  misc_feature (1567)..(1567): n is a, c, g, or t
  Peptide Sequence Number=SeqID_6310
  Probeset Number=SeqID_12453
ccgggtgacgagtagcgccgagtgctgtcgcgttatatgattcgtgtgaatcactagaagataggtatcgtatantanattcnnngtgttctccgcgcgtccgctccgtacgctcgntattatatatacnattntccctgcgcccgcgcccgcgcccgtgacaatacagcgcgtcacgtgtgatgatgccacgcgtgcgcacataactccacacggcgatgcgtcaattatcagtgtgctgttgttacccatttatcccgccgcgctgcgtccgtcgacagctctgttatatctgtctcatgacgctatcgcatacactgccgcgcacgacggcatgagtgattcaccacgccagctcctattcatatgtcacatcatnatcctccagcgcggtgccgcggacgcagcgagcggctcgattctcacnacacgacgngtgtatcacgccgtcggagctcgggccgcgnttattgtntcacctcgctccgcccgctttatatattatattatcagataatatacaggacgcgagcatcangtatactgtggcgtgcgtgatagagtaataatcgatgctaggatgtatggtnctctcacgtactgtggacgctcgctgtatatatatgttgacgatatgattaacgccancgcacgctctctatgttacgcgtacacgaagcataacaccagacatctctgatctggccggaaacagtattctctgttcgcgataacatatacacatgtgaagcgtaagtagagatgacaagacggccgtgtttggatcggtacataaataagtgtctggggtgcgactgcataacaatatctagttattagtcgatatgcgataatnattataacacctgccacaaccttcgcgcaagatttatgatctcaccaccacgacgcttgtacaagtgacaacaacacgtgacactggtcatatttacagctccagcgtgtatgtctacttctcgctcgcaacgcacccgccttatttattatcccgcgcccgcgcccaccatatcatatatcctattcatgcgcccaatatatatataagagcggccgggaacgacaacagattgacatgagatcttcattcacgcgggcgtgcacacgcggtttactcttttacgcgagtggtcgctaatatatttaatattatcgcgcgcgcgcgccgcgctatgttctatgcgattgcaaatgattctctcccctacgttccacttcgaatataacatattttctttgtttgttgtttttggggnngccggcggcngtgtgcgctagcacccggcaccgtttcttctataacgcgggcgcgcgatagtgacacaagacgatctcatcaccacggcgatggcggaattatagaaatagtaggcggcgtcgggagtagacggattatctgtcatctattagtcaggccgattatatatccgcggatgcgatgcggcgcactaacaaattacagataataagagccgtgtagtaataaactattgagtggcgcgaatatagtgtgttatgataagattggtgtggtgttcgataagactcnacactatgcttgtgtggtggctgccgcctcgtctacataaatatagtttaccattcatatattttgcgacgctacgtgagtagatgggcatattctacaatgtattataatgtacgggggtaacgtgtgatgcgaaacacaacagagcaacatcgcgcgcgcgcggcatctcggcgggcgacaatcgctaccggcacgatatatgtgcgtcccgtggtaggtggcaccaac

SEQ ID NO: 2675 - DNA, 435 bp, Glycine max
  misc_feature (235)..(235): n is a, c, g, or t
  Probeset Number=SeqID_12454
agttttaggagagcgccgaggacgcacccgcgtactgccaaaacaagccgcggtgcacccgtgccgccgttcgtccgctcccgtcgtccgcacacgcgcacgctcgggtcgataatcctcaccgggcgagcgcgcagctcacgatctatcatcccgatgtccgccggggagggataccggactccaacctattgcccggggggcccgaaaaacccccgggcccccgccgggggcncaaaaaggggttcccccccggaatggggagggggccccctggggccggctttcccccggggggtgaaaaacagggtgggttctaaaaggggggaaaaaaaaaaaatggggccccctttataaaaaaatttttttggaggggcccccccccccctcccccccccccgggggaaacttggggggggaatttttctccccgcc

SEQ ID NO: 2676 - DNA, 510 bp, Glycine max
  misc_feature (19)..(19): n is a, c, g, or t
  Peptide Sequence Number=SeqID_6311
  Probeset Number=SeqID_12455
atccgattggatcacaatnctgaaccgagggaccctgataagggttagctctcctcctctcctgaaatccctctcctctctccaatccttcctctctggttgttcccttttgtaatcagacttggatcctcagtgaatcaattgagaggccagcacttccttttttctgattgagaattggctaggtttgtaataattggtattcagagctttgatcctctcagcaattcgcttctggttgagtttccctgttcagtcgcttaatctgtaattcctgggtgacggatgtgagatccacttggtgatttcgcccaaagttcttcggaacaccctaactgggttggatcgtggctatgcagcctcgacgcacacttgctgtttgagaaaatggctcaaggggattccatgaaaacgatgatggacatgctcgcccaaatctaggcggatttggcggccaacacaaccaagcttaatcccattgagcaggaagtacgctcagtgcgccaggca

SEQ ID NO: 2677 - DNA, 1399 bp, Glycine max
  misc_feature (9)..(12): n is a, c, g, or t
  misc_feature (15)..(16): n is a, c, g, or t
  misc_feature (20)..(20): n is a, c, g, or t
  misc_feature (22)..(22): n is a, c, g, or t
  misc_feature (24)..(24): n is a, c, g, or t
  misc_feature (26)..(32): n is a, c, g, or t
  misc_feature (40)..(41): n is a, c, g, or t
  misc_feature (45)..(45): n is a, c, g, or t
  misc_feature (49)..(49): n is a, c, g, or t
  misc_feature (81)..(81): n is a, c, g, or t
  misc_feature (146)..(146): n is a, c, g, or t
  misc_feature (149)..(149): n is a, c, g, or t
  misc_feature (165)..(165): n is a, c, g, or t
  misc_feature (217)..(217): n is a, c, g, or t
  misc_feature (426)..(426): n is a, c, g, or t
  misc_feature (1171)..(1171): n is a, c, g, or t
  misc_feature (1175)..(1175): n is a, c, g, or t
  misc_feature (1337)..(1337): n is a, c, g, or t
  misc_feature (1358)..(1358): n is a, c, g, or t
  misc_feature (1362)..(1362): n is a, c, g, or t
  Peptide Sequence Number=SeqID_6312
  Probeset Number=SeqID_12456
tgttccccnnnnaanncctntncncnnnnnnnttttcatnnctanaccnttggttgacaatagtaatttagccccatcctnagtttcgacaagattataatagaactaactatctcattacttcttatattatttgtaattatatntanacttttgtagcacatncacttcatagcttctattagggatatgttctttccctgtcagtcaaaccacnacttttatcccccacctatctagttcctcgacacacaccatatgtacatattcatctcctaactacaccgcggcatgtgttaatattgtctataaagaaagagaacaagacagcagaatatagtgatgaataacaagatgagagaaagaagagtgagaaagaagaagaaaaaaagagagtagagactaaaacaatgttatataaaggantaagcaatagtgatacatacaactacgacatccataactatatgcatgagtaccactgtgtcgacccaacatttgtgaatgaataatatacattgatgagattacgtgttgttatctcatcttcctccattcttggccctctctctctctccaccttctcgcctaccgcctatgagttttcctgtctagcacatcgctgtctttaaatgcctctctctcgccacaaaatagagaggtgagagacatagcgaaataagaaatctggatgacgtcgagataaaagcaataaataacataataagaactaagattatataagagaagatgataaaagacacgactgcagacactaaataagagcgaacacgacacgctaccaatcgcgaccgaaacacatagctagacgtgatgtaccaactgtgagcatacacaaattcaacatccgcaatatgctcgtaatattacatatccagaatacataatcaatataacacatatctaaacataacgtcaaattgatacagtataagtgcataacaaaacacataatgtgtattctttatataaaataataactatatattagttataaccacacccacgactccgccgtgcctagaccacgctcgcgcgacgcccacccgtaacgcagcatgtagacgtacgctcccgggtgcatctgtattatagatcatagtgatcaatacgaaaagtgggtatcggaaataagacacaataacgaatnatancgaatacgcttgaacctctatctatacgatatctacatagaaaaatctcagtgatgagatggtggcctgtgtatgtttatcggctatatatgtatgtatagtcctgcgttttgtatatatagtatgttgtgatgtgtatgtattctaataccaccgatcctntatcactcctgccatacacgnaaanactactcccagcgcgtatacataaacattatactacg

SEQ ID NO: 2678 - DNA, 1772 bp, Glycine max
  misc_feature (1)..(10): n is a, c, g, or t
  misc_feature (15)..(37): n is a, c, g, or t
  misc_feature (42)..(42): n is a, c, g, or t
  misc_feature (57)..(57): n is a, c, g, or t
  misc_feature (59)..(59): n is a, c, g, or t
  misc_feature (65)..(66): n is a, c, g, or t
  misc_feature (70)..(71): n is a, c, g, or t
  misc_feature (74)..(74): n is a, c, g, or t
  misc_feature (76)..(76): n is a, c, g, or t
  misc_feature (79)..(81): n is a, c, g, or t
  misc_feature (83)..(83): n is a, c, g, or t
  misc_feature (85)..(85): n is a, c, g, or t
  misc_feature (87)..(88): n is a, c, g, or t
  misc_feature (113)..(116): n is a, c, g, or t
  misc_feature (129)..(129): n is a, c, g, or t
  misc_feature (150)..(150): n is a, c, g, or t
  misc_feature (174)..(174): n is a, c, g, or t
  misc_feature (191)..(191): n is a, c, g, or t
  misc_feature (226)..(227): n is a, c, g, or t
  misc_feature (242)..(242): n is a, c, g, or t
  misc_feature (260)..(260): n is a, c, g, or t
  misc_feature (266)..(266): n is a, c, g, or t
  misc_feature (275)..(275): n is a, c, g, or t
  misc_feature (278)..(278): n is a, c, g, or t
  misc_feature (320)..(320): n is a, c, g, or t
  misc_feature (328)..(328): n is a, c, g, or t
  misc_feature (339)..(339): n is a, c, g, or t
  misc_feature (476)..(476): n is a, c, g, or t
  misc_feature (499)..(499): n is a, c, g, or t
  misc_feature (541)..(541): n is a, c, g, or t
  misc_feature (668)..(668): n is a, c, g, or t
  misc_feature (682)..(682): n is a, c, g, or t
  misc_feature (692)..(692): n is a, c, g, or t
  misc_feature (702)..(702): n is a, c, g, or t
  misc_feature (758)..(758): n is a, c, g, or t
  misc_feature (780)..(780): n is a, c, g, or t
  misc_feature (793)..(793): n is a, c, g, or t
  misc_feature (825)..(825): n is a, c, g, or t
  misc_feature (868)..(868): n is a, c, g, or t
  misc_feature (919)..(919): n is a, c, g, or t
  misc_feature (949)..(949): n is a, c, g, or t
  misc_feature (955)..(955): n is a, c, g, or t
  misc_feature (962)..(962): n is a, c, g, or t
  misc_feature (996)..(996): n is a, c, g, or t
  misc_feature (1121)..(1121): n is a, c, g, or t
  misc_feature (1147)..(1147): n is a, c, g, or t
  misc_feature (1160)..(1160): n is a, c, g, or t
  misc_feature (1195)..(1195): n is a, c, g, or t
  misc_feature (1430)..(1430): n is a, c, g, or t
  misc_feature (1445)..(1445): n is a, c, g, or t
  misc_feature (1479)..(1479): n is a, c, g, or t
  misc_feature (1524)..(1524): n is a, c, g, or t
  misc_feature (1578)..(1578): n is a, c, g, or t
  misc_feature (1594)..(1594): n is a, c, g, or t
  misc_feature (1597)..(1598): n is a, c, g, or t
  misc_feature (1618)..(1618): n is a, c, g, or t
  misc_feature (1664)..(1664): n is a, c, g, or t
  misc_feature (1678)..(1678): n is a, c, g, or t
  misc_feature (1683)..(1683): n is a, c, g, or t
  misc_feature (1686)..(1686): n is a, c, g, or t
  misc_feature (1688)..(1689): n is a, c, g, or t
  misc_feature (1692)..(1692): n is a, c, g, or t
  misc_feature (1707)..(1707): n is a, c, g, or t
  misc_feature (1709)..(1709): n is a, c, g, or t
  misc_feature (1734)..(1734): n is a, c, g, or t
  misc_feature (1747)..(1747): n is a, c, g, or t
  misc_feature (1757)..(1757): n is a, c, g, or t
  misc_feature (1772)..(1772): n is a, c, g, or t
  Probeset Number=SeqID_12457
nnnnnnnnnnccccnnnnnnnnnnnnnnnnnnnnnnnccccnccccccccccccccncnccgaanngcgnngcncnacnnncncncnnccccgactcaaccggcgccagcgannnngagagacagtctncatatatcggtgcaataaggncgctctacgggatccgctactgtntggtgcgctcacaggcncatgtacgagcacgctctctacatatcgcagcggnntgtcagacagcgcgnaggcagcacgagccccgncgcganacagacganacnaaccgctttaggcagtagacgtcgagtgaaaccgatccgtgntatagatngaagtaatcgnctacacatatcgtacgagcgagctcggaatatcgggtagcacgtatgatgtatcaagtatgagcgtgcagcctgaactgcacctgatgagacacacatcaggagagatgagatcacaacaactgtcctctgtatacncatatcatgacatgtacacatantaatactcacatacattacacgaaatgcatcacacgatatgngaccgggaggatgtgcaacagtagtgacaagatgagagtagctacgtcgagcgcactgctgataccattgaacaagacgcgacagagacgaagacgagaaagctgatgcagacacctcgggaccganagggtgagacacangcggcgaggnactgcgcgcntagcggcgcgggcgaatgaaaggcgcgaagagcgcgcacctgagcgcgagtagcgnagtaccaactcgactaccggancactcattagagncgccacctcactcgaactcaactcagcacaanatacatctacgacacagagagagcggctacgagagcagtcagncagcacaggcggaacaagacggcgaagtgacgacgacgacggatcaaaacnatacaaatatgcgacgacgagctcgacccncacgcnacgccgncgcaccgacgcgtctcgcctgacgcgtgtgacgnctcacggcgcagagagcaccccgcgaacgctgacactggatgcaactcaacgcgtgcgtgtatcacgccacaaccacagcaccgggcagcacgcaagatcggcaacctccgcgcctgccctcaancagaagagatatagcaaccgtcatcnctacctggcccgncacgtccgcacgcagcgcgtcgctgcggcaggccnccaaaccccggatgcgcacgtctcacacaccatgtcactgacttcttgtacatacctgactcactacaacacaccccgcaccgcagtcacctaccgactccgccggccgactcgtgcgcgtgacaccctctcgcgtaccgtcacacctccatacgtgcattccgtcactctaccgtcgatctacgccgtgcatacgacacacctgctctctcagcccatccgatactacaacgcncctcacacgcgctancgcccactatgcatagtacggagctgcgctgcgncacagataccggcgcacgagcgagacgtcgcgcgtcagagcatanataatgacatcgctcaatcctctcctactcatccgcttacgacagtcggctatntctctacataccaaanacnnagatcacacacacacacacnacaacgacgaccaccatacacacaccgcgcctatatcgcctcgccngcatctcaatcccngacancanannctncgtatcactatactncntgacgctctactatctctacgctcntctaagactctcnactctactcntaacacccacaaccn

SEQ ID NO: 2679 - DNA, 1553 bp, Glycine max
  misc_feature (12)..(12): n is a, c, g, or t
  misc_feature (25)..(25): n is a, c, g, or t
  misc_feature (141)..(141): n is a, c, g, or t
  misc_feature (152)..(152): n is a, c, g, or t
  misc_feature (186)..(186): n is a, c, g, or t
  misc_feature (190)..(190): n is a, c, g, or t
  misc_feature (211)..(211): n is a, c, g, or t
  misc_feature (221)..(221): n is a, c, g, or t
  misc_feature (480)..(480): n is a, c, g, or t
  misc_feature (496)..(496): n is a, c, g, or t
  misc_feature (530)..(530): n is a, c, g, or t
  misc_feature (562)..(562): n is a, c, g, or t
  misc_feature (980)..(980): n is a, c, g, or t
  misc_feature (1068)..(1068): n is a, c, g, or t
  misc_feature (1228)..(1228): n is a, c, g, or t
  misc_feature (1429)..(1429): n is a, c, g, or t
  misc_feature (1525)..(1525): n is a, c, g, or t
  misc_feature (1533)..(1534): n is a, c, g, or t
  misc_feature (1538)..(1538): n is a, c, g, or t
  misc_feature (1540)..(1540): n is a, c, g, or t
  misc_feature (1546)..(1546): n is a, c, g, or t
  Peptide Sequence Number=SeqID_6313
  Probeset Number=SeqID_12458
gtgccgatgacngagtaccagacanataacttgtctagatgcgtgatagcatacttctaatcctgttctctctcagacatgctagtctagtgtcgtcacgtatcataatggtctgatgtattcatatatacatatacagtngatctatatgnacgtgcatctgtcgcatctgtgtcgtgatcgttntacntccatcgtcggcttacactantcgtattgancgcagactcgagtagtacgcgcgtgatatgtgatgtgtgtcaccatactgtctagtacatatctattagtgagtatctatttgcgcgcgttcgtcgtacgcttttcactacgatattcaacctagttgtgcgtatctgtcgaggttagtagtgctgacagctcgtgtatgtttggacatttcacattgctatcgtctcactcatgtatatctgtactctgagatattcgatagactcgagagtaaccgaatacacgtgngcgtgcggtaatgatnaagctagaccgtatctgatagagagcgagcgagntgtgtcatacgtgcgttgtgtgtcttatggtnacacattcattgtacgccagcacctttttgtgccagtgcgatcatctacgattctgatgtactctcggtccgctgtagttacgtcgcagtgttttacattatacttcaatctgagaggatcgagcgcgagagatctagttgtcgtgcgtacgctgtcccgctactgtgtgtgcgcatcgtcatgctggatcatatagcacagcacgatgtatcgcctagcatacactcgcagcgtgcgcgtgtctatcatttgtaatgattcgtcgcgcgcatatttcgtctaatatgatgatatacgtattgttagtggtagattttcatatttatattttgtcttctctagccatatctctgacacttcttatatatttcatgtctctctacgcttgatattatctgttattgtatacgctcgtantgatatagtgtattctgactagctgcctacacttgtctcttccgatccatacttacatcctgttcggcgttctccactctcgcggcgntcccttgtgtgttgctcgccgcccgccgcgccgcggtgcggcgctcgcggcgcggcagctctcttcactctattcaatacaactattgagtgacggagaaatatatataataatggataatacaattgatcaaattacacactcgataccgctatattantatctatcttatagtgaattatgggtgtttgagagcgagtggtgtgtagataaaataccgcggacctcgtctgtcgactagccgccaagtggctacgcgcatagcagagagcgcaaataatgaggacatatccctctctacgtcccagcaacacagcatcacatcctatactacatttagatcgtcgtgcctccgcgctcnctcgcatgcgcacaacagaagaagtattatattttcagattatgttagtggtagtattgatagtgatcggattagttagaatattactctgataanatagtggnnaaangntgatangtgagat

SEQ ID NO: 2680 - DNA, 1715 bp, Glycine max
  misc_feature (1)..(1): n is a, c, g, or t
  misc_feature (11)..(11): n is a, c, g, or t
  misc_feature (22)..(22): n is a, c, g, or t
  misc_feature (28)..(29): n is a, c, g, or t
  misc_feature (35)..(38): n is a, c, g, or t
  misc_feature (40)..(40): n is a, c, g, or t
  misc_feature (42)..(45): n is a, c, g, or t
  misc_feature (47)..(47): n is a, c, g, or t
  misc_feature (69)..(70): n is a, c, g, or t
  misc_feature (80)..(80): n is a, c, g, or t
  misc_feature (87)..(87): n is a, c, g, or t
  misc_feature (116)..(116): n is a, c, g, or t
  misc_feature (139)..(139): n is a, c, g, or t
  misc_feature (146)..(146): n is a, c, g, or t
  misc_feature (159)..(160): n is a, c, g, or t
  misc_feature (167)..(171): n is a, c, g, or t
  misc_feature (203)..(203): n is a, c, g, or t
  misc_feature (207)..(207): n is a, c, g, or t
  misc_feature (215)..(216): n is a, c, g, or t
  misc_feature (218)..(219): n is a, c, g, or t
  misc_feature (222)..(223): n is a, c, g, or t
  misc_feature (247)..(247): n is a, c, g, or t
  misc_feature (253)..(254): n is a, c, g, or t
  misc_feature (256)..(256): n is a, c, g, or t
  misc_feature (260)..(261): n is a, c, g, or t
  misc_feature (269)..(269): n is a, c, g, or t
  misc_feature (297)..(297): n is a, c, g, or t
  misc_feature (374)..(374): n is a, c, g, or t
  misc_feature (392)..(392): n is a, c, g, or t
  misc_feature (514)..(514): n is a, c, g, or t
  misc_feature (683)..(683): n is a, c, g, or t
  misc_feature (685)..(685): n is a, c, g, or t
  misc_feature (788)..(788): n is a, c, g, or t
  misc_feature (941)..(941): n is a, c, g, or t
  misc_feature (1263)..(1263): n is a, c, g, or t
  misc_feature (1271)..(1271): n is a, c, g, or t
  misc_feature (1322)..(1322): n is a, c, g, or t
  misc_feature (1335)..(1335): n is a, c, g, or t
  misc_feature (1448)..(1448): n is a, c, g, or t
  misc_feature (1508)..(1508): n is a, c, g, or t
  misc_feature (1511)..(1511): n is a, c, g, or t
  misc_feature (1525)..(1525): n is a, c, g, or t
  misc_feature (1662)..(1662): n is a, c, g, or t
  misc_feature (1665)..(1665): n is a, c, g, or t
  misc_feature (1688)..(1688): n is a, c, g, or t
  misc_feature (1691)..(1691): n is a, c, g, or t
  Probeset Number=SeqID_12459
ngggttggggnttttggtgttntttttnntttttnnnntntnnnntnctgtgtctgtggtgttagtgtnngttttgttcnggtgtgngtgttttgtgtttggtgtttgcccccgangcgggagggacggggagcgaganaagagangcagcaggagacnncggcaannnnnttgttgctggttgttttggattcttgtgtaantatntataattnntnnttnntatgtgttttggtgggatatatgnatttanntnattnntttttacngtacgtgatagtcttctagtgtatgtanaaagacgtttgcctacgaatatgctgtggaggtatggagtcttgtgatttctgtgcgtgattgcgatatctcatatntgatctgacgtggtatgnatcgcggtgtatagtctatatatctcgtagccgacgtagtacattgatacagtgaggctgttgaacacgggaagtataataccacgcatggtatactacccactctctgcgcgctctctacngtcctctgcacgcccctcaacgtgtccctggccgccacgtaccgatggacaccgacgctacgctagcatcggcgcgctgtgcggtatatcgttgtgtcagttgtctgcgtgtactgtaaacgcaacgaatagtacgcatctgaacactcgacgtcccgacaacaccaananaaacgcatagcaggcggcgcacgaggtaggcgatagtaactgatatcgtattcaaaatagctagataaaggctgagtaaacgatgtcgtgtatatgatagttntatagtcttatattatgtacctccagtgatggccacgccgtcgcgtgcgaatctacacagcgtctcatgtttcttctcctcccttcgctccctcatcatactcgactacggtcttctcgttcatcatctcttatctcgtacagttgtgtcgtntgtgcccctgcagcaatagttattgggtagtagtatgggagttggattgatgatgatatctacatatctagaccgaatacgacgacagagttgacaacgttctgaggggacgtacatacgcgaggtcagctacgatctatctcacaactctctgcgtgtactgcacttcctgacgtcgtgcaccgctcgtctcgtatttatcgagaccgtgtctgcgcttccctctcactgtctgcacactgtcggcgcctgctccacgcgtcatgatgatgagtctgattatatgtcatctattacgaagatgccacaaggctgtatattngtcgttgntagtgagcgtagcagcgagattcgcgagtcgctgtagcgctcccggtctantgatgtcgcgtgnacaactcgtgtcggcgatagtaagatgatgtctgtgctcgctcgcgctcgagacgcaccgctctcgctgcgccgaccctgatgcgcgcttcgcggccacacgtcgcatgtcgnccgcgatcatctaagagccgcgcctctctgtcgaccgtgcgcgcgcgcgcatgtcgcagnacngaagcgatctcctncgcatcgtcctcttcgtattctctcatactcatggtactctacgcgacgcaattgcgcgatatatgtagtacggcaatttatatcgatactatactatactctcgctcgactctcggctccgctgagcagcatcgcngcngtcagtgtatcctagatggttcngangacactctgactccgctggccatg

SEQ ID NO: 2681 - DNA, 1394 bp, Glycine max
  misc_feature (1)..(1): n is a, c, g, or t
  misc_feature (894)..(894): n is a, c, g, or t
  Peptide Sequence Number=SeqID_6314
  Probeset Number=SeqID_12460
ngcgtacgtggcgcaattgtgggtttatttgtgcgcgagcaaagacaagtgaaataaatcgtgtgcggcgcgggccggcggcactaatcagcaatttttcgtcgccgcgcgcgtagcaattgtcgggtgataatatacggccgccgtatcggcgcgggcgttcatatagttgtcgttttcactttcgccgccgccatccgcgccgcgttatagtatcgcggaatggagaactagccgccttaatagttctatacacgaccttcttgtatgtatatcatattggcggcgggcggcgagtagcgacgctgtatgtagttgtatgtgttatgacgagtgacgcggaccttttgttatgcgcgcgccggatattatttttcagatgtaatcgcgcgccacaccctaagctcgccgcgtttagttatgtggggtaaggagaacttaaaacgatagtggcgctaatgaaatatagaggaggatataagaacacagccactatgtgttcaattatcgagtagtagcacgagcgtggggagcctgacaatcaccttgcggtgctgtaaaacaaagtcggtctgataaacccacgacccggccggttgtgtggtatatacatagattgtgggaggattacacaacaagtacgttctgggatagggtatcttctgttacactcccaactcgttgggtgttatatggggacaacatctgttatcacttacaacatatggtggtgggacattaaacgacgcttatttctcttttgtgtaccaccactaaatttttacaagcggggggtgaggtgtttatacatgtggacgggccaataattataggcgcgtggaataaataagattagcatggatttgcggttacatggtattcatttccaaattnctaataatttaatgtggagcggcgccggattggtgggggtgaatgtatacaaccgggaagtcgtattacatttattttttttttttgttttcgcgggtcccgccaacgccgcgcgattctatagcgggggagaagaaaaacgagatgcgtgagcggtgcggaaataaagaaaagggggcgggaaggggatatagttaaaaagtgggggatattaaagcgatagcgcgtgtctacacataaaaatataaagggcaagtatagtaggtggcgggaggagtcggtgtgtataatgggtggggagaaaaatgtcggtggcgttgaggcgcggcgacctaccgagtaactccacataaacatgctgcgcgcgccatgaaacacgaaaaactagcgctaacggaacggcgaaagtgtgatggaaaaaaaagggaaatacggggggggggatatcggcggggaggttagcggtgcaggatatgttgtggaggtggtggggggcactt

SEQ ID NO: 2682 - DNA, 1384 bp, Glycine max
  misc_feature (745)..(745): n is a, c, g, or t
  misc_feature (1230)..(1230): n is a, c, g, or t
  misc_feature (1297)..(1297): n is a, c, g, or t
  Probeset Number=SeqID_12461
cgggtccgtcatgtactcctcaccctgattaaatatcttacccaaaatcatcctcctgcgcaaaggatcgtgcgcgcaatacttgacgtcagttagttacacatatattccatcataataactctagaagcacagtcgctatgttctttctcatagcgagaccacaacacgactccatatatactcaagtgcagcactgacaaacagacattaagtagtcatcctataacccagtggagaaggtgttgtactatattttcacgcaggcaaaagcatcggtaacaagaatagaaagctcgcccgtgaaataaagaacagagaaaatatgcacccccgccagcaactaataatggatggttctgctgaccacactataaatctaattgtctaggacacgcctatacagtcatgcaactagggcgtaacacgatgagttagactattatcgattaataaaataattagtagaatcacagctccattttaagagggagctataatatgcagcagtgctcctatgaaaaaattaaggataagggatagacaataatatttagaactgcataacactgcggataatcaactagcctccccacatcgcctttaatagattgaagcatgagagctaaaaagatcacgacatatggatacactatgcgcacacatctgacctggattagttttcatgaatgagtgctaaattgtatccacatttcacatttatagggaggctcaatatatatcnttccctcggccccatatgtgaagacgactactcaaattataagttaaatatcagtacacgccgatgcctgttatctttgatttgtctagatggtgccagaagagaagaacagagtagatacattcataatactgtttcacaaggcttagtggctgctaatgccgattctagtatatacctataattgaatatttctgcgcgttatgtactagctgcgcgcatttccctatatttgtaccccggctctactatactagaataagctctaaactcatattacgtaagaatagaaatagatatcgacttctcactcgtcgagcgcggtgcaagaggagtagctaggtgtataattagtcacgtgaacagagagtatgctaatcgcgcagttggatacagacatacacagttagatatggctattgcgtctgtcatgtgactgcatacataaccggggcttacatattgctcgatcgtggtctgcaacntaatctggacgtctcacactaatcaactagatattgtgagtataatatggacgttaatatgtcaatngctatcaatgcatgcgagtgtagtacggtatatgcgccgacatctacataataagcaatagctcacatatgagtaactctagatgag

SEQ ID NO: 2683 - DNA, 1526 bp, Glycine max
  misc_feature (21)..(21): n is a, c, g, or t
  misc_feature (36)..(36): n is a, c, g, or t
  misc_feature (48)..(48): n is a, c, g, or t
  misc_feature (50)..(50): n is a, c, g, or t
  misc_feature (52)..(52): n is a, c, g, or t
  misc_feature (61)..(61): n is a, c, g, or t
  misc_feature (73)..(73): n is a, c, g, or t
  misc_feature (95)..(95): n is a, c, g, or t
  misc_feature (105)..(106): n is a, c, g, or t
  misc_feature (110)..(110): n is a, c, g, or t
  misc_feature (120)..(120): n is a, c, g, or t
  misc_feature (143)..(145): n is a, c, g, or t
  misc_feature (154)..(155): n is a, c, g, or t
  misc_feature (158)..(158): n is a, c, g, or t
  misc_feature (175)..(175): n is a, c, g, or t
  misc_feature (178)..(178): n is a, c, g, or t
  misc_feature (226)..(226): n is a, c, g, or t
  misc_feature (255)..(255): n is a, c, g, or t
  misc_feature (301)..(301): n is a, c, g, or t
  misc_feature (348)..(348): n is a, c, g, or t
  misc_feature (355)..(355): n is a, c, g, or t
  misc_feature (373)..(373): n is a, c, g, or t
  misc_feature (391)..(391): n is a, c, g, or t
  misc_feature (393)..(393): n is a, c, g, or t
  misc_feature (655)..(655): n is a, c, g, or t
  misc_feature (760)..(760): n is a, c, g, or t
  misc_feature (949)..(949): n is a, c, g, or t
  misc_feature (1107)..(1107): n is a, c, g, or t
  misc_feature (1140)..(1140): n is a, c, g, or t
  misc_feature (1179)..(1179): n is a, c, g, or t
  misc_feature (1196)..(1196): n is a, c, g, or t
  misc_feature (1213)..(1213): n is a, c, g, or t
  misc_feature (1218)..(1218): n is a, c, g, or t
  misc_feature (1258)..(1258): n is a, c, g, or t
  misc_feature (1263)..(1263): n is a, c, g, or t
  misc_feature (1265)..(1265): n is a, c, g, or t
  misc_feature (1273)..(1273): n is a, c, g, or t
  misc_feature (1275)..(1275): n is a, c, g, or t
  misc_feature (1302)..(1302): n is a, c, g, or t
  misc_feature (1306)..(1306): n is a, c, g, or t
  misc_feature (1350)..(1350): n is a, c, g, or t
  misc_feature (1393)..(1393): n is a, c, g, or t
  misc_feature (1396)..(1396): n is a, c, g, or t
  misc_feature (1405)..(1405): n is a, c, g, or t
  misc_feature (1431)..(1431): n is a, c, g, or t
  misc_feature (1469)..(1469): n is a, c, g, or t
  misc_feature (1515)..(1515): n is a, c, g, or t
  misc_feature (1522)..(1522): n is a, c, g, or t
  Peptide Sequence Number=SeqID_6315
  Probeset Number=SeqID_12462
ggggggggtgtgggcgcgggncggcgggcggccccnctccctctctcncncntcccttttntcgcacgcgctntgtgttgtttacacacaccaanacccctcgcnncccngcgcccgtgntggcgtgcctctctctcgtggtnnngtgctgttnntanatttttagatggtgaanacnactatacgctctgtctctactcatcactctcagaggtcgggtgtgggngcttgaggctctgtcagtcgggacagccngcgcgcgtgcggcggggttgggaggatgtgctctttctcgggtcgncatctctgaggcggcggccgtcctcttggctggcgtctctgctggcngctgggngctcctgcggacgaggcngggagcggggctgctcgncnacgctatggagcatagctgaagcgaaggtttgtctacaccgccacacaacacaaacaacacaactacaagctcgtttgtatgtgttgtgatgaaactactctaaaactaatattaaacacaccctctcttcacagtgtactatatagagatgtaatataatatctacagtgtgaccatggtacttagtaacgagatgagtgagaaaggaagcgagagaaaaggagacaaacgaactagataaaacactactcgacaaaccancacatacctaacctctctcctctactcatgcttctaactgatcccccgccacccgttgaatacggatcgagccgatcgcgtgagggagagagaagacgatcacanctatactgtcgcgccccgtacatacaatcaggaacagaagagaatctggtatgtgatgctacaccacatccgcccagcacgcagcggatagcaatgcagacactcacacggcatgtcgcgatccgtaccgagcggtcgagtcacaacgtcgacgcgtagatcaacaatacacaatcatcacatcctgtncatgctcccgcgagactcctccattacatatgccgcactatatcagtcacatgatagtatatgagagtagtatatagtacgctactatacaccactcgtctacccaccgcctgaccccgccacacgtgtccgacgccactcaatgcagactccaacgngctctatcacagatatgaaacatcggagatatncatagctctaccatctagcatcgtcatctgcgacatatntgtctgtactcatcccntgcaccgcactgcattnatcantggttccagctaacccctgacccgtcctgttctgcgactngtgtncnactctcancngtactcgtgcacatctcagtgctgtgngtgnatggtagtacagcgcgtcacgagagcacagagcgtgagtcgcgncgtgacagcgcacttccgatcgtgcatcgacacgactgcagtngcntcgctgacnagctatcgtatatactatgactgctngatcactgtatcaccagcactccgtgcgatacacggangtacaccgtcacactcagctcaaatcaacacaccgcgtacatcatnagctcgncaag

SEQ ID NO: 2684 - DNA, 2022 bp, Glycine max
  misc_feature (5)..(5): n is a, c, g, or t
  misc_feature (85)..(85): n is a, c, g, or t
  misc_feature (99)..(99): n is a, c, g, or t
  misc_feature (119)..(119): n is a, c, g, or t
  misc_feature (127)..(127): n is a, c, g, or t
  misc_feature (144)..(144): n is a, c, g, or t
  misc_feature (188)..(188): n is a, c, g, or t
  misc_feature (200)..(200): n is a, c, g, or t
  misc_feature (228)..(228): n is a, c, g, or t
  misc_feature (272)..(272): n is a, c, g, or t
  misc_feature (281)..(281): n is a, c, g, or t
  misc_feature (341)..(342): n is a, c, g, or t
  misc_feature (455)..(455): n is a, c, g, or t
  misc_feature (518)..(518): n is a, c, g, or t
  misc_feature (593)..(593): n is a, c, g, or t
  misc_feature (718)..(718): n is a, c, g, or t
  misc_feature (746)..(746): n is a, c, g, or t
  misc_feature (753)..(753): n is a, c, g, or t
  misc_feature (1164)..(1164): n is a, c, g, or t
  misc_feature (1262)..(1262): n is a, c, g, or t
  misc_feature (1265)..(1265): n is a, c, g, or t
  misc_feature (1311)..(1313): n is a, c, g, or t
  misc_feature (1338)..(1338): n is a, c, g, or t
  misc_feature (1427)..(1427): n is a, c, g, or t
  misc_feature (1574)..(1574): n is a, c, g, or t
  misc_feature (1585)..(1585): n is a, c, g, or t
  misc_feature (1636)..(1636): n is a, c, g, or t
  misc_feature (1775)..(1775): n is a, c, g, or t
  misc_feature (1816)..(1816): n is a, c, g, or t
  misc_feature (1865)..(1865): n is a, c, g, or t
  misc_feature (1867)..(1867): n is a, c, g, or t
  misc_feature (1918)..(1918): n is a, c, g, or t
  misc_feature (1923)..(1923): n is a, c, g, or t
  Probeset Number=SeqID_12463
cgtgngttacatatactacatcagagaatgcgtcgtgtgattttgatgcggtcgtcggatcaagttagtcggtcaatgatacgantcataaaattcggntgtctccatgacggcgtcantcgtccgnccagccgtatatcgacnatacatatctctcgcgcacgtccgcgtcccgtggatgcataatntctcaaccgacntaacgaattatcagtcgcgcgcgcgcangtatccacacccgtcgtttatcacgtacatgctagtctcgatgnttcacaatnattcacacgcgcgctcaaccgacgacccgcgatatatatatatgtgacaagcactaggannatcgcgcgcgcgtagactcgatgtatttttcgtgcacaccattctatgtatgttctattatattatcccgcgcggcgcgcggcacatgcagcagcattattagtctattcacnttatgttctcagcacccatcgcggtgctgtatatatatatatcgtctcgcgcgatatatatantttattcacacaaatgttagagagagagtacagttcgtgttacgcggcgtatttagaatagtgggtcgagatagntgcagccaccacacatgacgcacatacacattcattatattggtcatatatatacacacaaataccaccagtcttgtgtcgcagtctgagcagcagttgtacacaagctgactatccatatctanaatacactcgcgctctgtgtctaacacnaacaaangcgcgatgtgtcaaacaactgcaccacacgcccctttatagtggctgaaacatataccgcgacgcagcggactaacaacacaacattcatttatgtacgcggaagaggaataattatagctcacgacaccaccacgttttcgcgtcgatatttctcgcgccacacaccacatgttttctatatctgtgcacacgcttgggtgcgagcgttaattattaacagctcccgcgtatctttactgtcgttcaccgcaccaccaacatctatattatatattattcgcgcgtgcgcgcgccacacatttatttatactatatacatcccgcccacaacataatatcaactcgagctgggggagagagagacataacaatattgttatcacgtatctcgcgcgcgatgacacagcgnatattctatttcgcgagtgtacaattatttcaatattattctctacaccgcgccgccggctctcctcttatttcgcgcatagtggagaatatacatantancatcgacgagaacgtggtatatataaacactctgctcttgctgttnnntctgtcggagaggacgggggggggnggcagcgcgcacaaccactcacgccctatatataatattaaccctcgcgcccagtatactcgcagacatcaccatacacctaattccgncgacgctcacgcgatattatataatgataataagcacgcgcgcgctggtcgatgccgagatatcttgtatatatattcaccagagcggcgtagtcgtatgatatgacggatatacgtagacggtgtgactatatatatgtcaggatnttattcagcgngtagcgctagtcactacatcttcgtgagcacgcgcgagaagactatatcgnttgtataatcaaccaccgattggtagtggtgttgtcacaaatcagtgttaacatcatctgtctctgtttatggaagcgcagccgcacatcaccctcacacagcacacttctgctctctacacactacactcactttctntagctcgccgcaacgccgacgcataatgtggtgttaagcanatacactcatggagctacaagacagactccgcgacggagtaacactgtntnaatgcgatatacaaacgatacgacgcacaatataacacgcacagaacgctncggtnttgtagtcggtccgctcgtacacatattcgcgtcgcgcgcgacacggataatatatcgtaggcgtgagcgcgcccgtataatgatgtcgctcatctcca

SEQ ID NO: 2685 - DNA, 1729 bp, Glycine max
  misc_feature (38)..(38): n is a, c, g, or t
  misc_feature (43)..(43): n is a, c, g, or t
  misc_feature (165)..(165): n is a, c, g, or t
  misc_feature (202)..(202): n is a, c, g, or t
  misc_feature (531)..(531): n is a, c, g, or t
  Peptide Sequence Number=SeqID_6316
  Probeset Number=SeqID_12464
gccgtttagcagtggtaacaggtgtcgtgattctagantatgnctgatgtcatcatataaacatccacgctctcgactgcctcaatcatacacttccgtgcacatccgacacatcgactgtagtgcagactacaagcatatatctgatacactgagacatactcnagcagctgaatcccgcgcgccgtcgtctctcatactncgctgctgacacgtgatcagtctcatagataactacatcagcactagcgattgcgtctcttactatcttatctcactgctttctcatactcgcgcgcctaccgcgtatctatatcactcgcactgtctactgtcgcgggtctagtcggtgaagcgacatcttcactacctactttgtgatgatcactaatatgtcacggaggtacagcgcttacaaataagagacacagacagttcgtcgctcggtcgtagcggtcaactcgttaatacatgaacaaaagagcgtgctgtggtgtatacacagatatactggctacgtaccatcacgcnacctgtgtgttatatatgtgatgatatgcggcgacgtcacaccgtcggctagcaccatatgcaataagatattgcgttgtcggcataccgcttgacagagcgatgagacatacggtatctggacgtttcgatgtatccgagagtgtgatgtctacgatatgctaacactataatacataatctcgttctcagttattatcaccagagtggttcgttagcatggtgatgcggatgtcgctacccgatcatgtccagttcgtctagaacgtactgcgtatgcggtcgtgacatcctggtttgatgtagcgtactgttcagtccatagcgaattttcatgaggctcgcctcattccggctataccgatggtcaacgtaccattatggattactgttctcccgctgtacgacaaacctatatagtgtacctcttctctcctgtcagtcgcattctaacaagttctctcttggtagctcaatagtacagcgtgacgtatagcatccgactcgggcgctcacattcacacctcgactccacgactaacggtagaaataataactgacgagatgtagtgacataacacacccgcgcatcaacatgcttgcgattacaaggcggtggagtaatgtaacttcgtcgctgctccttatctacaatcattcacccgagaggactggggcaaggtggtgtgtgtaggattgagatagttaaagagatgcgataactacattgtaattcagataaataaatgtcagttgtcttattacgtgcactcgattggacactcgtgttacaactctctgactcaactcactttctccttgccccatgtattgcactctcgccttgctatcccatcatatttataaactaagtgtgtagtttgctatggcgtgaagatatatgaagaaactagtccggggcgtgggacacgagtagttacttaccaaatcgcggatgatgaggtctttacccgcaaggagggcgcactaatcacaaacatacaagagcgagcgcgccgagggcggctgtggcgggcgctatattatatccggtacatagtcaagccggatatgtctttcttctgtctcgttgggtgaggcggtgtgtaatctattatagcgaggtgacactactcacaccgcgttgcgcgacgtaatgccatatagaacacaggagagcaagacaataaaaaactaa

SEQ ID NO: 2686 - DNA, 482 bp, Glycine max
  misc_feature (12)..(13): n is a, c, g, or t
  misc_feature (22)..(23): n is a, c, g, or t
  misc_feature (100)..(105): n is a, c, g, or t
  misc_feature (210)..(211): n is a, c, g, or t
  misc_feature (279)..(280): n is a, c, g, or t
  misc_feature (285)..(288): n is a, c, g, or t
  Probeset Number=SeqID_12465
tgtaattccacnnggtgccccnntgggtgggctagtcatagaataatagagattaagttagtagtagctataggttatttgctataatgccccgtgatannnnnnacctcaaaaggcaactttctccgtgcagtttcacccgtcacaactcaatcgagctttttgctgtaaaaggccggtgctggaattgtgttcccttctctgttcctnnttaatagcgtttgtctatataggaagaatccaatataagtgaaaaaaaggttgagaaagtagaggtcnnaatannnncatgtgatctgtgagatagtgtgagagaaaaaggatggtgcatcagaataagcacatgttcctttcaaccaaagtacaggaagatgaggaacattataggtctgccatctcaatttaattttggtcatagatgttgttggggtaaatgttatcttcaataagagttcgactacaatgtaccctgcatcttttgt

SEQ ID NO: 2687 - DNA, 1724 bp, Glycine max
  misc_feature (1)..(3): n is a, c, g, or t
  misc_feature (1724)..(1724): n is a, c, g, or t
  Peptide Sequence Number=SeqID_6317
  Probeset Number=SeqID_12466
nnntgatctccattgtcgcgtgccagttcgactccgcggccacgaacaacacaggcaccacctgcgtaatcgaaggcgtcgcgtacaacgacggacacgtgaaccccaagaacgcctgtcaggcctgtatcctcgcgacgtcgtccgtagcgtggacccccaccgacgagggcaaggtctgcggcagcccaggtatctgccacgctggtgcttgctcgaacggctgcctcatcgccaacgtctattacgatcagtcgacacccaacccgaacgacgcgtgctcgatctgcgacattgcgaaatcggcgaccgcgtggagcacgaactccgacggcaccgcgtgcggcgccgggaagatctgccgtacggggagctgccaagccggctgtgagatcggcgggacgttctacgctccaagcgcgctattgccgaatggatgtcagacctgccagcccgacaaaagcacgacgaacgccacgcccgtcgcggacgacacggcctgcggtcaatcggggaagtgtttcaccggcaggtgcatcgagccgatcgtgaccatcccggctcctcaagcgctagccgtcgacgcaacgtccatctatttcaccgaaaacagcaactccgtcgggaaggccccgattggcggcggcaagcccgtgcagctcgcaacggtcgcgaacacgttccccactgggatcgccgtcgatgcgtcgttcgtctattggaccgtcaatgccaacgtatacaaagtccccttggctggcggcagtgcctccccgctcgcgtccgcgacgaatgctcagggcatcacggtcgacggaactagtgtgtactggaccaacggcgggacgcagttcgtcgccaatgggtcgattatgagcgtcccactcgcgggcgggaatccaacgaccctcgcgtcggggctcaagttcccgcgacaaatcgtgctgagcggaggcaacgtcctcttcacggagttcgacggcggccgcgtgtcgagcgttaccatcggtggtggagcgccgacgcccctcgcgacaacacaagtaggagcctacggcatcgcggtagactcgacatcggcgtacttcaccgacttccagcctggcaccgtgatgaaggtgcccatcggtggcggaatggtcagcacactggcgcccaagcaggcccacccaaccaacgtcgcagtggacgcgacgtccgtgtactggacggaggacaacgcagtgatgaaacaggacttcggcggtcccgcgatcgtcattgcgaagacgacgactccgatcggcctcgcgctcgatgcgaactacgtttattggagcggcggcgcgatctacagagtcgcgaaaaaatgagccgctcctcgcttgcgatattgatgagcgtcagctgcgcgctcgtcgcgtgcgttggcgacgtgcctagcggagtgggtgacgcatcattcgaagcagggcccgaagctgggccgaccacctgcttcatcggcggaaaggtgctggaagcaggcacgatcaacgcggcgtccgtctgccagtcttgccgacccgacgtatcgcccatggcctggagcagcgcgcccgaaggcacctcgtgcagctcaccggggatctgtcactcgggggcgtgcgtgaacgggtgcatcatcgggagtgtgtattatgcagccaacgcgcccgaccccttgaacgcgtgtctcgtctgggggggggggcctacgtagctgn

SEQ ID NO: 2688 - DNA, 219 bp, Glycine max
  Peptide Sequence Number=SeqID_6318
  Probeset Number=SeqID_12467
atgctttgggactggggagtgaatatcgtgccgaagtacatcggcgacgacatggttcttcttctaggccttacagaaggccaggctcgacaactgatggagagcaacaagtcgccgttctactcagtggagagatggaataggcagaaaattctggctgccataggtgacgttgtggaagtagatgatgaagtggaggaattgcgaaagatggatagg

SEQ ID NO: 2689 - DNA, 1369 bp, Glycine max
  misc_feature (1)..(6): n is a, c, g, or t
  misc_feature (11)..(18): n is a, c, g, or t
  misc_feature (40)..(41): n is a, c, g, or t
  misc_feature (51)..(52): n is a, c, g, or t
  misc_feature (73)..(74): n is a, c, g, or t
  misc_feature (173)..(173): n is a, c, g, or t
  misc_feature (399)..(399): n is a, c, g, or t
  misc_feature (422)..(422): n is a, c, g, or t
  misc_feature (459)..(460): n is a, c, g, or t
  misc_feature (512)..(512): n is a, c, g, or t
  misc_feature (535)..(535): n is a, c, g, or t
  misc_feature (821)..(821): n is a, c, g, or t
  misc_feature (836)..(836): n is a, c, g, or t
  misc_feature (858)..(858): n is a, c, g, or t
  misc_feature (928)..(928): n is a, c, g, or t
  misc_feature (949)..(949): n is a, c, g, or t
  misc_feature (962)..(962): n is a, c, g, or t
  misc_feature (1004)..(1004): n is a, c, g, or t
  misc_feature (1078)..(1078): n is a, c, g, or t
  misc_feature (1101)..(1101): n is a, c, g, or t
  misc_feature (1132)..(1132): n is a, c, g, or t
  misc_feature (1181)..(1181): n is a, c, g, or t
  misc_feature (1184)..(1184): n is a, c, g, or t
  misc_feature (1211)..(1211): n is a, c, g, or t
  misc_feature (1222)..(1222): n is a, c, g, or t
  misc_feature (1289)..(1289): n is a, c, g, or t
  Peptide Sequence Number=SeqID_6319
  Probeset Number=SeqID_12468
nnnnnnggggnnnnnnnnccccccccccccacacccctcnnccccaccganngccccccccccccccccccannaccccctacacacgccgccgcgtccccccccgcccgacgaagccgccaccccacacggccccaccccacaagcgagggagcgcgaaggagagaacacangactggtctcttgtgccttcccccggccttttgatttgtactatttatttctctatttcattaatatttattcttccattattaactccttctacatccacattaccagaacacacccagtactttgatcctattgatttcctccgcatagctccaacctacgccggacgtctcgtcgtacgtcaacactcctctttctccctcccctccctccaccaccccatanccgctctatatttcaaaatttcnttcttcgtggcgaggacagacgtgtgtctctcaaacnntcctcttccctttttttctgtttgttatttgcactagaagtgtttctctccntctatctctactctttcttctcnacagtcctcatctatcacatgcttgtactagaaaacgacatgagacgaggaaaataaagatgataaagagtgcgtgagttctagctttctggtaatgtgaggatgaacagcagtacgcaactccacttttgctgcgcgaggcgcgactcgccagctcatcctccaaccagttatctattctttgtcgaacctgctccggtctcgggcattaacttgtgtccgcgactctcgtcttctctccttctgtgtattgtgttgtataacgtatcgccatgacccgctacgnacctcatagatttgncctactctacttttactatccntctcacagcatactcaagtgcaccagctacccattcacgcacacgatgcctcctcggcgtcttcttcttntccacacacaccgtcgcacgntcctcgtcgtctnctatgcacactcccaactgcgacgcgcaccgcacatcgcganagtgggagaccacatcataccgtcgtgtcatcgactcgtatcgcgtaacatcctcgccgtcactcgctatggantccacctcatcatgcgtaggctngtcactgtacaaagcgccgagcggcggcacnacggccgacgacggacgtgatcggtgacatgtatctacactgctcaccncgncatcacgctatggcacaaatccaactntaccatctacntcctatgtctcggtgatagcctcgttcgtgtcactacctaattctatacaactatatgacataaaanaagaactataataacatactctcatagagacgtgttgctctgtcacatctcagcagtagcttaattatacacaaagctca

SEQ ID NO: 2690 - DNA, 1396 bp, Glycine max
  misc_feature (1)..(1): n is a, c, g, or t
  misc_feature (43)..(43): n is a, c, g, or t
  misc_feature (78)..(78): n is a, c, g, or t
  misc_feature (82)..(82): n is a, c, g, or t
  misc_feature (299)..(299): n is a, c, g, or t
  misc_feature (394)..(394): n is a, c, g, or t
  misc_feature (571)..(571): n is a, c, g, or t
  misc_feature (832)..(832): n is a, c, g, or t
  misc_feature (969)..(969): n is a, c, g, or t
  misc_feature (998)..(999): n is a, c, g, or t
  misc_feature (1168)..(1168): n is a, c, g, or t
  misc_feature (1275)..(1277): n is a, c, g, or t
  misc_feature (1379)..(1379): n is a, c, g, or t
  Probeset Number=SeqID_12469
nagtgtgagtttgatagtaggagtagttcacgctaggtgcgtntagagtgagtgctgtgcgatctcggaatgaacggngtcncagttaggtaggtacaggtgtggtgcccgatacagtacgtacctcgccacaggagatagcacggcatgagagtgagagatgaatagaaggcagacgctataacataaaacagagcgtagtattacataccttatcacctgttgtatgttgtagttattcgacttcttacacactttagttatcagtaagagtcggtctgtggttgagcgacagcgtngtagagttagtatacaagacatgaaatagtatagatgcatatgaggtaagtgagtgtgtcggttggtgatgtgtgtgtgtgagtgcgctagtgtnatgagtagagcggagaatggtctgctcatccaatagtaaatattcgtcttcagatcagtggtgctaagctgctggttgatggagtggggtgcacgtgcgctgccattatcgtggtgggtgtgcgtctgagagtgagtacaagcattgtatggtgtttgggcggtggtgcgcaggtgntgggtgtgggtgtgtcggagtgtctcatcttacgtttgggcgggtgtggggcgggtgcgagtgtagagctgagatatgtgagcgagtcaagtggaagaagagagatggtgaccaggtcctgccctcttgcttcacttttatcgcatatgtgtctcccactatccaccgatatatataacgtatcagtatgctcaccatagtaattcacacagcgcgcctatctccagttattttcatcatagagcgccaatttctaacacncgacaccacccaataatcaacacacaacacataacaccttagaacacgacacccaccacaaaccattccccttgatagccagcgcggaccccgcctcgtgcgcagggtgctgggtggtgcctgtgtggggtggttgngtggcagtcatcgagtcgcccctacgatnntttacccagcattttcccacacagtggtgtttttttctctctcacccccttatattatgcccgtcgtctttagttcttccatttccttgttacaataccaccgtatgtttgtatattctccatcttatattattcacaaggacagctgataggccgctacctcagagantcattcaccaactaacaaagtgtacctagacattaagtaaaaactattaaggaagagtcaggagtagagtgagggtggagtaaaaactactctagagtatttgtgtnnnttcttttttcctgataatatagttcaacctcgcgtgagattctctatggttcagtatagcacaaatataataatacactaaacaactatctctttctctttnctccctccctcttccct

SEQ ID NO: 2691 - DNA, 538 bp, Glycine max
  misc_feature (43)..(43): n is a, c, g, or t
  misc_feature (214)..(214): n is a, c, g, or t
  misc_feature (354)..(354): n is a, c, g, or t
  Peptide Sequence Number=SeqID_6320
  Probeset Number=SeqID_12470
ggttatatttttagtcagaaatggtgtaaagcttgtgttctgnttgatggactgaatagaggtttgtctaaattggggattggacgaagttgtggtagtgttgcttttgataatggaaatgaaagtaaagtagaaaagagtatttagggtaaataatgtataactctagatttctgattttctatattatacttattagcgagacgaggctttntgttcttgaaatttagggtttaaagaaaagttgtactgtttttagattattactagttaatttaattatatatttttagctttatttttgtgggtaatggttatgttgttatttgttggctttttataatcaatggatantaatgttttggtggagagaaagtgagtgaagaaaaaaaaaatagaaggaaataaatatttgaaattttgtggttgaaagttaacctttcttttctcactttttttttaatcaaacaaaagaaaatattgtcatccatattttcctttaaaaaaaaaaaaaaaaaactcgagactagttcctcgt

SEQ ID NO: 2692 - DNA, 1360 bp, Glycine max
  misc_feature (33)..(33): n is a, c, g, or t
  misc_feature (102)..(102): n is a, c, g, or t
  misc_feature (548)..(548): n is a, c, g, or t
  misc_feature (648)..(648): n is a, c, g, or t
  misc_feature (773)..(773): n is a, c, g, or t
  misc_feature (789)..(789): n is a, c, g, or t
  misc_feature (828)..(828): n is a, c, g, or t
  misc_feature (943)..(943): n is a, c, g, or t
  misc_feature (1036)..(1036): n is a, c, g, or t
  misc_feature (1155)..(1155): n is a, c, g, or t
  Peptide Sequence Number=SeqID_6321
  Probeset Number=SeqID_12471
gagatggttgatgctatgtctaagatcgttaanagatgtcttatccgtagtacatgggcgagataacgatgttatacatattcatcggcgatagcattcgcntgtagtgtgtatgagtgttcgtggtagtaggagtgtaggtcgctcgcgcgctcgctgggtggggtgtgtcatgcggcactcggcggcacggggcgcgggagggatgggttgttgtatgtggtgacactggttgtatacattactattttagcccatgtctatcagcaggggtagcttgtcacttgtagcgagactcatatagtccggcatatttagcaacctctgcatcaagttatacagtagatacgcttctatctcacaaccactctcactattgatactgcgctcgagccgcgcgacggcgggagacgtgtgtcgggtacttgcgcagagttgtgcgaccgagcgagagaggacgcactcgtttattataagactaatacacactctatgcgtctcttctgtactacccatctctccttactatgaatcagtggtgattaagnacgtgacagtagatattagtaagatgtggcagtgtatgactccacggtcacgcgacgggcaggacgtgcactggcgagcgtacgagcatgaagatgaggnggcacgtgtgagagcacgcagtgacgaacgtatctatgtggtgtgcgtcgatatcgccagtaaggacaatgttagagatgatctctggtgactgctagtactattctgatattcgagaatctganctcacgcccaaccatngatagcagatacgtatagtactacgattgctccagtcgntaggcgatgtagctggatcacgagcctgaagatcgttgatgagagtttcttacgcttgtcagctgtacagactgagcagataactctacacgaccgggtctatcactgcatatgngctatcgtcaccggtatcaccaacgcgacgcgtcgcttccgcgttcagccctctaacggagcacacgccggctattcaatagcttcgcgaganacatgtactgtctgagaagtgcgtcatataatcgtgagtcaacctaatccagatagctagtatacgactgctctaatatcgtgtgaacatgtcgataattatatcgtcgcagagatagnatgagtgagtgtgaccgtgaggatttgcactcacggaagtgtggcaggtgcggcaggcgagaggtgagacgtagagtaggtgacgtagagcatgaagcagcacgcaggcgtattacaccatgtcgccgacagctcctgctgatcgcgtgctatgaattgtcgagcggagcactgctatttcatcctgtcatgttgaattcacttt

SEQ ID NO: 2693 - DNA, 2268 bp, Glycine max
  misc_feature (1)..(1): n is a, c, g, or t
  misc_feature (42)..(42): n is a, c, g, or t
  misc_feature (82)..(82): n is a, c, g, or t
  misc_feature (85)..(85): n is a, c, g, or t
  misc_feature (87)..(87): n is a, c, g, or t
  misc_feature (118)..(118): n is a, c, g, or t
  misc_feature (126)..(126): n is a, c, g, or t
  misc_feature (159)..(159): n is a, c, g, or t
  misc_feature (167)..(167): n is a, c, g, or t
  misc_feature (178)..(178): n is a, c, g, or t
  misc_feature (183)..(183): n is a, c, g, or t
  misc_feature (216)..(216): n is a, c, g, or t
  misc_feature (279)..(279): n is a, c, g, or t
  misc_feature (334)..(334): n is a, c, g, or t
  misc_feature (344)..(344): n is a, c, g, or t
  misc_feature (443)..(443): n is a, c, g, or t
  misc_feature (478)..(478): n is a, c, g, or t
  misc_feature (551)..(551): n is a, c, g, or t
  misc_feature (565)..(565): n is a, c, g, or t
  misc_feature (593)..(593): n is a, c, g, or t
  misc_feature (639)..(639): n is a, c, g, or t
  misc_feature (641)..(641): n is a, c, g, or t
  misc_feature (679)..(679): n is a, c, g, or t
  misc_feature (694)..(694): n is a, c, g, or t
  misc_feature (749)..(749): n is a, c, g, or t
  misc_feature (778)..(778): n is a, c, g, or t
  misc_feature (792)..(792): n is a, c, g, or t
  misc_feature (796)..(796): n is a, c, g, or t
  misc_feature (874)..(874): n is a, c, g, or t
  misc_feature (936)..(936): n is a, c, g, or t
  misc_feature (985)..(985): n is a, c, g, or t
  misc_feature (1074)..(1074): n is a, c, g, or t
  misc_feature (1077)..(1077): n is a, c, g, or t
  misc_feature (1089)..(1089): n is a, c, g, or t
  misc_feature (1105)..(1105): n is a, c, g, or t
  misc_feature (1168)..(1168): n is a, c, g, or t
  misc_feature (1236)..(1236): n is a, c, g, or t
  misc_feature (1260)..(1260): n is a, c, g, or t
  misc_feature (1263)..(1263): n is a, c, g, or t
  misc_feature (1318)..(1318): n is a, c, g, or t
  misc_feature (1425)..(1425): n is a, c, g, or t
  misc_feature (1478)..(1478): n is a, c, g, or t
  misc_feature (1611)..(1611): n is a, c, g, or t
  misc_feature (1629)..(1629): n is a, c, g, or t
  misc_feature (1661)..(1661): n is a, c, g, or t
  misc_feature (1696)..(1696): n is a, c, g, or t
  misc_feature (1701)..(1701): n is a, c, g, or t
  misc_feature (1741)..(1741): n is a, c, g, or t
  misc_feature (1822)..(1822): n is a, c, g, or t
  misc_feature (2093)..(2093): n is a, c, g, or t
  misc_feature (2103)..(2103): n is a, c, g, or t
  misc_feature (2173)..(2173): n is a, c, g, or t
  misc_feature (2242)..(2242): n is a, c, g, or t
  misc_feature (2246)..(2246): n is a, c, g, or t
  misc_feature (2254)..(2254): n is a, c, g, or t
  Probeset Number=SeqID_12472
ngatcatgaatagagctatcagaaagtacgacgtgctctgcncgtgagtcggatgtctaattcgtcgggtgtcgctgagtcnatngnagtagaccatatatatcactgtcgcactganttatatgnagcgagtatgactgcgagtgatcagagtgtcgngtcagcantgtagatggtngcatngtcgaatgtgatctcttgttgtccagcatcagnacagcgcgttcgtcgcgcgtctgggtgtatgcatagcatcagaaaggtcgtgagtcactgagntcgcatgctcgtagacatgtactcatcagataggctgcatcatgagcgttcgtcntgtgatatanatcgatatacgaccggtgagcgcgcgcgggtagtgagtgtgtagatgtgtgtaaacgtagacgttctggtcgctcatcgagtgtagacgagacgtagancatatatgtcgatcacgtcatgtctacatgtatantgtcgtcagacgtcttcatacatgcgaggtgtctcacacaggcacagagacgatcaatgtacggatgagtgangtatactgaggcanatcgacagtatgtcagatcgagtgtcgngacaccgagtctctagcatcactcactgcgtgtacagagtcatcgngngtcgaggtagcatatactgtacgtgctggactacgagnaccgccgggtcacgnagcacacgcgctgtgtatgcgatcgagtaggacgcgcctcagtatattgactacncgcagtagcgctgtcgtctctagtagagntcgtactcgtcgtngagncggctattcgtttagttgcgtctgagacgcgcgtctacatgtgtcatgtgaggtattgtcgaggcgtggcgttctcanacgaatattcagattactccatctcactcctatctcttacgatgttcatagaatgactacangtgtgcacatgactgatatatctcgcgtgtcagactgctcgagcccatngattcagagatatacactgtagccactgcgtcctatgtgtgatgagatgatagcgcatgcagcgtgcctgtggtaggtgtactttatangtntcaaccactatngagcgcatgtgcgctngtgcatatagctacttacattagctgtactgactgcattgtgcggatgtgagcgtagtgctcngagtctgcgtcctatgctgctaggtcagtcgtatcgcgatcgtatgtatgtcatgcgtaggtctcgangctccatctccggacatatgcggngancatagtgcacgcagtgctgaggggtactctctctctagactaattccatctcaanaaacattacataatgtaacagatgccgcagagccgcgatctcactctgcagcacgcgcggactacatagagtagctgatgctgaggtactcaagtagatcttgtagnagtgcggccgcgtgaggcattgggttgagtcgtccggctgaggcgtgagcttngctgctcgtaggtgtattcgtttattcatctatctccgtgatcgtgcgctctcgtgtcgcagtatccgtgatgtccttatatatatcctgagcgtatacagcatgctcaagccgatgccgcgtgcacatcacncgtcgtgcgtgtgcagcntagacgtctctgaggacggaggtagtcaggtngcagcggtcggatatcgtcagtgaagatcgtacanacganagatatggagtgacagatcatagagcgtagaggtgtgttngcgcgcttagtaggaggagtgcagagatactgtatagtacgagcgaacagtagtagcgtctcgtgtaggtagacgtaatgnctctgacagagtactagctaacgtaggcgtgggggctagtcagcgagtgctgagaggtaactgacgtatctcatatcttgttatcgtatctattccgatcgcgtgaatcatatcagaatacatattatcagtgtatgtcagtgtgagtctcagtcggccatgagttgcgcatgcaagtaatgttcgttgctcgagtgcttgctcgttgtgtagcctgatctagtggatgaggtgagagtcaaacgtcgacggcgctgtgacggcgtggggngcgcgcgtgngtgcgccttcatcagcagataacgcattgtatctttcggatgggtggtggtgccgctcgctgtatactcnctctatattgtggtggattatattagatattctagtttagtctatctcactacctcaccatagtatgtngatnggggaggngtggggtgggagaa

SEQ ID NO: 2694 - DNA, 866 bp, Glycine max
  Peptide Sequence Number=SeqID_6322
  Probeset Number=SeqID_12473
aaatcataaaaaataaaacttacctcttacaaaagtctctaakggaaaactckgtcgccaagaagtactacagattcggtgttctcgagggtaaccacgtcgaagaacgtttcggtcttgaccacgctgctaagcttggagatgctaaaatgaacactctttctgaaactagagacaaattttcccttggtagttcagtttatggagctattgaaaaagctaaagagactccaatccccaacaatgctgaactgctagcatcaacaaccttgactcaaacatatcatttgactcctgaaaaagaagctattctattgtccaatattgccttaaatcaaaatggcgataaacaaagagctcttggtttcactcataatggagaaaaagctcatttaatctttggacacggtatccgtcaaaatgattttgagaaaagagaacttgccagcacatataacctttcatatggkgctcaaatcaagcctaaggaatttattttctctaagtttgattcaactgctgttcctcccgtcatcaatcctgaagacaaggtatacattaagagtcatatgaagggaattgctgctattggtgacagccagaactttgagaataagaamcaatacaagcattatgatgagtttactaagacttttgactctgtccaatctaagattgctttcagaaagtgaggaaagtcagatcattaaatggaaattatggataaaatagtttccagatgaaataagtttataaatattttttgtgttattcattcataattatgtgtaaaacaattatgaaacatatatttttttattacatgtatgagattgtatgtgaatactatctcaactaatactctt

SEQ ID NO: 2695 - DNA, 606 bp, Glycine max
  misc_feature (322)..(322): n is a, c, g, or t
  misc_feature (325)..(325): n is a, c, g, or t
  misc_feature (341)..(341): n is a, c, g, or t
  misc_feature (362)..(362): n is a, c, g, or t
  misc_feature (388)..(388): n is a, c, g, or t
  misc_feature (405)..(405): n is a, c, g, or t
  misc_feature (407)..(407): n is a, c, g, or t
  misc_feature (419)..(420): n is a, c, g, or t
  misc_feature (427)..(428): n is a, c, g, or t
  misc_feature (430)..(430): n is a, c, g, or t
  misc_feature (439)..(440): n is a, c, g, or t
  misc_feature (443)..(443): n is a, c, g, or t
  misc_feature (471)..(471): n is a, c, g, or t
  misc_feature (475)..(475): n is a, c, g, or t
  misc_feature (482)..(482): n is a, c, g, or t
  misc_feature (493)..(493): n is a, c, g, or t
  misc_feature (495)..(497): n is a, c, g, or t
  misc_feature (499)..(499): n is a, c, g, or t
  misc_feature (517)..(517): n is a, c, g, or t
  misc_feature (524)..(525): n is a, c, g, or t
  misc_feature (529)..(529): n is a, c, g, or t
  misc_feature (533)..(533): n is a, c, g, or t
  misc_feature (535)..(535): n is a, c, g, or t
  misc_feature (540)..(540): n is a, c, g, or t
  misc_feature (545)..(545): n is a, c, g, or t
  misc_feature (552)..(553): n is a, c, g, or t
  misc_feature (559)..(559): n is a, c, g, or t
  misc_feature (561)..(563): n is a, c, g, or t
  misc_feature (565)..(565): n is a, c, g, or t
  misc_feature (568)..(568): n is a, c, g, or t
  misc_feature (571)..(571): n is a, c, g, or t
  misc_feature (580)..(580): n is a, c, g, or t
  misc_feature (585)..(585): n is a, c, g, or t
  misc_feature (588)..(588): n is a, c, g, or t
  misc_feature (599)..(599): n is a, c, g, or t
  misc_feature (601)..(606): n is a, c, g, or t
  Peptide Sequence Number=SeqID_6323
  Probeset Number=SeqID_12474
gaaacatcaaatggagatgtattaatttttccagacatgatcagatataggagattaacccattttgatgttgagacatttgttgaagaagttttagtcaaagaaggaaactggcttcctggaaaccctgaatcattaaaagcgtcatatgttttcgtatgctcacatggatcccgtgatcgtaggtgtggggtttttggacctatcttggaaatgtcattatatttggatcaagtatcaacagagaagtcactgggcacttgtaaggaggagattctccctggtatggatatgttactccagatgatgtacctttattgtntcnccagcatatcattcanggggagatttttgactcactntgggaggggtcaaattggtttatccnaagatgatcagaagatnangcacgaacaatnngctttanntnatggtggannatntttacgatgcatggtgctggctgcttgncaantactgangagctgttgcnannntncaaagactttgtgttgtntatgttnntttntatntnctacntctcnctgctannaacgangnnntnttntgntttttcttnctctntgncaaggtcttcntnnnnnn

SEQ ID NO: 2696 - DNA, 2071 bp, Glycine max
  misc_feature (4)..(4): n is a, c, g, or t
  misc_feature (8)..(8): n is a, c, g, or t
  misc_feature (12)..(12): n is a, c, g, or t
  misc_feature (15)..(15): n is a, c, g, or t
  misc_feature (79)..(79): n is a, c, g, or t
  misc_feature (85)..(86): n is a, c, g, or t
  misc_feature (95)..(95): n is a, c, g, or t
  misc_feature (100)..(100): n is a, c, g, or t
  misc_feature (103)..(103): n is a, c, g, or t
  misc_feature (114)..(115): n is a, c, g, or t
  misc_feature (119)..(119): n is a, c, g, or t
  misc_feature (133)..(135): n is a, c, g, or t
  misc_feature (137)..(144): n is a, c, g, or t
  misc_feature (146)..(147): n is a, c, g, or t
  misc_feature (149)..(171): n is a, c, g, or t
  misc_feature (173)..(176): n is a, c, g, or t
  misc_feature (178)..(182): n is a, c, g, or t
  misc_feature (184)..(203): n is a, c, g, or t
  misc_feature (206)..(206): n is a, c, g, or t
  misc_feature (208)..(208): n is a, c, g, or t
  misc_feature (215)..(215): n is a, c, g, or t
  misc_feature (218)..(218): n is a, c, g, or t
  misc_feature (220)..(220): n is a, c, g, or t
  misc_feature (232)..(232): n is a, c, g, or t
  misc_feature (239)..(239): n is a, c, g, or t
  misc_feature (284)..(284): n is a, c, g, or t
  misc_feature (286)..(286): n is a, c, g, or t
  misc_feature (288)..(289): n is a, c, g, or t
  misc_feature (292)..(293): n is a, c, g, or t
  misc_feature (296)..(296): n is a, c, g, or t
  misc_feature (299)..(299): n is a, c, g, or t
  misc_feature (302)..(303): n is a, c, g, or t
  misc_feature (305)..(306): n is a, c, g, or t
  misc_feature (311)..(312): n is a, c, g, or t
  misc_feature (314)..(314): n is a, c, g, or t
  misc_feature (321)..(325): n is a, c, g, or t
  misc_feature (327)..(328): n is a, c, g, or t
  misc_feature (330)..(332): n is a, c, g, or t
  misc_feature (335)..(335): n is a, c, g, or t
  misc_feature (338)..(338): n is a, c, g, or t
  misc_feature (341)..(342): n is a, c, g, or t
  misc_feature (364)..(364): n is a, c, g, or t
  misc_feature (371)..(371): n is a, c, g, or t
  misc_feature (424)..(424): n is a, c, g, or t
  misc_feature (427)..(427): n is a, c, g, or t
  misc_feature (489)..(489): n is a, c, g, or t
  misc_feature (491)..(491): n is a, c, g, or t
  misc_feature (494)..(495): n is a, c, g, or t
  misc_feature (505)..(505): n is a, c, g, or t
  misc_feature (533)..(533): n is a, c, g, or t
  misc_feature (546)..(546): n is a, c, g, or t
  misc_feature (570)..(570): n is a, c, g, or t
  misc_feature (591)..(591): n is a, c, g, or t
  misc_feature (606)..(606): n is a, c, g, or t
  misc_feature (608)..(608): n is a, c, g, or t
  misc_feature (695)..(695): n is a, c, g, or t
  misc_feature (727)..(727): n is a, c, g, or t
  misc_feature (731)..(731): n is a, c, g, or t
  misc_feature (766)..(766): n is a, c, g, or t
  misc_feature (796)..(796): n is a, c, g, or t
  misc_feature (813)..(813): n is a, c, g, or t
  misc_feature (843)..(843): n is a, c, g, or t
  misc_feature (855)..(855): n is a, c, g, or t
  misc_feature (860)..(860): n is a, c, g, or t
  misc_feature (863)..(863): n is a, c, g, or t
  misc_feature (883)..(883): n is a, c, g, or t
  misc_feature (931)..(931): n is a, c, g, or t
  misc_feature (959)..(959): n is a, c, g, or t
  misc_feature (969)..(969): n is a, c, g, or t
  misc_feature (1008)..(1008): n is a, c, g, or t
  misc_feature (1017)..(1017): n is a, c, g, or t
  misc_feature (1029)..(1029): n is a, c, g, or t
  misc_feature (1036)..(1036): n is a, c, g, or t
  misc_feature (1045)..(1045): n is a, c, g, or t
  misc_feature (1059)..(1059): n is a, c, g, or t
  misc_feature (1102)..(1102): n is a, c, g, or t
  misc_feature (1118)..(1118): n is a, c, g, or t
  misc_feature (1132)..(1132): n is a, c, g, or t
  misc_feature (1147)..(1147): n is a, c, g, or t
  misc_feature (1165)..(1165): n is a, c, g, or t
  misc_feature (1209)..(1209): n is a, c, g, or t
  misc_feature (1242)..(1242): n is a, c, g, or t
  misc_feature (1245)..(1245): n is a, c, g, or t
  misc_feature (1253)..(1253): n is a, c, g, or t
  misc_feature (1255)..(1255): n is a, c, g, or t
  misc_feature (1293)..(1293): n is a, c, g, or t
  misc_feature (1311)..(1311): n is a, c, g, or t
  misc_feature (1314)..(1314): n is a, c, g, or t
  misc_feature (1329)..(1329): n is a, c, g, or t
  misc_feature (1382)..(1382): n is a, c, g, or t
  misc_feature (1395)..(1395): n is a, c, g, or t
  misc_feature (1463)..(1463): n is a, c, g, or t
  misc_feature (1465)..(1465): n is a, c, g, or t
  misc_feature (1504)..(1504): n is a, c, g, or t
  misc_feature (1614)..(1614): n is a, c, g, or t
  misc_feature (1630)..(1630): n is a, c, g, or t
  misc_feature (1642)..(1642): n is a, c, g, or t
  misc_feature (1680)..(1680): n is a, c, g, or t
  misc_feature (1694)..(1694): n is a, c, g, or t
  misc_feature (1707)..(1707): n is a, c, g, or t
  misc_feature (1860)..(1860): n is a, c, g, or t
  misc_feature (1890)..(1890): n is a, c, g, or t
  misc_feature (1975)..(1975): n is a, c, g, or t
  misc_feature (1987)..(1987): n is a, c, g, or t
  Peptide Sequence Number=SeqID_6324
  Probeset Number=SeqID_12475
cctntgangcgntanatgcgcttgatcgcgcgcgcacgactatatgatcgacaaaagcgtctggtcgagcgcggacgcngggcgnnggttactgnatganttnacagtcgacgnnacgncatgacgagcgggnnntnnnnnnnncnnannnnnnnnnnnnnnnnnnnnnnngnnnngnnnnnannnnnnnnnnnnnnnnnnnncgncncatcccnctncnatatcgctgatncatagcnaccactaagcacagtcgctgtctcgtcgtagtatttatagaacgnananntgnngantanganngnnaaaanngnagggggnnnnngnngnnncanacntcnntcagatgtgtagtgcatatatngatcacntacactacttcgacctgacgatcatagacgtgtcacgcatctcatccatctcnatntagcacggtcgtctccgtgcgagacacacgcagcgacccgacatcactcgcacatctcactngncgnnctgtctggcnaaagcatttgttcacatgtgagcgatangtgtaatcgatgnagagctatatgatctagtagtgcnatgagcagctcgtcgtaacgnagcaaagcgcgtacnanacactatatcgtacgtacatatgattgatatgatagatcagatagactactcaatgcagcagctgggtgtcgtcgggagagtctgcntcatgagcgcacgagcgacgtatatgtatcantcancctcgtagtagatatatgtgtgctgggatgtagcncacctcgtgcgagagttcgcgatctcactnagggacgcagcatctgncgtcgtgcgactacccatcagtatactatntcatgagtacantgcanacnatactgagtagcagctcgcntcgcgtcacgtcggtgaggcagtggaacatagagaaagcgctacgtcntcgcgctcataccaccactataatatantcactatatnatagtagcgagctgtatcgatagtgcccgcgctgcgctnctatctaanagctcgtcactntatgagntcgcgcacncacatcatataacnttactgtcgcgattgcagacgtctcgtatctagatatatactngagcgcgcggcgcgangcggcgcggtatangagatgtaacaagtnctatatatagatatacgntctccagtgatcgcacgagctaatttcgatatttcgacgtgcgnctcgcgcgtcgtcacgccgagtacatcactatntancgtatatnangcttatactatcgcgagacgaggagtatcgtgcgatgncggcctgcacgtcttatncgntgcgtatcacatatnatctagtaatatcttcgtctacgattcgcgcgcagtagatgtagggcgcgcgncatactgtacccngctatctcgctctacagctcgcattctatcgtgcggtactctagacaatgaacaatatatgagctcgngncgagcactcgtgctggaggagcatgaagaactaatatangctgcgcctttaagtattgtgcgcgcacgcgcaggatatgatacttactattatatcatactgacacgctagcgcgcgcgtgagacactgcgtacactagccattacatnatggtcgatatagctnactgacctgtantttgtagatgatgtatatagtcgactagatctcgttancgtgctcgttggtncgcctgatcgcgncgccagccgatgagagtgcatcacataatcatactactcatagtgcgatgggctgactcgcacggagctgctgccttgtacttagcttgctcatagtacgacgtatcttcattagttatgatgtgcgcacgataataccgacacgacgtggtnaatagagaggcggcgcgacttgctctatcntttgcgatgatgcttatatatagtgtagcgagtgtgaggtgcgcgcgctgcgctcactcccctgtcctagtggagtagtgtatanaatgacgtattnatataagtagctagcgtacagactgtactctgtgtgtgatgtatgtagtagtgtatgtgtgctagttgatgcttactctctatc

SEQ ID NO: 2697 - DNA, 958 bp, Glycine max
  misc_feature (1)..(59): n is a, c, g, or t
  misc_feature (865)..(958): n is a, c, g, or t
  Probeset Number=SeqID_12476
nnnnnnnnnnnnnnnnnnnnnnnnnnnnnnnnnnnnnnnnnnnnnnnnnnnnnnnnnnncccttttccattttcccttcaagaagaacttccctttatcctcccaagactctccaatttcgtttaccctcctccaagcgtgatgatgctttcgattcatactccaaagaaaaaaacaagcttccaattcttagtgatcgctgcctctctctttcccctctttccaaaaaattgtggggtcaggatgctgcgatggggctggtgctgagtgctgcgacgggcagaggatggaccacgggttcagggatggaaggcccctctgttcctgcagttggtagggatagcgaatcggggacggggaacatctccactttcccttggtctctcttcacaaaatcccctaggagaaggatgctggtggctttcacctgtaccatctgtggccagcgaaccacacgggctattaatccccatgcttacactgatggcactgtttttgtgcagtgctgtggatgcaatgcatatcataagctcgtggatcacttgaacctgtttcaggagacaaattgctatttaaattcaagttttaattataaaggagaaggatgggatgatcttaagttcaggtatatggatgataacgcgatgatgatgactattccccttgctaagtgaatgcctgtgatggacatatactctctgctaatctatggaagttcagtttaggtgtcttggatattctttaggttttcatgctttatagtgaaatgtgtcagagactggtatagtaacatgtttctacttggccttgatgactcatttttatgatcatgaatttcataatgtacaagacattacacaaatannnnnnnnnnnnnnnnnnnnnnnnnnnnnnnnnnnnnnnnnnnnnnnnnnnnnnnnnnnnnnnnnnnnnnnnnnnnnnnnnnnnnnnnnnnnnn

SEQ ID NO: 2698 - DNA, 2004 bp, Glycine max
  misc_feature (11)..(11): n is a, c, g, or t
  misc_feature (19)..(19): n is a, c, g, or t
  misc_feature (25)..(25): n is a, c, g, or t
  misc_feature (30)..(30): n is a, c, g, or t
  misc_feature (39)..(40): n is a, c, g, or t
  misc_feature (146)..(150): n is a, c, g, or t
  misc_feature (168)..(168): n is a, c, g, or t
  misc_feature (237)..(237): n is a, c, g, or t
  misc_feature (265)..(265): n is a, c, g, or t
  misc_feature (365)..(365): n is a, c, g, or t
  misc_feature (382)..(382): n is a, c, g, or t
  misc_feature (489)..(489): n is a, c, g, or t
  misc_feature (536)..(536): n is a, c, g, or t
  misc_feature (557)..(557): n is a, c, g, or t
  misc_feature (580)..(580): n is a, c, g, or t
  misc_feature (590)..(590): n is a, c, g, or t
  misc_feature (597)..(597): n is a, c, g, or t
  misc_feature (655)..(655): n is a, c, g, or t
  misc_feature (712)..(712): n is a, c, g, or t
  misc_feature (721)..(721): n is a, c, g, or t
  misc_feature (723)..(723): n is a, c, g, or t
  misc_feature (741)..(741): n is a, c, g, or t
  misc_feature (838)..(838): n is a, c, g, or t
  misc_feature (840)..(840): n is a, c, g, or t
  misc_feature (859)..(859): n is a, c, g, or t
  misc_feature (870)..(870): n is a, c, g, or t
  misc_feature (985)..(985): n is a, c, g, or t
  misc_feature (1012)..(1012): n is a, c, g, or t
  misc_feature (1075)..(1075): n is a, c, g, or t
  misc_feature (1136)..(1136): n is a, c, g, or t
  misc_feature (1138)..(1138): n is a, c, g, or t
  misc_feature (1145)..(1145): n is a, c, g, or t
  misc_feature (1148)..(1148): n is a, c, g, or t
  misc_feature (1166)..(1166): n is a, c, g, or t
  misc_feature (1182)..(1182): n is a, c, g, or t
  misc_feature (1193)..(1193): n is a, c, g, or t
  misc_feature (1207)..(1207): n is a, c, g, or t
  misc_feature (1211)..(1211): n is a, c, g, or t
  misc_feature (1264)..(1264): n is a, c, g, or t
  misc_feature (1289)..(1289): n is a, c, g, or t
  misc_feature (1296)..(1296): n is a, c, g, or t
  misc_feature (1302)..(1302): n is a, c, g, or t
  misc_feature (1326)..(1326): n is a, c, g, or t
  misc_feature (1352)..(1352): n is a, c, g, or t
  misc_feature (1368)..(1368): n is a, c, g, or t
  misc_feature (1380)..(1380): n is a, c, g, or t
  misc_feature (1423)..(1423): n is a, c, g, or t
  misc_feature (1429)..(1429): n is a, c, g, or t
  misc_feature (1436)..(1436): n is a, c, g, or t
  misc_feature (1476)..(1476): n is a, c, g, or t
  misc_feature (1552)..(1552): n is a, c, g, or t
  misc_feature (1563)..(1563): n is a, c, g, or t
  misc_feature (1582)..(1582): n is a, c, g, or t
  misc_feature (1594)..(1594): n is a, c, g, or t
  misc_feature (1597)..(1597): n is a, c, g, or t
  misc_feature (1613)..(1613): n is a, c, g, or t
  misc_feature (1615)..(1615): n is a, c, g, or t
  misc_feature (1642)..(1642): n is a, c, g, or t
  misc_feature (1659)..(1659): n is a, c, g, or t
  misc_feature (1677)..(1677): n is a, c, g, or t
  misc_feature (1683)..(1683): n is a, c, g, or t
  misc_feature (1694)..(1694): n is a, c, g, or t
  misc_feature (1700)..(1700): n is a, c, g, or t
  misc_feature (1718)..(1718): n is a, c, g, or t
  misc_feature (1721)..(1721): n is a, c, g, or t
  misc_feature (1739)..(1739): n is a, c, g, or t
  misc_feature (1768)..(1768): n is a, c, g, or t
  misc_feature (1781)..(1781): n is a, c, g, or t
  misc_feature (1787)..(1787): n is a, c, g, or t
  misc_feature (1803)..(1803): n is a, c, g, or t
  misc_feature (1806)..(1806): n is a, c, g, or t
  misc_feature (1816)..(1816): n is a, c, g, or t
  misc_feature (1822)..(1822): n is a, c, g, or t
  misc_feature (1825)..(1825): n is a, c, g, or t
  misc_feature (1839)..(1839): n is a, c, g, or t
  misc_feature (1869)..(1869): n is a, c, g, or t
  misc_feature (1874)..(1874): n is a, c, g, or t
  misc_feature (1902)..(1902): n is a, c, g, or t
  misc_feature (1912)..(1912): n is a, c, g, or t
  misc_feature (1920)..(1921): n is a, c, g, or t
  misc_feature (1935)..(1935): n is a, c, g, or t
  misc_feature (1939)..(1939): n is a, c, g, or t
  misc_feature (1945)..(1945): n is a, c, g, or t
  misc_feature (1966)..(1966): n is a, c, g, or t
  misc_feature (1984)..(1984): n is a, c, g, or t
  misc_feature (2004)..(2004): n is a, c, g, or t
  Peptide Sequence Number=SeqID_6325
  Probeset Number=SeqID_12477
tatagtgctangcggtgtnatacgngaacnggacggacnnggaaacttcgagcgagcacgtaccatacactgacagacagacagtcacgcgtcgcactgctatacgaacagacacatctgtggagtgtaatggttgtgaagagagnnnnnattgacgtccgccattantgaacgtatatatgatgcgcactcgcagagaacccagtagtgcgctcgtactatcacgatggactgcgntctgagctcgtgtgtatctctgcatctntgagctgagcatcctgccggcgctaacgacgactattaatcctgtcgatgtgtcttgtctgatctacatgatcatatcagatgactgatatcatttactntgctatgatactagatncacgccacacgactgtactcacgcgcgtgtgagacgtcgttcgctcctgcgagcacgtctgctgctcctataatcatacactacgatcacatcatcaataacacgcnacgtagatagcacagcacacgagtgccgacacgatgcactcagacanagtgctctcgtgtcgtgatcntccagcacgctccgacgcgtgcncatccacaancacatgnaccaaggcatctcactatcatgccgctgtctcgcgtgctgtcgacgtgctgctcactncatccagcgtcgtgcgtctgacgctagtatcgtacgtctcgagcgcatgctggccgnagttgtgtnantgcgcgtctcgcgcactnatcccggcgaggcgtgtgtcgacgcactcctcgtctgcgtgcatgtagcgtggtctgtacacatgatcatacatgttgatacgtacagtatatgcgncntctctcacttactactatnctagcacgttnactcgcacactgagtctctcgcatatctgatatgctcatcagacataccgacgcacgcagctcagacacgatgacgcgcacgattagagacgtcatgttattgatcgcgcataancaccctgtgtactacgtacgtctcgtnctctgctgccgaacagtagatgagtggccatgtatgtctgctcgatgacatgagtgattatangacatgactagtacacgcaatcgcagcatacaatcatcgtcgactatccgattacgtgatnancaatatnacnacgacgatgacctacgcncgactgaagactaccnacgatcaacangcgacattgtgatncacngtgctgccacgtacagaactctataatcagattactagcaacagatactcgancatcatgactcaactacatgcacancatctcncgatcntttactcaatcaacactatactanttcgaggcgtcgtctgtagtcgtcgnatgggagctacacgtntagacacacgtnatgacatcgacactgcgcgactgatcactgactcatagtgtantcacanaccattngactatcaatgctcgaatactgtctgactatgatcacgangcgcgtcgacgcgcgatctacgcatacatacatcatcaatcacaacgtatctacatcctacgctgatagtagtatngcttgacatgntactattcatacgtgatgnagcacgttaccnagntctgtcgtctacgatncntcgctactattgatgccaataactctngtatcgagcgtgatacnacattcagtcactgatcnactgtnctgacagacgnataccnctgactcactagcgacgncantccgatcactgatcgacnttcgttcctcatgactgagatactactcnactaccccctgtngcccgntaactaccatcgacgncgntcgtcagcancagtantanataatgtcatcatncgatacgatcgctgactagcactcgtcatnctcgntcccgtgcactgcctagccggcagctanctgcgtaacngagctgtnnatatgctagcacancgantacgtntatcatctacagcgacagctnctgactgctatcacagcngccacgactgaccgtactgn

SEQ ID NO: 2699 - DNA, 289 bp, Glycine max
  misc_feature (40)..(57): n is a, c, g, or t
  misc_feature (65)..(69): n is a, c, g, or t
  misc_feature (102)..(102): n is a, c, g, or t
  misc_feature (108)..(130): n is a, c, g, or t
  misc_feature (250)..(250): n is a, c, g, or t
  Probeset Number=SeqID_12478
tttgaaatggccttgaatgacttgatgcaaaagcatagannnnnnnnnnnnnnnnnnacactgcnnnnngttaggtcacagtacggaatattggatgatggntgttcnnnnnnnnnnnnnnnnnnnnnnnatacgggagactgtcaatattggaaaatcaatgcttgctactagcattgcgagtcgagatgatgccttttgatcctagctacaattcaaagatgcagggtccattcaaaatttaattaanaagaatcgagttctgacagcagtatgtctgaaatatatt

SEQ ID NO: 2700 - DNA, 1514 bp, Glycine max
  misc_feature (1)..(1): n is a, c, g, or t
  misc_feature (52)..(52): n is a, c, g, or t
  misc_feature (80)..(80): n is a, c, g, or t
  misc_feature (130)..(130): n is a, c, g, or t
  misc_feature (184)..(184): n is a, c, g, or t
  misc_feature (237)..(237): n is a, c, g, or t
  misc_feature (371)..(371): n is a, c, g, or t
  misc_feature (414)..(414): n is a, c, g, or t
  misc_feature (495)..(495): n is a, c, g, or t
  misc_feature (634)..(634): n is a, c, g, or t
  misc_feature (927)..(927): n is a, c, g, or t
  misc_feature (980)..(980): n is a, c, g, or t
  misc_feature (1037)..(1037): n is a, c, g, or t
  misc_feature (1104)..(1104): n is a, c, g, or t
  misc_feature (1307)..(1307): n is a, c, g, or t
  misc_feature (1436)..(1437): n is a, c, g, or t
  misc_feature (1439)..(1439): n is a, c, g, or t
  misc_feature (1441)..(1441): n is a, c, g, or t
  misc_feature (1446)..(1447): n is a, c, g, or t
  misc_feature (1450)..(1453): n is a, c, g, or t
  misc_feature (1502)..(1503): n is a, c, g, or t
  Peptide Sequence Number=SeqID_6326
  Probeset Number=SeqID_12479
nagcgcgccgtcacgtgtcgtcctgatacacagtgcgactgatcatgagcgnatactgccacgcactgctctcagatagnataggagcgcgtgtgtgctagaagcagatgacggtagcggagatgatagnggagatggaagtcggcgcgtcgatcgtgttgtttgtgaccggctgttagacttnacgtgtgtagcggaggtcgcgagaactccagcacacactcgtgacgcctgtcntgtggtcatgcgacgctgcacacgacgctgtgtcgaggaggtcgcgcgtgcaagaaggcgagcacgcatggtgtcgggcgcgcgagcagcgcgcgcggccgagacattataatcactcgactcccgcgcgccancccgacgcactcaccaccgtcctgcgtggtagagggaagaagnccagtagagtgcgagctgtctgagtacagtgcaggctgtgcggttggtgagtattgagagtggtgagcgagagtatgaatngcacgagtgaattgaccgcagtcggtctatgagacacgcatgcgggatcatacgtgagtggtgcgaccgcatgtggtgtgatgtgaatgatgagtaggcgtcaggtgggtagggtgctgagagacacactgagatcgcncgtgtgagagataggagacaggtcgatagtctccgaggacgagaatagtcgcaggagctcttcagtgtatgagtgggtgtgtggtccacagagagcaatgttgtggagtgttgtgtgtgttctcgcggttgtcactcagtctcatactctgccatactgaagatatgtaggttggatatgagaggtttctgcgtccgtcccattgattatacatccctatcgttgagaacataatcccaatatattataagtgaacaaacaaatagtaagaggtcaccggattttttggctcncgtgtttccgcgtctctgccgctgcttcgtctgtcctcactccctgtgtgatncagcacggtgaaggtgtggatggcgacgtagcgatggtatatgcaggtgagagggtnaaggcgcgctggccgaccgcgcgtgagcgatatgggcattcgtcttatgtgtgagaggcctctacgngaaaataagatatatagatagtagattatcgtagatgagtaaatagagagacagcggcaggtggatttatcccgtatgttatttagttcgacagatgtttacgaccatatccccggatgagaattaccagtagtacatgagatgaccagtagcaatgcgagtcggcatagacagctgtagggcgagagagaggtgtgcagtanccattgacacacgacccaccggcggacggtcacgggtgtggagtgcggacagaaggcctgtgtgctttaagttctgattcagtcaggacgcacaggattcgatgtgagaagcactatgtatgctttccnntntnttttnnttnnnncacacatccaacactccaactaactaccaacccctccaccaccccaccnnaaaacaccccc

SEQ ID NO: 2701 - DNA, 594 bp, Glycine max
  Peptide Sequence Number=SeqID_6327
  Probeset Number=SeqID_12480
attggttggcgaggtacccaagagtttgatagagctcaagggcttcgccaccactggtcgttcattgggtatggctttcactaacatgccattgtatgtgaagcgtagcagacgaacactccaacaacaacaacccaatatcatatctgggaccaacaacaaagtccgatctggtagaaccaatgttgtatccggaaacgacaacacggttgtatctgggaataacaatactgttgctgggagcaacaataccatcacaactgggagtggcaataccgtatctggtagtaaccatgttgtttctgggaccaaacatatcgtaactgacaacaacaatgttgtttccgggatagacaataatgtatccgggagcttccacaccgtatccgggactctcaataccgtatccgggagcaacaataccgtatctgggagcaaccatgtcgtgtctgggagcaacaaagttgtgaaaggaggttaatggtttgcgagtcagtgtagctcacaaacacttggtggggccaatcgtgttatgtaacttcatggatagagcatccttttcctactttaaataaaatttccagactttatctt

SEQ ID NO: 2702 - DNA, 473 bp, Glycine max
  misc_feature (466)..(466): n is a, c, g, or t
  Peptide Sequence Number=SeqID_6328
  Probeset Number=SeqID_12481
gtctttgacagcttagaaatcttgccgaagaagaagatgggagtattcacattcgtttgcaaaagcaaaggcggggaatggagcgctaagcaacacgagggagacctcgaagcctccgcttcttccacctacgatctccagcgcaaggttgttcagactgctctctccgccgattcctccggtggcgttcagtcttccttctctctcgtctcccctacctccgccgtcttccaggtgatcattggtggtggttctggaggaggatttgctgccggtggaggtgcagcagctggaggcggtggtggaggtgaggccgccgcagccacaaaggaggaagaaaagaaaaaggaagaatctgaagaggaggaaggcgactttggatttgatctctttggttaatgctctttcgaaggtgttactttttgaggtttatttgtttctcttatctgaattgtgttttttcgantgaacct

SEQ ID NO: 2703 - DNA, 406 bp, Glycine max
  misc_feature (23)..(23): n is a, c, g, or t
  misc_feature (25)..(25): n is a, c, g, or t
  misc_feature (32)..(32): n is a, c, g, or t
  misc_feature (43)..(43): n is a, c, g, or t
  misc_feature (46)..(46): n is a, c, g, or t
  misc_feature (48)..(49): n is a, c, g, or t
  misc_feature (60)..(61): n is a, c, g, or t
  misc_feature (63)..(65): n is a, c, g, or t
  misc_feature (68)..(68): n is a, c, g, or t
  misc_feature (72)..(74): n is a, c, g, or t
  misc_feature (87)..(87): n is a, c, g, or t
  misc_feature (94)..(94): n is a, c, g, or t
  misc_feature (109)..(109): n is a, c, g, or t
  misc_feature (111)..(112): n is a, c, g, or t
  misc_feature (117)..(117): n is a, c, g, or t
  misc_feature (124)..(124): n is a, c, g, or t
  misc_feature (130)..(130): n is a, c, g, or t
  misc_feature (140)..(141): n is a, c, g, or t
  misc_feature (154)..(154): n is a, c, g, or t
  misc_feature (172)..(172): n is a, c, g, or t
  misc_feature (223)..(223): n is a, c, g, or t
  misc_feature (245)..(245): n is a, c, g, or t
  misc_feature (250)..(250): n is a, c, g, or t
  misc_feature (292)..(292): n is a, c, g, or t
  misc_feature (295)..(295): n is a, c, g, or t
  misc_feature (304)..(304): n is a, c, g, or t
  misc_feature (313)..(313): n is a, c, g, or t
  misc_feature (315)..(315): n is a, c, g, or t
  misc_feature (399)..(399): n is a, c, g, or t
  Peptide Sequence Number=SeqID_6329
  Probeset Number=SeqID_12482
gaccccaaccaagggggccagcnancagcacnccccaaacccncgncnnaacgagagganncnnncanccannnccaggaaacaggnggcggcncacccggggcaggancnngaganaggaccngaagcnccaaagaacnncaacggggggggngaaattgtgaaaggaagnaaggggaaatatgaacttgacaaaagaactgggcttattatgggtgatcgnatcctttactcatcgggggggnatccncacaacgaggggaggatcccacggactattggggaggagggngancccaagganggcgggggnancaggcaggagccagaagcgccagggggggggggacggggcgaagccagaggaaggagggcaaggaggggcaagggggagaaagnagagaag

SEQ ID NO: 2704 - DNA, 1629 bp, Glycine max
  misc_feature (1)..(1): n is a, c, g, or t
  misc_feature (24)..(24): n is a, c, g, or t
  misc_feature (48)..(48): n is a, c, g, or t
  misc_feature (114)..(114): n is a, c, g, or t
  misc_feature (122)..(122): n is a, c, g, or t
  misc_feature (141)..(141): n is a, c, g, or t
  misc_feature (201)..(201): n is a, c, g, or t
  misc_feature (227)..(227): n is a, c, g, or t
  misc_feature (464)..(464): n is a, c, g, or t
  misc_feature (585)..(585): n is a, c, g, or t
  misc_feature (1147)..(1147): n is a, c, g, or t
  misc_feature (1239)..(1239): n is a, c, g, or t
  misc_feature (1375)..(1375): n is a, c, g, or t
  misc_feature (1428)..(1428): n is a, c, g, or t
  misc_feature (1500)..(1500): n is a, c, g, or t
  misc_feature (1513)..(1513): n is a, c, g, or t
  misc_feature (1555)..(1558): n is a, c, g, or t
  misc_feature (1575)..(1575): n is a, c, g, or t
  misc_feature (1596)..(1596): n is a, c, g, or t
  misc_feature (1601)..(1601): n is a, c, g, or t
  Peptide Sequence Number=SeqID_6330
  Probeset Number=SeqID_12483
ncggacaggaattctccgtcatgngtgcacgagcggtgtgaacatatntatgtcatatccttgtccatcctattcacaactcacccatacacataagtatacccaatataatangattcaanaaaagagtttagaacgcanagctactcgtatcaacaagtccgtgccgtaggtttctatttgatgtattcatcgtagctncgtatatgagtgtttgaggagtgcanattcgcgtgctacgtagtgttcggcagttctcaggagatcggtctctccgctacattcctatgtggtgtcaagagcacgactatcaacacatcagtggatgcgcgacgtgatgctgcgatattatctgtatgtatcgagttacgtgtgtcgtctattgtggtcgtatgttccatactcacgtacgagttgtgtcgtttatatgagtgagtaagaccagtctggcaccgtgctgtccnacgctcgcgatgtgtctcgcgtctcctagtggatgtgtgtgtgtacgtgatgcgatatataatcatatagtttacgtgagataagataaacgaatgctgtaattcgataggtagtatgcgngcgctggcaattgcgttgtcggggtccgtgcgtagtcattacattagtacagcgcaccgactgatgcattattcaattaaagtcctgtgttatattcgtatctagattgacatcacatgtatatatcaatcctatatcagatgctactcacatcacactactacagtacggtcgtccatgcagctttcacctctcattggcatccctcagtttgcatcggagcacggtaatcgttgttgctgtgttcaaacttctagtccgaccgccgcgcttctaccgcggtgggtggtggcgatccctacaatcgcatcgacgcgcaccatgcgctggcgtggaaataacacgtgtgtctcattccaaggcatatctaatgttgcgttcatatatatattaataataagcactctcatgattacgtagaacaccactctcccacacccgcaaacatacactatcgtccgcggtgtgtggtaacccaccatatcctcgccacgatgtggagatgtcagtattagtggtgtattttgtgtttccgacgtgctgatccagtgaaagaatcacncgcataataagttagtagattaaggagataaaatattttataatgttcgaaagtgcgattatgttattctaactatattaagtgtattatgngtgttatctgtccgcgcactggcgggggtgcggcggcgcggacgcgtcgtaggcctgcgctttgttagagaacagaaatgataatgaaagatagaataatagtacgagtggacagtagacgccctacgaacaaccncagttcggctgcgtgcgcgatatggtgctgctcgtgctgacacagagggaaanacggcggagagaaaaggaggtgatggaatatcacaagtcacacgctgcagagcaaaagaccagaccaacccnatcagcaaacaanccacgccctccaccatatatatgttgtaagtactagaattcnnnntaggttttgttttgttntctgcccccctccactcactnacacnaaaaacaacaaaccaaaaaaaaaaaaaa

SEQ ID NO: 2705 - DNA, 432 bp, Glycine max
  misc_feature (418)..(418): n is a, c, g, or t
  misc_feature (422)..(426): n is a, c, g, or t
  misc_feature (429)..(429): n is a, c, g, or t
  misc_feature (431)..(432): n is a, c, g, or t
  Probeset Number=SeqID_12484
cctctcatcaccattttatgagcagaaaatttctagcaaccaaatttgacttctctcctttcttcaagcttcatcataatcatcgtaaacaccaaccgggtggagcagtgcaccatgatccttcagacacacagattgatccacgttatggcgttgagaagcgtcgcgtgccaactggtccaaacccattacaccattgatcatggattgattctcagttgaaccaaaaatgtttttcttttttttatctagatcacaaatatgctccactgaaagcaagcaatcatgttcaagcttgataaatggttagtaaggaaatgcttgataataacataacctgaatatttttttgttttgtttattaactttctttttctcccattttctcctttgtggtctatattggaaccaaaattcngaannnnnaanann

SEQ ID NO: 2706 - DNA, 560 bp, Glycine max
  Peptide Sequence Number=SeqID_6331
  Probeset Number=SeqID_12485
tcagctacgtaggcccccccccccactaatcccacccctggtttggtcggatctacttataacaaaacattcggtgaagtcactgaaatcggccctcaatctggacaaatcgctagagaagaaatgatctctaacactatctccactaataactatgttcccatgaacaatgttgtcaccgaaagaagagaagttttcactgaatcaatccctcaaagaagagaagtcattgctactgaaaccattcctgaaagaagagaagtctatactactgaaagaatccccgttcgtgaaagcattcctgctgatcacttgaacagagatatggccagtggaaccttccttcccgaacccgttatcactgaagaaagattgaatgttgatcgtatccccgttgctaccaccaacacttcaaatatcagccccgttcatgaaaacagacccaacattattgaaagaatcgaagataaaattgaaggccgtactcaccatatcagcaatgaaggacttgttcaacctaccatggaaacctcaaaccttccctccttgagtgaaagaat

SEQ ID NO: 2707 - DNA, 334 bp, Glycine max
  Probeset Number=SeqID_12486
ccgcgtgatcccgaacttcatgtgccagggcggcgacttcaccttcggaaacggcaccggatgcaagtcgatctactgcgccaagttcatctacaagaacttagagaataagcacactggtcccggcttcctctacgtggctaacgcctgtcccggaaccagcggatctcaattcttcatttgcacgacgaaaacggagtggctctacggaaagcacgtcgtgttcggacaggtcaccgatgggatggacgtcgtcaaagagatagacaaggtcggatccagctccggtaggaccgccaatcctgtcgtagtggccgactgtggtcaactctct

SEQ ID NO: 2708 - DNA, 1904 bp, Glycine max
  misc_feature (5)..(5): n is a, c, g, or t
  misc_feature (23)..(23): n is a, c, g, or t
  misc_feature (30)..(31): n is a, c, g, or t
  misc_feature (33)..(33): n is a, c, g, or t
  misc_feature (35)..(35): n is a, c, g, or t
  misc_feature (41)..(41): n is a, c, g, or t
  misc_feature (45)..(45): n is a, c, g, or t
  misc_feature (48)..(48): n is a, c, g, or t
  misc_feature (62)..(62): n is a, c, g, or t
  misc_feature (64)..(65): n is a, c, g, or t
  misc_feature (79)..(79): n is a, c, g, or t
  misc_feature (89)..(89): n is a, c, g, or t
  misc_feature (92)..(92): n is a, c, g, or t
  misc_feature (101)..(102): n is a, c, g, or t
  misc_feature (123)..(124): n is a, c, g, or t
  misc_feature (146)..(146): n is a, c, g, or t
  misc_feature (184)..(184): n is a, c, g, or t
  misc_feature (212)..(212): n is a, c, g, or t
  misc_feature (220)..(220): n is a, c, g, or t
  misc_feature (230)..(230): n is a, c, g, or t
  misc_feature (296)..(296): n is a, c, g, or t
  misc_feature (333)..(333): n is a, c, g, or t
  misc_feature (345)..(345): n is a, c, g, or t
  misc_feature (354)..(354): n is a, c, g, or t
  misc_feature (357)..(357): n is a, c, g, or t
  misc_feature (361)..(361): n is a, c, g, or t
  misc_feature (364)..(366): n is a, c, g, or t
  misc_feature (368)..(368): n is a, c, g, or t
  misc_feature (382)..(382): n is a, c, g, or t
  misc_feature (388)..(388): n is a, c, g, or t
  misc_feature (408)..(408): n is a, c, g, or t
  misc_feature (428)..(428): n is a, c, g, or t
  misc_feature (450)..(450): n is a, c, g, or t
  misc_feature (492)..(492): n is a, c, g, or t
  misc_feature (499)..(499): n is a, c, g, or t
  misc_feature (517)..(517): n is a, c, g, or t
  misc_feature (548)..(548): n is a, c, g, or t
  misc_feature (559)..(559): n is a, c, g, or t
  misc_feature (564)..(564): n is a, c, g, or t
  misc_feature (567)..(567): n is a, c, g, or t
  misc_feature (615)..(615): n is a, c, g, or t
  misc_feature (671)..(671): n is a, c, g, or t
  misc_feature (708)..(708): n is a, c, g, or t
  misc_feature (737)..(737): n is a, c, g, or t
  misc_feature (748)..(748): n is a, c, g, or t
  misc_feature (752)..(752): n is a, c, g, or t
  misc_feature (759)..(759): n is a, c, g, or t
  misc_feature (762)..(762): n is a, c, g, or t
  misc_feature (824)..(824): n is a, c, g, or t
  misc_feature (894)..(894): n is a, c, g, or t
  misc_feature (921)..(921): n is a, c, g, or t
  misc_feature (980)..(980): n is a, c, g, or t
  misc_feature (1036)..(1036): n is a, c, g, or t
  misc_feature (1059)..(1059): n is a, c, g, or t
  misc_feature (1073)..(1073): n is a, c, g, or t
  misc_feature (1075)..(1075): n is a, c, g, or t
  misc_feature (1215)..(1215): n is a, c, g, or t
  misc_feature (1256)..(1256): n is a, c, g, or t
  misc_feature (1282)..(1282): n is a, c, g, or t
  misc_feature (1436)..(1436): n is a, c, g, or t
  misc_feature (1580)..(1580): n is a, c, g, or t
  misc_feature (1595)..(1595): n is a, c, g, or t
  misc_feature (1619)..(1619): n is a, c, g, or t
  misc_feature (1649)..(1649): n is a, c, g, or t
  misc_feature (1669)..(1669): n is a, c, g, or t
  misc_feature (1682)..(1682): n is a, c, g, or t
  misc_feature (1701)..(1701): n is a, c, g, or t
  misc_feature (1717)..(1717): n is a, c, g, or t
  misc_feature (1765)..(1765): n is a, c, g, or t
  misc_feature (1805)..(1805): n is a, c, g, or t
  misc_feature (1829)..(1829): n is a, c, g, or t
  misc_feature (1831)..(1831): n is a, c, g, or t
  misc_feature (1834)..(1834): n is a, c, g, or t
  misc_feature (1860)..(1860): n is a, c, g, or t
  misc_feature (1875)..(1875): n is a, c, g, or t
  misc_feature (1904)..(1904): n is a, c, g, or t
  Peptide Sequence Number=SeqID_6332
  Probeset Number=SeqID_12487
ttttncccccaccaccaaccccncacaaannananacaacnccancancacacacacacccncnnacacaacaccaccncaccccgccncgnccccccccnnctgtcggcggagttactgatnngagcgatgctactccatgtctntgcgtattaggtggtgctgtacgcgctgcccagctgtngaagatatgaaggaagatagtcataccncccgccgnggccgggcgnaagggaggagagggagctgcgcgcggctcgcttctctcctctattatttctaaaatacagcaagancaacatacatagtagacacatacatcatgatgagccncatctgccgatnctcaccgcnacnacantcnnnangtaagagaagaacnacgctngagtagattctattatattntacaacaacaccacgcacanacggagcacgcagtcgccccancggacgagcgtcaggtctgctagcgtgtggcggtgtgcgtgnggcgtgntactgtctgcgctctgtncattcgtatattctatcgttcattccttcgncggcagctagngcgantcnccactcaccctaattactatgagctgcactatcactaacctgaccttntcccactaacctcactattatactactcatcttaacatatatcatgcatcattacnagtcacactacgaataccatcagatcagatatgaaangaccatgagagaagacaggagaagacganatgaagaagangtanaggaaanggnacagacgcagcacgcggagggcgcggaggcatggtgcggcgcgtgcattctgttctgctacntgctactgttcgctcgtgatgtgcagtataaacgatagtgaagcctatcacgatatgtccatatatacgnactattatgtagtatatcgctggtctncgtttgtagatgtgctcagctccgattcctcattcttcttcacatctatgcatcactantgtgtagtactatgcagctatggcagaccgcttccgtgtgtgtatagatgggaganatgtctactgatagatgtgatantagtgtatagatanangtgtgctgcttctgcgttgatcatgtctcgcgctcttactgagtgatattcaagctcgtcacgacacagttctctcagcactcagcctcgtcaatccaggctctatactcgtgcatcacgcatactctcgtctcgtggcnatgcttccgctgtcataacagtagatctctctaccgtctcncctcgctgctgctctgcctctccgtngtctgatcacattggctagtcacgcgcgagatgtgcatcatcgcacaccttgcatcgacggactgagcgtgagatatcatatgcgttatcatatatggatgatgagctcaagctgacgtgaagagttaagacacagatcatacaatatatatanagcaacgatctacggctagacggagtcgctgcgtacacacgctactactactctgtctatgatacagatgtactactgtcctcgcacgcgcatgtagtagcgtatatgctatagtgatatacatctacctactcatctaaggcncatacgtcagagtcnagacataagatcacacgttccctncacactactcacaacacggagagagcacanccacagaacataagcgcgtntcgcacgatgcgnaagaacgcgcagagcgcangcgcatactagcatanacgagtagaccactcagaacgcgcacgcgtcatacgtctcgtacggcntcgctcagtggctacgtcgatcgttgaacatataagtgangtctcgatgattgtatgtgctcgngncanttgacacgctcactatcatcatcatncgaccgatcatatanagtgcgtcctcatctcgacagacatatan

SEQ ID NO: 2709 - DNA, 700 bp, Glycine max
  misc_feature (601)..(700): n is a, c, g, or t
  Probeset Number=SeqID_12488
atgctggatgctccacctgcggtgggcggcctgctctaacatactagtggactcccccggtgctgcgaggtatattcggctaccaggtaggaacttggtctgctgggcatgattacatgtgtgatctgggctttgggattgatgtggtgtggcttagcatcccttcacagcatactcgtgctcatcaactggctcaaatgtcttgcactggcactacttcttttgacgagcatctgtgtgctgagctttgctctactttcgccagcacctctcttgcccttactatctgtcctttatggttactggtctggctacagtggcactcttgtgcttgttcattcgtcctcatcttttgggctaaattggattcaagtggaagggactgaagactacttttgaattctaaacctatggtctctgtttttactttttttttttctcttccttgtgtgcccccactgccccagtgccttgcaatctatgatgactctatgctacctttttccttcttactaggagaaatctatgtaatatcgccttcataatgttgtatattattattgttgtactaaaaaatcaaaaaaaaaaaaaaaaaaaaaannnnnnnnnnnnnnnnnnnnnnnnnnnnnnnnnnnnnnnnnnnnnnnnnnnnnnnnnnnnnnnnnnnnnnnnnnnnnnnnnnnnnnnnnnnnnnnnnnnn

SEQ ID NO: 2710 - DNA, 504 bp, Glycine max
  Peptide Sequence Number=SeqID_6333
  Probeset Number=SeqID_12489
ttctcagagagccgtaagtgtcaggactctagcatgtcagaaggacctcgataaatggcggcttgcagaaggcgacttccccacggggtgctctgttggctaaccctgctcagcctcccagggattttgtgttttagcgatctgatgtttgttaaagaacctcaagatgtaatagtttcacggaaagattcagtaattttagactgccagactaatggagaagctccaataacagtcacatggatgaagaatggaataaagatttctgagaatgaacggatatccacatttcacaatggatccttgtacatccgtgaggtagagggcaggaaaggcgagcaatctgatgaaggattttatcagtgtttggctttgaacaaatttggtgccattctaagtcaaagagctcatctttcattagcaagtaagttatttggtgtttggtttcaataggactgcctgtgttggattgttttcatgttcgtttgggcaattaagctccaa

SEQ ID NO: 2711 - DNA, 678 bp, Glycine max
  misc_feature (678)..(678): n is a, c, g, or t
  Peptide Sequence Number=SeqID_6334
  Probeset Number=SeqID_12490
aatataatcgattttgatttagtttaaaacctctagtctcttgtttctctttctcattctctgcctagcgtaacagaacttgtggtctgcttctaaatttgggggagaaaaagggaagagaagaatgggagaatgtaggccacttggtttcttgttggggctaccatttgcacttgtcgctctccttctatctcttgttggtgctgtcatctggatcattgggacgatactgagttgtttgtgcccatgttgcttctgtttcgctgcgttggctaacttcgccgtggatctcatcaaacttcctgtcaaagtcctccgttggtttacccactccatcccttgttaagaccagactccattacttctttaaaaaaaaaagtactcttaattttctttttctttactaaattaatttttgtcacgaaaattgttatttttttaatgtaatttttgggtaatattagaatgttaaatgttcttaagataaggcttactaggtgaccggttcgcaccctgtgcgggcataagaacatgaccggcccgcactctgtgttccctctcgatccgcacttcacgagagggaacacagtaacgttagtatgaagaggcatatattgtgtgtatgtataattgcaacgtcacaaaatattttgtgtgtttacgaagatactttcatcn

SEQ ID NO: 2712 - DNA, 2097 bp, Glycine max
  misc_feature (1)..(78): n is a, c, g, or t
  misc_feature (87)..(87): n is a, c, g, or t
  misc_feature (90)..(90): n is a, c, g, or t
  misc_feature (94)..(112): n is a, c, g, or t
  misc_feature (114)..(124): n is a, c, g, or t
  misc_feature (129)..(135): n is a, c, g, or t
  misc_feature (138)..(138): n is a, c, g, or t
  misc_feature (141)..(141): n is a, c, g, or t
  misc_feature (144)..(146): n is a, c, g, or t
  misc_feature (150)..(150): n is a, c, g, or t
  misc_feature (158)..(158): n is a, c, g, or t
  misc_feature (168)..(168): n is a, c, g, or t
  misc_feature (193)..(194): n is a, c, g, or t
  misc_feature (222)..(222): n is a, c, g, or t
  misc_feature (225)..(225): n is a, c, g, or t
  misc_feature (230)..(230): n is a, c, g, or t
  misc_feature (309)..(309): n is a, c, g, or t
  misc_feature (337)..(337): n is a, c, g, or t
  misc_feature (366)..(367): n is a, c, g, or t
  misc_feature (369)..(369): n is a, c, g, or t
  misc_feature (375)..(375): n is a, c, g, or t
  misc_feature (396)..(396): n is a, c, g, or t
  misc_feature (398)..(398): n is a, c, g, or t
  misc_feature (417)..(417): n is a, c, g, or t
  misc_feature (426)..(426): n is a, c, g, or t
  misc_feature (428)..(428): n is a, c, g, or t
  misc_feature (431)..(431): n is a, c, g, or t
  misc_feature (441)..(442): n is a, c, g, or t
  misc_feature (446)..(448): n is a, c, g, or t
  misc_feature (450)..(450): n is a, c, g, or t
  misc_feature (454)..(454): n is a, c, g, or t
  misc_feature (478)..(478): n is a, c, g, or t
  misc_feature (485)..(486): n is a, c, g, or t
  misc_feature (488)..(488): n is a, c, g, or t
  misc_feature (496)..(496): n is a, c, g, or t
  misc_feature (570)..(570): n is a, c, g, or t
  misc_feature (650)..(650): n is a, c, g, or t
  misc_feature (652)..(652): n is a, c, g, or t
  misc_feature (728)..(728): n is a, c, g, or t
  misc_feature (791)..(791): n is a, c, g, or t
  misc_feature (793)..(793): n is a, c, g, or t
  misc_feature (828)..(828): n is a, c, g, or t
  misc_feature (867)..(867): n is a, c, g, or t
  misc_feature (897)..(897): n is a, c, g, or t
  misc_feature (920)..(920): n is a, c, g, or t
  misc_feature (930)..(930): n is a, c, g, or t
  misc_feature (933)..(934): n is a, c, g, or t
  misc_feature (937)..(937): n is a, c, g, or t
  misc_feature (942)..(944): n is a, c, g, or t
  misc_feature (947)..(947): n is a, c, g, or t
  misc_feature (1135)..(1135): n is a, c, g, or t
  misc_feature (1137)..(1137): n is a, c, g, or t
  misc_feature (1162)..(1162): n is a, c, g, or t
  misc_feature (1268)..(1268): n is a, c, g, or t
  misc_feature (1383)..(1383): n is a, c, g, or t
  misc_feature (1385)..(1385): n is a, c, g, or t
  misc_feature (1393)..(1393): n is a, c, g, or t
  misc_feature (1414)..(1414): n is a, c, g, or t
  misc_feature (1447)..(1447): n is a, c, g, or t
  misc_feature (1451)..(1451): n is a, c, g, or t
  misc_feature (1460)..(1460): n is a, c, g, or t
  misc_feature (1495)..(1495): n is a, c, g, or t
  misc_feature (1527)..(1527): n is a, c, g, or t
  misc_feature (1556)..(1556): n is a, c, g, or t
  misc_feature (1593)..(1593): n is a, c, g, or t
  misc_feature (1690)..(1690): n is a, c, g, or t
  misc_feature (1709)..(1709): n is a, c, g, or t
  misc_feature (1727)..(1727): n is a, c, g, or t
  misc_feature (1743)..(1743): n is a, c, g, or t
  misc_feature (1893)..(1893): n is a, c, g, or t
  misc_feature (1948)..(1948): n is a, c, g, or t
  misc_feature (1950)..(1950): n is a, c, g, or t
  misc_feature (2030)..(2030): n is a, c, g, or t
  misc_feature (2032)..(2032): n is a, c, g, or t
  misc_feature (2051)..(2051): n is a, c, g, or t
  misc_feature (2078)..(2078): n is a, c, g, or t
  Probeset Number=SeqID_12491
nnnnnnnnnnnnnnnnnnnnnnnnnnnnnnnnnnnnnnnnnnnnnnnnnnnnnnnnnnnnnnnnnnnnnnnnnnnnnnttttatttnaantttnnnnnnnnnnnnnnnnnnnannnnnnnnnnnttgannnnnnnaanagnttnnngagnattaatanaatatgtggngcgacgacagatacacatcattagnncacgagagacaacggatggcgggcggtnagnacgtnctgtgactatggattcgtaactactcacacagcggcgtggcttggcgacacgagagcgcacagccgtaagatcgctggngactgggcctcgggcgtcatgtccgtangcggttctctgtctactctatctcttgtnntntgtgtngtgtgtcctttgagtgttttntncgtgtcgcgtgtgtgtctnctcgatgtnanggngagggcgatnnacannnanggcnacggtcgtacgaagcgtgtaagcntacaacnncnacatgcantcgcactaacgacactctgcttcgctatactctctaccatactcactgtcgtctcccgcctcactcacatgtantagctacgatagtcgcagagagatgagacgataatcattcaaagacggcgcgcgcagacgcgaccgcgaacgtacgtgcngngacatacgtagtcgctccgcgtccgcatgcaatatataggagtgtgtgagtcttgattctctctgtagatatgcgnagtctacacagagctcacgatcgggacgtagggcgcatagaccacgactgagaacctgcgcgngngaaaatagagatcgtataccacagacgccgcgcangcacggccgaggtcacgcgcacatctactatatatctcnatattcgatgtatgattgttataacgtatngcgagagagacggagggcgaganggcagcgctnganngcncgatnnncgncgcttacatcttgtgtgttcgcaattctaaacttatctcgctctctgctctcgccggcatctgcgcgtcattcgccgctcatatatctccgtctatattatatattatctttggtctcgtcgcttgctctggtcgtatgtgtattctactatctatactcttctttatctatattattactcgtgacngngctgcgatgagatagacagcccggntcactcatcgtgctagagcgtcggcttcgagcgtcggttctgtgtgatgctcttcgatatcatcgactcactatcggtatcgtctcatgtagtgcggttgttactngtgcgcctatgtatcgtacattcacacgacgactatcacaacataataagcacaacgctctacgtcgcggcacgacgcgcgcgtctctcgccgcgtaatatgcatgctcgtctcncncgtgtacnctcgattatggagctatttgntgccatcgcgtcattgatatcgaatcgcagatnggangtgaactgnttatgatgacagtgcgctgcgtcgtgtgtggatcntcatcatcgctgcatgcgctcacgctcgtagntgcggcactaccgctgtcgtctatcgagntggcgtctgctctactcgctgttatatctatctaacnagtctgacgcaggtcgaagatgcaacgcatctcaatactacgaagatcgtcttatctgctgttcataataactggtgtcgctgcctgtgcggatgcncgcgtatgagttcgcgctncttctgtcactcttggangccgactactcaatantgctgcgtggccgtggggtggcgcatggcggctctgctgtgtgctctctatacatgtgctgcgcagctgcgacacgcgctgcggcgcaccgactgacggcaggcaaatcgatctctcactactcggtctcgtcattctactcggtattgntcgatgatgcattagtgagtgcgatgatcgagcagtcgtgagatagattatgctnanatcatctgtcgatgttatcgccacactctatgcgtgctcagttgatgcgtctaggtatggtcgcacatacgctcgcactncncgacgatgacgcgctgttnctcgctgcgcgcgccgacagactgcangtcagatgagcgtgtacgg

SEQ ID NO: 2713 - DNA, 1385 bp, Glycine max
  misc_feature (1)..(1): n is a, c, g, or t
  misc_feature (153)..(153): n is a, c, g, or t
  misc_feature (506)..(506): n is a, c, g, or t
  misc_feature (690)..(690): n is a, c, g, or t
  misc_feature (942)..(942): n is a, c, g, or t
  misc_feature (1090)..(1090): n is a, c, g, or t
  misc_feature (1149)..(1149): n is a, c, g, or t
  misc_feature (1202)..(1202): n is a, c, g, or t
  misc_feature (1204)..(1204): n is a, c, g, or t
  misc_feature (1209)..(1209): n is a, c, g, or t
  misc_feature (1212)..(1214): n is a, c, g, or t
  misc_feature (1217)..(1217): n is a, c, g, or t
  misc_feature (1219)..(1219): n is a, c, g, or t
  misc_feature (1256)..(1262): n is a, c, g, or t
  misc_feature (1271)..(1271): n is a, c, g, or t
  misc_feature (1274)..(1274): n is a, c, g, or t
  misc_feature (1363)..(1364): n is a, c, g, or t
  Peptide Sequence Number=SeqID_6335
  Probeset Number=SeqID_12492
naactatataatgtagttgcgcggggataaacggcgtgggcgtatcgtgagtgtggtgtgtgcatctagctacagtgtcgcgcagtgaaccgatcggctatagactagcacaacaatatagtgtgtgtgcgccatcatcctcactagctcacntcctaagtctcttcatcttacaacgcgctaacaccacgagcgaccatggccgaaatcgttatagacacaagagctcacacatgagagatgacgccgtctcaataggaaagagactgtatgaaacgcgcgtctacaagaaactatgaatcaacaacctcataacaggatcccatgagatgctacggcctggagtattgatcactgcacgagcgagtagatcttccctcaggtacttgtgtcatatccccaaataccacacaaccggtcgcatcacatgagatcgtccatgccaggacttgtcagtcatcgtataggagatcgcataattaaaatctaatgtttaatactaatanaccacatattaaacatctctaacaatacgtctagtgaatacagcttgtgtcagcgcgagtggtctgtgaagataagtatattttcagataaactacatactaacgtcaacgaatagcttagacatatgttcaaatacatgcgccgtgtcacccaaccgatcacatgcgtcaccccacgctaacngatgactacgtatcgtcttcccatacaacggcaaaatgtcatatggtatattacaaaacatccacgctcgcatttctgtgacatccccatcgctacttcacgatatctcacaaataacacacactgtaactaacacagggagtatgcaatgaatctcagttattcatacgctgcatctatacacccgtcctaatacttcccacatacacaaccgacacccaatgcgattcataacctatgcttatccattcncaccgaagattcaaggccgcgagctatatatacactcctcattttaaaccgagtcaactacacagacacataatgctcctactctacacaccaggtcgcacggaagaactgatcggaactacaccgtgccagtcactgcaatgacaancacgcaaaaatgcgtactacaactatcaccaactatccatgaaaccccaaagtatcttntccctatacaataagagagactgaggggagaggcgggacccatcagccgtcangngcganatnnngangngtaatagagaggcgtgtcatggcactcactcgaaccnnnnnnnatctccatnttngcccacaaccccaccccaccacacaaaataatagagcgttggggcgagcgaaagaaaagcggcaaaaaggcgcacggagaaaacacccnnacccaacgaccgcaccccgaa

SEQ ID NO: 2714 - DNA, 424 bp, Glycine max
  misc_feature (109)..(109): n is a, c, g, or t
  Probeset Number=SeqID_12493
tttgttgcttcttttccttgtgggggttacagttgcacgcatggaactaagcttcttcaaaagttttcagttgtcaagttataatgattatgagtattcaaaaccaagntgtgatctttgcatgtgcccccgctcaatgcctcctcaatgcaggtgtggagatattaggctgaattcatgccttttttattgtaagacctgtatgtgtcacgctctcacccaggacagtgtcgttgttttgacaccaacttttttttatacaaaccttgccagtccagatatgtttttataatagtgatagctctttcaaatggacaaagcccctttaggctttgtcccttatgttaggggagcctaatttttcttttttattaaagctcagtggccagtaaattgcttttagcaaatttggtccttttttttt

SEQ ID NO: 2715 - DNA, 1420 bp, Glycine max
  misc_feature (27)..(27): n is a, c, g, or t
  misc_feature (233)..(234): n is a, c, g, or t
  misc_feature (572)..(572): n is a, c, g, or t
  misc_feature (599)..(599): n is a, c, g, or t
  misc_feature (1069)..(1069): n is a, c, g, or t
  misc_feature (1133)..(1133): n is a, c, g, or t
  misc_feature (1309)..(1309): n is a, c, g, or t
  misc_feature (1418)..(1418): n is a, c, g, or t
  Peptide Sequence Number=SeqID_6336
  Probeset Number=SeqID_12494
gctgttcttgtcatttgttactttctntctaatacatatggaggagcggcatggagtgggtcggtgggtgggtttcgtgtagaacttcctctctctaagattgatgaatagtaatttctttcataacattgagtatgtctccatacacgctctgagtgtctcatccagagctgttactatagcataactatcattatatgatatgagactagctgtatagtattattaatagnnttcatgattattcacttagctaacagatcaatcgcagtgaccatatatgttatataatgagggtaactatgcgacctcgcggaggtagccacgatggataagtctcgacgggtgatttcggcaggtgagtgcgcacgatggtatacagacccaacctaccctacacacgttatggcgtaatggtcataaaacaacaatgcgtacaccacgcacgagagatgatattacgtgacagaatgttcgcaacaacgtgatacataatcctatgtagaatttcaccgcgacactaatgaggaataaccgagatagatgtatgtgcgacgatctgttgttgattngtgacttcagggcgcatgatttttcgnactaggtagtctgtcgacgtctattgttatgttatattgtagtccccacgacccccgccacttatgatggaagaaaatggtacataacgatagtcttacgagagcatcgtgaggcgttactagtctacaataaataattatcgggaccgcgagtagacactgatgaggttaggaggagacgtgaaaaattatcatcgtagcgaccgaccacgagtacatcagctaatgagtgagaccacatataacgttagtagttatcgacttcttatctttattgggtaaagtacgcggagcgatgagcgtaagtatcccaatcaatatagcgacttacaacccgatgcccgcgcacgcatcgatgatattttatggaagttaaatcggaagttgagtagtcgggcgtcgcgcattatactctcaatggtttattagtatgtcatatacgtgtggtctcagcgaggtgagctgacatngatgactatcgaagcgaaacgccctgcaaagcgacgctttgaactatttaggtgaagtacaccncgacgctcacaggacagacagcgagctatgcggagtgggacctcaggatgataccgattacgcgatttactgtctacgagtgtggcgcgtgcagatagtatttcgtgctcgtaagtcacaggagtatattactgtatactttatctgttgcaacaagaatgacatactcatgattntatagtctggtgtctgatcttctcacttacatcttcctctgtgtcgcattcgctgcggtctgcctccgtcatcggcatagagtatggacatcgaaccgtatacagcgtncg

SEQ ID NO: 2716 - DNA, 522 bp, Glycine max
  Probeset Number=SeqID_12495
aatacagctttaattcgtttcgtgggagggacggataattaaaactagaaatcagtggcggggcgactgtatttttccgcggcgggacaaaaaaaacagaacctctaaaagacccataaatttgttttgtacgcagtacaaaaacactgacgtaacaattggttcagccaataattctatgatcgcatgacaaaccgaatgcttgtgagctaggcggacacgaggaagagatgagtaggatcgacgaaacgtccctagagcgacaagagagtgtcgaggtagagtgtgggtgggggcaagcgttcggaaaacgttcgggttggattccctctcccgagtacggttctctgtatgctcttgtcccagttcgtgggtcgacgcacattgttactggccgctaatttttcagcaaagaagtgcagtgaaagacgtcgttataaagaggatgatgaccctggattcgggccggcgccgggataaactggttgaccccgcctctttttacaatttccaagtgaatat

SEQ ID NO: 2717 - DNA, 1608 bp, Glycine max
  misc_feature (1108)..(1108): n is a, c, g, or t
  misc_feature (1167)..(1167): n is a, c, g, or t
  misc_feature (1254)..(1254): n is a, c, g, or t
  misc_feature (1291)..(1291): n is a, c, g, or t
  misc_feature (1308)..(1308): n is a, c, g, or t
  misc_feature (1379)..(1379): n is a, c, g, or t
  misc_feature (1441)..(1441): n is a, c, g, or t
  misc_feature (1455)..(1455): n is a, c, g, or t
  misc_feature (1571)..(1571): n is a, c, g, or t
  Peptide Sequence Number=SeqID_6337
  Probeset Number=SeqID_12496
tgaacagacctctatcactcctgtcgctcattctcagaaactagagtctccgctgcgcattgggcgcgcctgtctagagtagtcacactttctacttcaccgtcttgcggcggcgcggtgatcttcactactttaaccgaccattcgacacactgcctacctagcggctcctcagtgacctacaaaatgactgactatatactttaggcgcgtctaccttatcgcgccccgcgtaagtacacctgacagtctatattcctatacaagcggcgtgattaatagaccccttgttgaccgcgtaccctccacactcccctcggatcctcactcgtccagcgatttgcgacggcatgtatctgatagagataccagaacccctctctatccctaagtatgcattacacgatctctgcgcgccattagtacgtccgttcttctgcatgcttgatactgcacggatgcgcctccggtgctaggagtgacggaagatatagacatacacccaactcataatacggccctattgtcggataggcaagctgcgcacctctgccacggtcatttccagtgagcacttgtgacctgattcgcgtccagattgctctataacatgctttctactactgctcagatcgtgcgacagtggagagtaatctggtctcataccatgtactagtggactacaatgactatagagtcatttccatcacctaagcgtgacgttctagcctcgcccagcatcagggccctaccggacataatcccacgtagaaagagacacacagtgtgagagctctgtctgtagcgaatctagtgtcgtatcgagctataatccatatctgatgcctataattctacactctcccgctagtacactccccaagcagatatctttagacgttcgcacgagatcgctatctgttgtggatactcaactgtattatatagatagaatagctgcggccgcatctcagaatatactatcatcacccatatcacggtgtagggtcttccgccgtactcgagcgacgaaagagggagtcgacatcgtcggacgatagcactcaatgcgattaagagaatcgctacgaaagccgatgctacgcgngagcacgacaacaatgctcacaataaggtttgcgcatacgtactggtcgccaataatgnatcccctacgcaatataccggtacaattcgaatagcagatatcaatcgccgatcacctacacacacgtgctaatgttctctctaccncactcgctatgtgctccgaaacgatagactatacacntcctccacttgtgtganacgatattgaccgtgccacgccgcgatacaatagaggacgtgtacgttacgcagcagacgtcttgaattangtaatgtaccgcgtgcttcatccatcgatcatgttcttcatagatagtgtaacattgccgcntgacgtacgtctcntcgtcgacgagacagcatatcgcacgcacacggtagacacatatatcgcgtagctgtacctctcatctccacaacgctgatgactatgcactcgcaccgacgggtcgcgagatacntctcaatgatctgtctactaactctatgagacacgcg

SEQ ID NO: 2718 - DNA, 602 bp, Glycine max
  misc_feature (1)..(1): n is a, c, g, or t
  misc_feature (602)..(602): n is a, c, g, or t
  Probeset Number=SeqID_12497
nacggagggtttctattgggccatcagccctctccctcgctgagtacccaatcatttcatacggagtaacactacggccaggtctgccgatccgcgccatcattcaagggccctcgccaatctccggcatctggaatacgtcattcggcgccctccaagcggcgaacattgctgagtctctgccggcgaatcccaactgcggcccacccagtgggttaatcgcgaacgtcttgccctactacccggcgagcaacatcactctgatcaccgtcggaaacgagattttgaccttagccgaccagggtcttaagtcgcagctcgtcccggcgatgcgaaatgtccaaaatgccctcggcgcggcctcgctcggcggcaagatcaaggtctccacagtgcactcgatggccgtgttgactcagtcggacccgccctcgtccgggttgttcaacccggcgctgcaagacacgctcaaacagctgctggcgctactcaaggacaacaaatcgccgttcacgatcaacccgtacccgtttttcgcttaccagagcgacccgagacctgaaacgctggcgttttgcctcttccagcccaactctggccgn

SEQ ID NO: 2719 - DNA, 1404 bp, Glycine max
  misc_feature (11)..(11): n is a, c, g, or t
  misc_feature (83)..(83): n is a, c, g, or t
  misc_feature (100)..(100): n is a, c, g, or t
  misc_feature (145)..(145): n is a, c, g, or t
  misc_feature (251)..(251): n is a, c, g, or t
  misc_feature (296)..(296): n is a, c, g, or t
  misc_feature (314)..(314): n is a, c, g, or t
  misc_feature (331)..(331): n is a, c, g, or t
  misc_feature (420)..(420): n is a, c, g, or t
  misc_feature (485)..(485): n is a, c, g, or t
  misc_feature (498)..(498): n is a, c, g, or t
  misc_feature (500)..(501): n is a, c, g, or t
  misc_feature (528)..(528): n is a, c, g, or t
  misc_feature (768)..(768): n is a, c, g, or t
  misc_feature (1267)..(1267): n is a, c, g, or t
  misc_feature (1288)..(1289): n is a, c, g, or t
  misc_feature (1356)..(1356): n is a, c, g, or t
  misc_feature (1370)..(1373): n is a, c, g, or t
  misc_feature (1386)..(1386): n is a, c, g, or t
  Peptide Sequence Number=SeqID_6338
  Probeset Number=SeqID_12498
cgcgatagcgnccgagcacgcgcataagacgtgagttgacgtcaacgcaggacatgatatcgtcgtagtcatgcatgaagaancgcatatggtctgatcngtcgatgctgatttgataagacaggcggatgttatagaagtactntccacactgtctcgtctgagacgcagtgaggatcgatgttatcgtagatgcgatcactctacagtgctgtttcgaggatgcgagctgacacgcgcgcatgaagatnagagcgcgacctagatccgctcgtgtagttagtctcatgtgtgtngcttttcgaccacgtatntactcgtacatctctcnatggatcgcgtctcatgcgtgctctatcacatagctcatatacagagacagagcgagcgctacgagtgtgatgatgggagagcacgctnatacagagactcgacacgagtagcggtgatgtttaatacgtacgctgactatgtatagagatagnttcgtggcatggnannttcagtatgtgtattctcatctcgtangcatctctctctctgagatcggtacagtcgcgcgtctgagtagctagctcatatgtggatagagtgcaggcagctagcagacgtagtacgtatatgacgagatgtatacacgagctaactagtcgaatatcatcggatctgcactaacagaccagatgcgatcacgagatatgagtagagtatgggacgaggacggcgtaacaggcgcgagcgacaacgacgcgctgcgccacgccaagncgtgcagtagtaccgataataatctcaaagcaaactgatcttatatcaacaccatcacatagtgacagtcggctgtgctcgtgtgtatttcttctacgctcagtcatagctgctttcgtaactcgagccagaggcagagggctgggcaggtcggtggagtccgcacgcgtaaaacgatgccatcggagtcgtggcgaggatgagtgagaatgcggcaggagtagatatgaatatgaaggcggatcgtcgcgctagtgtcagacagagacggtagcgtgagaccgtctgcgtcgcgcggactggtcctgttacacaggtggagcgtgaagaatgcgaggtgcagctgtggcttgagcgcgggacgactatagatgttctgatgtgattgttctatcgctgctggtgtaggttgtgtcctgtacatctcaccgatgacaacaagcatcacgtgccggcggcatcctatcgcgccgtctctacgttggaaaaaacattatantgattacatcaaaatatttanntgcacacatatgttcctctctctgtgtatgttcactttctgttgttatatgagttgtgtcgtgccanccgccactttcgcnnnnaggaggagtgagnggcgaaaaaaaaaaaaac

SEQ ID NO: 2720 - DNA, 1027 bp, Glycine max
  misc_feature (1015)..(1027): n is a, c, g, or t
  Probeset Number=SeqID_12499
gttccgggcccccccttcaatcagctacgtaggcccccccccccccccaattcttttaaacaacaaacaacaacaacaactatttctcttactacaacaatgtatcaacaaccttcaacctacactaaccaagttccccccaccaccttcaacaatgccaacactaaccctttgactggtggcttcaacaacgccaacgttgaccccttgagaaacaacctcaacaacgccaaccaattgggtggcttcaacaatgctaatgttgatcccatgagaaacaacctccacaacgccaaccccatgactggtggcttcaacaacgctggtgttgatcccttgagaaacaactacaacaacactactaaccccatgactggtggtttcaacaatgccggcccaatgactgatggactcagaaaccaaactgctcctgaaactggtatccccatccgcaagaagcttggttatggcttcggaaccgtcaccttcagaccccttgaagcaagaatgaacaaggacaccgaccttattggtaagatggatccttactgcaagttcaagattggtcttcacatcggaaagagctctgttgccaaggctcaaggcaagaaccccgtctggaatgatgccattaccatcaaatcaaagggagaagaattcgccaccatcaagctcaaggataaggatagacttaccttcaacgatagagtcggaaaggcaaagattcctttgaacaatgtttacaatggtgaaagagttcaataatggattcctttgcacaagggagataagatgactggtgaagttttggtcgaaatgcaattcgttcctaatgtctaaagaatatagtcttatgagtatgatcgaatacgttttgatcattatttgttttgtaaataatgcaataaagtctatattataaagtatgataaccgtaagatattcaaagtcttgaatccgccccccccgctcattctggtggggtgcggccccggcccctcctttggggcgggannnnnnnnnnnnn

SEQ ID NO: 2721 - DNA, 1263 bp, Glycine max
  misc_feature (1263)..(1263): n is a, c, g, or t
  Peptide Sequence Number=SeqID_6339
  Probeset Number=SeqID_12500
ggtccccattgccctctccctcatatttctcattgccatgtatgtgtggcattatggcacattaaagaagtatgagtttgatgttcataacaaggttccaatcaactggctcctcagtttaggcccctctctaggcattgtcagggtcaagggaattggcctcatacacaccgagctcgtatctgggatcccagctattttctcccactttgttaccaatctccctgccttccaccaagttgttatcttcctttgcattaaatcagtccaagtgccacatgttagacctgaagaaaggttcttggtgggaagagttggcccaaaggagtatagactttaccggtgcatagcgcggtatggctaccatgacattcacaaggatgacattgagtttgagagggatcttatttgcagcatagctgaattcatcagatcagatgcatctgaatatggcttaggatttgggagctttgaagaagatacaaagatgacagttgtggggacttcagcatcaaacttagagggctcaataaggatgactgaagatgatgatcaagtagattctcaaatggaaggcccttcagagttgatggaggttaagtcttctcctgagaaagtgaggaagagagtgaggtttgttgtgccagacagtccacagattgatttggatgcaagagaggagttgcttgagctaatggaagcaaaagaggctggaatggcattcatattgagtcactcgtatgttagagcaaaaagtggatcaagctggttgaaaaaagtagttatcaattatggatatgatttcttaaggagaaactctagaggaccatcatatgctttaagtatacctcatgcgtctaccttagaggtgggtatgatctatcatgtatgaatgagttttggctatagtactagtagttatatatctagtttagttttgtatctagtgagattatatggtaggtcaaccttacacatgataaatggtggcattgtgtatagtgacactctccatgtccaagcttcttgataagtgttgctgatttgtagtatttgtaacatcccctttttttttaaaataaataaaaaatattttatttaaaaattaatagagtttttagaaactaaataaataagagaaaaatgtttttgttaattaaaataagggtttcacagtattagaaaataaatagagtaaaatgatgttttagaaaataaatggatgcttaaatgaaagagtaaaatagaactctctttttatgn

SEQ ID NO: 2722 - DNA, 1699 bp, Glycine max
  misc_feature (1)..(1): n is a, c, g, or t
  misc_feature (114)..(114): n is a, c, g, or t
  misc_feature (230)..(230): n is a, c, g, or t
  misc_feature (259)..(259): n is a, c, g, or t
  misc_feature (358)..(358): n is a, c, g, or t
  misc_feature (434)..(435): n is a, c, g, or t
  misc_feature (494)..(494): n is a, c, g, or t
  misc_feature (521)..(521): n is a, c, g, or t
  misc_feature (530)..(530): n is a, c, g, or t
  misc_feature (598)..(598): n is a, c, g, or t
  misc_feature (604)..(604): n is a, c, g, or t
  misc_feature (627)..(627): n is a, c, g, or t
  misc_feature (858)..(858): n is a, c, g, or t
  misc_feature (1005)..(1005): n is a, c, g, or t
  misc_feature (1033)..(1033): n is a, c, g, or t
  misc_feature (1417)..(1417): n is a, c, g, or t
  Peptide Sequence Number=SeqID_6340
  Probeset Number=SeqID_12501
natatagtatatatactcttacgcgtctaaggccgcaatattctgtccattacatccacatctcttctcttctttaagtcatcattagacactcgagtagacttaccatctcangacgcatgccgcgcgcattgctattatcatacaatttctaatctatacatacaatacatatcgtaatcacagtgatataatacagctccatctgtctctctcataatacactcttnctatcagccacattctgcctctctatgcntctccgcgagtgcagattctatgcaacatagatacagagatcacatacatatgagaatgacgcgagagtcaccactcgtacacgtcgaacgaacaacgntacgcgcacgcaaatctatgactaacattcgtctgatactcccgatacaacatcggaccgcggcctacgagtgggnntcatgcgtctgactcatatcacagtgtgtataattatagattgtttcactattgcattnacactcactctctctcgattcttatanatgattatngtgcatcaccgcactgccgtacgcctccgtaccgcgcgcgcacctcatgtttccttggcctgtgcgtntctgtnctgtaggtagctctaaatcatanatcatcgcacacataccaccacctctacctactatccatcagtatctcgttctctctactagtctctcgccatcgccgatcttctacacctagcagtacctgcgcaccttcatctcactacataagctgagtaccagcgctcaaccaacgtaacataactataggccgtcagctatccgcgcaccagccagcaccagcatagaccttgagtgacccggtctgccgtcacgncctcgtatgtgcgatgtttatcgagacaatcacgtcacaacatctctgtccatacctagctgccatattcgatctctactcattattcatctacactccctatcttcgcgctatcatatttctatctctaatcgtacgcctatcacntcgacctcctattcctctcacgcaacantaaccccgactaacatcttgtactcactatacgttatcagcgaagactatcattactcttagtcatgcctccatatcctgtctccttctttctactctcttcctcgtctcgtacaccttctccgtcccgtcccttcgccccgctgcttctcccgtccgctctgtatcgctcgctcacactcatccgccttgacatatcaaacaaagctaggcacgcataacaaggaaagtgggtaatataagagtgagttcagacaacgatgacgatatccgatggtaggcagactgagatccatgagccggacctcatcttccattcctattgtataaactccgacttcctcccctcttcctccagcgaaccggagcgtgcactgaacgtagnctataacaatagcagaggagaaccagaacaccccgcacagctcgccagccccccacgtcacgcgagcgtctatatacacagagatacggtctgcccctcgcgttacgtgccaagcctcgcctcgcggggggatgcgcttcttattgtttggagagacttccttctctttacctccccgctcttactctctcacccctctcacttcgagaaaaaagagagagagaaaggagagaagacgctctccgagcgcggcgttgctcttctgccgctctgtcacgtgct

SEQ ID NO: 2723 - DNA, 1363 bp, Glycine max
  misc_feature (25)..(25): n is a, c, g, or t
  misc_feature (256)..(256): n is a, c, g, or t
  misc_feature (558)..(558): n is a, c, g, or t
  misc_feature (587)..(587): n is a, c, g, or t
  misc_feature (616)..(616): n is a, c, g, or t
  misc_feature (1173)..(1173): n is a, c, g, or t
  misc_feature (1268)..(1268): n is a, c, g, or t
  misc_feature (1287)..(1287): n is a, c, g, or t
  misc_feature (1296)..(1296): n is a, c, g, or t
  misc_feature (1300)..(1300): n is a, c, g, or t
  misc_feature (1342)..(1342): n is a, c, g, or t
  Probeset Number=SeqID_12502
taatatataaacatagcttcttttncttctttcacattctctcgcgaccagggcgcgaccctactcttcctcccgccaccaagaagaatgtgatgtgaaaaacagtcacgctcacactctataacacgtatgaacgatggcgccccgcccccaggaccgcatgctagtgtaactctagatatcacggggctcatagtccttctcacacgacgtcatccctatgctcgccagtccaagggcatccataactccgctncgggagtgctttgttgtgttccctgcgcatctacgtgctatccacgccctaacggtctaggggagacttattctctgcggccatccagaggggtaaggaacagtaagcgcgcctgctgtctccttatcttcaacagacaaagaggattcgcaatagccgcaccacttggtcaacatggaggcgttttgtccacacaggggaatagaaacctcgcactggcctcgtccatttatgaactggttcgcaaccacgagaagaaatctccaactgttcattaacgcacagtgaattgaaacttcacntaggtatagggatcgcatgaagatccatntggcactcctcccctctcttacatggcgncgcaaggtcctccctgtgagactctcttgtgaagatggggtgttcgtcaatatgacgctcgcacatggagacactcacgtcaaatatgttccgtcacgacattggactgcattagatatttacatctaatattcagcatttataataaaccccacccttcccgctaggagaaaattgcgcatagcaacagcatcatggtgggtacatcatgaagaagagaagagagtaaaacaccccgcaccccccctctggtctaaaccgtgctgcgctgagtagactggcgtcgctgcactgtcgcgtgacatctctctataagtccacaggtgcggctaatatagaatgagcgacacagtagagtagcctcacgtctgtagactcctctcttctccatatctgcgttcgatcggagctatctacactatctctatatactacacacgccggtgacttccatatatgtgctctgaccgtacaggcgatgccgcacctcacctctcttactcactaagacatatatgagtattgagtattagcaagatgtatgctgcggacttatnccgctctccgacgggcgtctcgcatcatccgctcacacatcctctcctctgcgcgtgcatgctggcgggatctcgcacgtacctgttagctccancagcagatacgcagacgangactacagntctnatatagacacagccactatgagtcctgctgcaccgcgcgcgnacatcacgtcgactgcgcacg

SEQ ID NO: 2724 - DNA, 1449 bp, Glycine max
  misc_feature (37)..(37): n is a, c, g, or t
  misc_feature (70)..(70): n is a, c, g, or t
  misc_feature (84)..(84): n is a, c, g, or t
  misc_feature (254)..(254): n is a, c, g, or t
  misc_feature (349)..(349): n is a, c, g, or t
  misc_feature (405)..(405): n is a, c, g, or t
  misc_feature (432)..(432): n is a, c, g, or t
  misc_feature (439)..(439): n is a, c, g, or t
  misc_feature (590)..(590): n is a, c, g, or t
  misc_feature (729)..(729): n is a, c, g, or t
  misc_feature (900)..(900): n is a, c, g, or t
  misc_feature (990)..(990): n is a, c, g, or t
  misc_feature (992)..(992): n is a, c, g, or t
  misc_feature (1006)..(1006): n is a, c, g, or t
  misc_feature (1021)..(1021): n is a, c, g, or t
  misc_feature (1042)..(1042): n is a, c, g, or t
  misc_feature (1100)..(1100): n is a, c, g, or t
  misc_feature (1113)..(1113): n is a, c, g, or t
  misc_feature (1126)..(1126): n is a, c, g, or t
  misc_feature (1149)..(1149): n is a, c, g, or t
  misc_feature (1151)..(1151): n is a, c, g, or t
  misc_feature (1161)..(1161): n is a, c, g, or t
  misc_feature (1167)..(1167): n is a, c, g, or t
  misc_feature (1172)..(1172): n is a, c, g, or t
  misc_feature (1183)..(1183): n is a, c, g, or t
  misc_feature (1191)..(1191): n is a, c, g, or t
  misc_feature (1266)..(1266): n is a, c, g, or t
  misc_feature (1271)..(1271): n is a, c, g, or t
  misc_feature (1309)..(1311): n is a, c, g, or t
  misc_feature (1316)..(1316): n is a, c, g, or t
  misc_feature (1360)..(1360): n is a, c, g, or t
  misc_feature (1383)..(1383): n is a, c, g, or t
  misc_feature (1420)..(1420): n is a, c, g, or t
  misc_feature (1431)..(1431): n is a, c, g, or t
  misc_feature (1445)..(1445): n is a, c, g, or t
  misc_feature (1449)..(1449): n is a, c, g, or t
  Peptide Sequence Number=SeqID_6341
  Probeset Number=SeqID_12503
gggagtgacacacacagcgcgggtgtggcgctgctgnctctcctctctcatatatttatatagggagaanagaaaagatatagngagagtccagtgcccgctatgatcgcgcgcagctgctaataaattagagagaaatttcttactgagatatcgctaatcgttcttcggtatcatatcacacctctattatcagctaactttcgttgaggtcacataacatatatagaccgatagcatacgtgcttatactngcttactggagcttcacgcagttgaacgtacagtccgacctgtccacatctctcctctcggtctctcctgatattaatcatggtgtatatgtgantgtctacgttatcatctctcatgtgtataatgtatagatagtatatgaaagtacgnttgtgtgtactatagcttgtcggtatncgcagantctacgcgatcttgcactgtatgtattgaactcggtgtcacatcagaatcatcatctcattcactatgactttcctgaatgatctgagatgatccgctgagcagcataacatatagtattaaacgccagcgagtcagtaccggatatacancaagaatatatacaggtcgatagctctactacttcgtcatcgcggctctcgctcaattatagatatacaatgagttgagatgtgtctgatgtactaaagcctctcatagtcgtgtctcgtcatgtgtgtgagtgggatnacaacatcctacacctattatctataatatactatttcacacaccctcatctgttatgtcgccactctcttcgctcaccacaccacacagacgggcacgaatggaacacacatcacactctatagtcgcactgctgctctgcactctctctctctaccaaattagatcatngtcatacttacgcagacttgcaatgacacgtgataacaagtcagactatagtctacttcacacttggctgcctcgctagtacactacgantnatactacctgtatntaaacagcatagcanctacaacattgagcacgaatncggtgctacgtgatcaagtgcacgcacccgagctcgcacactactatacagtgatgcntgagggtgctganatcgctgctacantggatcattcgctagcaaatgcntncgtcgatagnagtganagtgntctgatatganaggtacantgtgtgcatcgtggcgtgacactcgcacagcccacatgctcactgcacatcgactgcacgatggcggataggggngtcgnactatatagatatcacatatgtgggatatgtgcctgtnnntgcancatctctgttaatatatatgacacacgatgacagctagaggaanacctggtagacacatcgttgctnacatcagccaaagacacactcacgggcatgacaggcntgacatgtcangatactatcgtggnacgn

SEQ ID NO: 2725 - DNA, 424 bp, Glycine max
  Peptide Sequence Number=SeqID_6342
  Probeset Number=SeqID_12504
cctacccgagctgctacaggctagcttcactcccgggactgagctgattcttattgccggactatttaaaggaaagagggtcctcttttacaatcagttcccttctgggttgctctttgtctctggatctttataaattaatggagttcctttgagacgtgtgaatcagtcctatgtcattggcacttccatcccaagctaaatgtcctctgcatgataattgtcgaacagtgctgatgacaaatactttacaaaggaagcccagacgacgattattggagagggcgaatactatgacgcagagaaggacgaaaagagtgtgttgccccatcagaagagagatgaccagtatactgatgactctgcgttgataaaagccatcgagagtgttccagactagactactcatgttggagccatgtat

SEQ ID NO: 2726 - DNA, 758 bp, Glycine max
  misc_feature (549)..(549): n is a, c, g, or t
  misc_feature (551)..(551): n is a, c, g, or t
  misc_feature (553)..(554): n is a, c, g, or t
  misc_feature (556)..(563): n is a, c, g, or t
  misc_feature (565)..(565): n is a, c, g, or t
  misc_feature (567)..(569): n is a, c, g, or t
  misc_feature (574)..(582): n is a, c, g, or t
  misc_feature (584)..(585): n is a, c, g, or t
  misc_feature (596)..(596): n is a, c, g, or t
  misc_feature (601)..(758): n is a, c, g, or t
  Peptide Sequence Number=SeqID_6343
  Probeset Number=SeqID_12505
aaggcattttcactgttccatgcatggaacattcttaagaatgagccaaagtgggcagaagacaagggatcgaaagtaggcaattcaaatggcgaagctcattcaaatgtggagagacctctaggaaggaaagctgaaaaggaaaaagccaaagggaaaaagcgtgttgacgatgaacctgatcctcttcttgaggaagttaaaaaaattagagaatcaagggaacaaaaccagaaggaaagaaaggaacgtgatgacaggattatagagcttgataaaaaaatagacttggagcaagatcaacatgacaagataataatgacaacagacgctagcacaatggatgaacaagcacaacagtactttaggttgctgaaagatgaaattttagttcgccggtttgggcggcaatcgtagcttttacgcgaagactttctagaaataaggcattgttatgcattttttactgcatactgtttagcatatttcattgtgtaagaacaatttcaatttgtgacagaaataaagtcttagtttgctgtgtgaaanananntnnnnnnnnantnnntggannnnnnnnntnnggatcctgcgnccggnnnnnnnnnnnnnnnnnnnnnnnnnnnnnnnnnnnnnnnnnnnnnnnnnnnnnnnnnnnnnnnnnnnnnnnnnnnnnnnnnnnnnnnnnnnnnnnnnnnnnnnnnnnnnnnnnnnnnnnnnnnnnnnnnnnnnnnnnnnnnnnnnnnnnnnnnnnnnn

SEQ ID NO: 2727 - DNA, 644 bp, Glycine max
  misc_feature (576)..(576): n is a, c, g, or t
  misc_feature (578)..(578): n is a, c, g, or t
  misc_feature (581)..(581): n is a, c, g, or t
  misc_feature (589)..(590): n is a, c, g, or t
  Probeset Number=SeqID_12506
ctcgagccgttcgagccgtaccaatcactacataaactcttcatacttcacaacacaacacatcacacacaacatcttcatttcaaggcctttttttttttttttttaataattactcatcgcttctgaaacaacgaatgatccatggccccttcattcgacacaagtactcatacggtatgcgtgatggatgctttgctccacttgcgctttatactgttacaaagactcctccaaaggggctacaccgatgatgcctccttttattgatctggagaataaaaccttctcactggactttgattttatcccccttagcttatggttcttacttctcccccttttgattaccatgcctaatcaaacctctcctacgaccttctggttagttatactaattctaaccttccttggtccatccaaattatgatgaatacatatgcgacgtggaagtatgggctgcgcacaacgtgctggaagcctgtcctcagacagaaaccttggataaaggggtcttcacttcctcagctaccccagctgtttggagagaagaatgcgcagaggaactcatttggnanacngtaggatnnctatgaacgagaagaaactattgggagtgatgttaatattctgtcgcaaattca

SEQ ID NO: 2728 - DNA, 653 bp, Glycine max
  misc_feature (601)..(653): n is a, c, g, or t
  Peptide Sequence Number=SeqID_6344
  Probeset Number=SeqID_12507
caactaatgttatgatcagttggaagcgttggcaagaaagaatacgtaatagtggtgttgtttgttcattttggtcaaagaaatagtatctgggtacccaggatattgtagttgtaagatgggttatctcaattcagttttgtcatcttcaagccaggttcatgttgcagatgatgcaattgtgagcggcgggggtctaagtcacaatggaaaattcagctacgggtatgctagctctcctggcaagagatcttcaatggaagatttttatgagacaagaattgatggtgttgaaggtgaaattgttggccttttcggagtttttgatggtatgtttataccttcctgtcttcttcatctccaggttgtacactgattggaaaacatgccaaaatattgcacgtagaactcatgctatgttactcctgttaatatgtattatatatattttttattatcaaactgcttcttttctggattttattcggccaaggactacggcgactaagactcgatgaacccgaagccgttaaccctccggcacgctgtgatccacgacgagcccttatggatcaccttccccagagacatcgtgatccannnnnnnnnnnnnnnnnnnnnnnnnnnnnnnnnnnnnnnnnnnnnnnnnnnnn

SEQ ID NO: 2729 - DNA, 1536 bp, Glycine max
  misc_feature (61)..(61): n is a, c, g, or t
  misc_feature (227)..(227): n is a, c, g, or t
  misc_feature (725)..(725): n is a, c, g, or t
  misc_feature (777)..(777): n is a, c, g, or t
  misc_feature (949)..(949): n is a, c, g, or t
  misc_feature (1027)..(1027): n is a, c, g, or t
  misc_feature (1070)..(1070): n is a, c, g, or t
  misc_feature (1153)..(1153): n is a, c, g, or t
  misc_feature (1160)..(1160): n is a, c, g, or t
  misc_feature (1182)..(1182): n is a, c, g, or t
  misc_feature (1298)..(1298): n is a, c, g, or t
  misc_feature (1302)..(1302): n is a, c, g, or t
  misc_feature (1312)..(1312): n is a, c, g, or t
  misc_feature (1314)..(1314): n is a, c, g, or t
  misc_feature (1342)..(1342): n is a, c, g, or t
  misc_feature (1408)..(1408): n is a, c, g, or t
  misc_feature (1416)..(1416): n is a, c, g, or t
  misc_feature (1436)..(1436): n is a, c, g, or t
  misc_feature (1479)..(1479): n is a, c, g, or t
  misc_feature (1485)..(1485): n is a, c, g, or t
  misc_feature (1536)..(1536): n is a, c, g, or t
  Peptide Sequence Number=SeqID_6345
  Probeset Number=SeqID_12508
ggcgggggcgcctgccgccgccgcgccgcgcgcgtgtcgggtgctctgcgtcgcgcatgcntctgcatcccatgcagattcttatcttttatcagccgattgtcgcaacgtgctacctaccccaccaaaaagaaacaatgcacctacctccacgataggaagttgatatgtcttggatgtcctgtgttataaataatctcgttcgctctcgtacagtctgcatgagnacctgacatagcatcatgtccagctacagaatatccgcactaaagacctactacagtatctctcccataactagtacactgacacaacccccttgattactccatacctcatcgtcactcatgcactcgtctctcttctactcctaacttataagtcactctgacgcatgtcatataccgctcctcttcatttcagccgagatctccgatattcctaacaatgcgcgaaacgttacctcgactatgactaatctgccacagacacgactactcacgtcactcagcagaagtacacatgaccatacccatactcgcatgccgtcgacacttagccctcgcacgaactatacattatcccatgactacgccacccctgcacaacgcgctccgcccccacgacgacatcattatcgcgttggaagtggccgtctggcgcctgcgcctctacattatagggccaggtatcgattgaggaagtatgacgcaacgccgcatttncctctacctattgagtctcctccacaccctcctcctcgctcggaagtgtaanatattgtcaccggtagagtatcaccgaccacacacacactcacatttgtgtctgcttgacacccacctctgcccattatatatgacctctgtatcacctctccgaccatatctacccacctctatacccacacccaccgtcatatttcgttaccactagttgtcgctccacnacacataccgacaccatcagtagacctctaataaataagttactactacgtacctttgcgtccgcaccgtccgcaccncaactgctcacatagcacacgactatcggcgctcgagatatgncccgaccaacactacgtctgtctgctgttaccacatactgccgcacaccaaccgcgcgcaaaacaccagcctcctctgtctanatctatngcaagactacgcatgtcatcanctgaacactcactatatactctagacactctacgcggcgatctactagacgcacacacgatcacgctccgatttactccgcgcagacggcgtctaataaagaacgcgacgatcgcncgcngttccacttncnataacatgtagatgtctgctcctagacngatgtcgatctcactgcacacactgatagaacacgtcttccttccactattatcacactgcgcgcnaagcgcangtacacgttcgatctacacncgaataccaaacttcactcccaacgtgtatcatagcactctcnacctgnaccacacaacaaagccaacgttcactggtagcaccttaatacctaactcan

SEQ ID NO: 2730 - DNA, 1374 bp, Glycine max
  misc_feature (10)..(10): n is a, c, g, or t
  misc_feature (74)..(74): n is a, c, g, or t
  misc_feature (92)..(92): n is a, c, g, or t
  misc_feature (96)..(102): n is a, c, g, or t
  misc_feature (477)..(477): n is a, c, g, or t
  misc_feature (1040)..(1040): n is a, c, g, or t
  Probeset Number=SeqID_12509
aatttttatntttttatttgtagttattagctgtatcaagattgaatctaaaaactaataatggaagatgctantttgttgatgaatcccanaaannnnnnncccccccccccccccaccctttaaaacgagctcttacacgttatgattggtatgctgtatcccatctattatatgtggaataatatcagttgggggggggggagtgagggtggagatggagaaagagaggccgccctcctagacgctggaacggaaatcttatagtagggtagtattgattaggaataggggagctgataggggaaattaacactaataaaaaatctataacaccacgaacataacaaaagaaaacacaaaacagagaaccaggcgctgttcacgcaacagtaagtatagtatcgaagaggaaggaagtgcttgtatgtttgtggaatgtacagtcaactcgtactatattatcaaaaacagaanctacctccacgcttgttgttctctcttggttgtttatgtttgttgtgtgtacgtcttttgagatgagtcgtcttctcccttcctttgctctcgtcttgtataacttatcacaatcgctcctaaccatcaactaagactacacctaaattatacacaccaaacaaagactggtcctagctccaatggtgcaagaatttgtgttgaggtagtcgctggaagagggtgactaatggtgattcgtcatccgctgattgtgtcacccagagaacatgtttcagcgtgctcagagatgcagtacatctatctaccgtatgggtgatgtgtttatcagggtggtggagtgatgagacttatagagagacaaaaagcccctctcactatgtgtctgtgtaacgttatactatctaacgtcaggaagcaggaacgatgatctgtgcagttgaatcttatgttactcagccggagtcaccatagatactatatgtggtggaccgataatttagatggtggagagtccatccatgccccgacacacacatcgatgaggagtatagtgtgcggtnggagagcgtggctcgtcgtgaccgagcgatgacctgttttagattcgtgtttatgatatgctgtacgagcactataggaccattgataagactgaatgacaggtaagagaaatatgaataaatatagtagttgttaatagagtagtgaggagacaatccgcagacacattactactatatagatcacatccttatcactctactctatgcatatattgtcacatattttcgctgtgtctgaacaaatttgctattctgctgcggagacacagtgatagttgattggagattctatcgatgactacgtgctagtagtgtatttatatgtgttgta

SEQ ID NO: 2731 - DNA, 520 bp, Glycine max
  Peptide Sequence Number=SeqID_6346
  Probeset Number=SeqID_12510
aaccactctatcccctacaaccccataataaactatgctcaagaaaaagagggaataaacaaatcctaacaagcggctgcttgtgaagccggtgaagaggcacatgacggggaagagcaagggattgagaattgcatgccaagccaccatcatttccgctgatagagttcctgacatgggcaaaagacagatcatgaatcttctccttcttggtgccatttcactccccactgctggaatgcttatgccctacacctactaaggtgtccctccaggttcatgttcttcagctggcggtcctgttgccaaagatgccgccggaaatgatgtgattgtcaagaattggcgtagggcgcatggacctggtgaccgaacccttacacaaggattgaagggagatcctacctatcttgttgtggataaagacagaacccttgcgacatttgcacttaatgccgtgtgcactcatgttggatgtgtcgggccatggaatcaagcggagagacagctcatctgccct

SEQ ID NO: 2732 - DNA, 2721 bp, Glycine max
  misc_feature (1)..(18): n is a, c, g, or t
  Peptide Sequence Number=SeqID_6347
  Probeset Number=SeqID_12511
nnnnnnnnnnnnnnnnnngcccccggctgattccaaacctttccctcagcaacggaatccaccaaactctcgcatcaatcttcgtttctttagagagagagagagagagagagagcgcggtgtcggaatcgtgttctccgattgcaccggtggttcgatttatggtcgtcggagaatcgccgatctcgctgagagtttcgaatcgcaccggtgaccggaggagatggtgaattccatggtggaacgcgccacgagcgacatgctcatagggcctgattgggccatgaacatcgagatctgcgacatgctcaatcatgaccctgggcaagcaaaggatgttgttaaaggtataaagaagcggattggaagtaaaaattcaaaagttcaacttcttgcactaactttgttggagacaatcataaagaactgtggagatattgttcacatgcatgttgcagaaagagatgtgcttcatgagatggtgaaaatagtaaagaaaaagcctgattttcatgtcaaagaaaagatactggttcttgtagatacttggcaagaagcttttggaggcccaagggcaagatatccacaatattatgctgcataccaggaactgttgcgtgctggggcagtattccctcagaggtccgaatcaatctgcacctgtgatcacacctacacaaacacagccattggcatcgtacccttaaaatatactcgacacaaatgttgactgggacaccccctgaagttgtaccgtcacatgcaaaggagttccatacactatctattggaaaaatgagagtgcctttttacaggaaattgcagagctgggcaatgccttagaccctagtaacaaagaagggattagacaggaggttattgattatttggtggagcagtgtcttatttacaagcagagagtggttcaccttgtcaactcaactttggatgaatcactgctatgccaaggactagccctgaatgatgatcttcagcgtgtactggctaagcacgaatctatttcttctggaatttctaccaaaaatgaaaatcacactgagaatttgaatccttcacttgcacctgctggagctcttgtagacattgatgctcctttggttgatactggagatactagcaaacaaactgatgggagatcctcttctaatgttgaagcagggtcccaaacattgaatcagttactacttcctgcacctccaacttctaatggttcaacaattcctgccaaggttgatcccaaatgggacctgctcagtggcgatgactataactcaccaaaagcggattcatcaaatgctcttgttcctctaggagaacaaccaactgccagtcctgtttctcagcagaatgcccttgttctttttgatatgttttctaatggaaataatgcacctacatctgtcaattcccagccaccccatccagctaatgttgctggccaaaccagtccatatgctccccaatttcaacaacagcaaacagtcacatctcaaggtggattttaccccaatggaaatgccccaaatgcaggttcacctcagcagtatgagcaatcattgtatacacaaaatacaggtcctgcctggaatggtcaggttgcccaacagcaacagcaacaaccaccttcacctgtttatggcacacaaagtggatcattgccaccacctccttgggaagctcaaccagcagcagataatggaagtccattagcgggcgctcagtatccacacatgcagaattctggacatcctatggggcctcaaacaatgggcaatgaccagtttgtttgtatgtatatgaagccatatggtaacagcaaattgtccaggatgtacaaccattgtaggagcaatcaaatgggcttgcaaaataaacatatgcaaggtgttacagagtcctacatgcttatgcttatataacatatctttcgtagttacatgctatacgtttttctgtaataaacttagcaaattccaccattttctcatggtctgggaggttttgctttaataactgcaacatccgttgatataattatcctcggatatttggctcgtgcgtttggtcgagatctgaactgaaaccgctgctccgatctgaggccatggctgggtctgggagttacatgccgtattcctttcttctcttcacagtcattttttcacttcaagaaatgtacttatggatactagcatcatcagtattactacacactactagaagcgtcccatagcttcactatgctcctttttctcgtactcttaacttgaattgttcaggaagaatgtgatttaactgctgataatcatgttattcatcagcatatatgaaccaaatccttgccaagagctctctcgtacggataatcttggaagtaatgaattatgtgaccaatgcctcaatcaactgtagtgtaacaattaagacaatggactgcacatcaagggttttcccattaatggacaagcactggagttttcttgtatactgggttgtattcaagaagttgaagactcttattgtagcggtcttcttctatgttttgatatggtatatcctttaactttaaggtccataccaccctcaaagtgtagggactataccaaaatccatgaagcttcacctctgcctataccaatatccaagaagttacacttcagcctcactgatatgatttgaatttagcaataaaaaaaaacc

SEQ ID NO: 2733 - DNA, 621 bp, Glycine max
  misc_feature (403)..(403): n is a, c, g, or t
  misc_feature (487)..(487): n is a, c, g, or t
  misc_feature (519)..(519): n is a, c, g, or t
  misc_feature (601)..(621): n is a, c, g, or t
  Peptide Sequence Number=SeqID_6348
  Probeset Number=SeqID_12512
tagacgcagccgcttcatttctcccaggtaaaggaaagattcgcccatggctccgtcgcagcccaagtctggcctcttcgtgggcatcaacaagggccacgtcgtcaccaagcgcgagctgccgccgcgcccgtccgaccgcaaggggaaaggtaccaagaggggtgcatttcgtcaggaacttgatccgggaggtcgctgggtttgctccgtatgacaagcgtatcactgaacttctccagggttggcaaggcaaccgcgcccctgaatgtggccaaaccaaaagtggggaccccacaagaagggtaaaaagaaaaaaaaagcaagtcccatgtctcccccaacaagaaatttcgtttgaccttcgaccccccaaaaagagaaaaaacggctttccccccgntcccgagagtagaaggggaagatttctctgcttcgggggccgcaccggctcttattggctcggggagcccctctcttttagatncacggcaaattggtttaaaccctcccggctcnacaaatatatacgcttctttttaaaaaaccccccgaccgttttgcgcggatgctctgtgggcgcacactctaacaatagttnnnnnnnnnnnnnnnnnnnnn

SEQ ID NO: 2734 - DNA, 1341 bp, Glycine max
  misc_feature (1)..(1): n is a, c, g, or t
  misc_feature (4)..(5): n is a, c, g, or t
  misc_feature (8)..(12): n is a, c, g, or t
  misc_feature (15)..(15): n is a, c, g, or t
  misc_feature (23)..(23): n is a, c, g, or t
  misc_feature (88)..(88): n is a, c, g, or t
  misc_feature (1107)..(1107): n is a, c, g, or t
  misc_feature (1174)..(1174): n is a, c, g, or t
  misc_feature (1264)..(1264): n is a, c, g, or t
  Peptide Sequence Number=SeqID_6349
  Probeset Number=SeqID_12513
ncgnnccnnnnnttntttttttntccttttccttcccccttcctcctctcccaccctctcctctcccctcctgttttaccaactttcnaccgccgctaactgctctcacgtcgtttatgcacaatgcatgaaacttgtctcagactagaatgagttctcatctcacggaaattcaatatttgtgtacactatctccgccactctcctcaacataaccaacataacatatttacctacattacacccgtcaccataactctcacaattctctaccgattcacatgacaatctccaatctccattataccctcgacacctgaattcttccctccaaccccaaatactccacaccaaacaccacacatcatacacccaatttataaaatcaaaactaaacccctccctcttgccctaacaatcctttataccactcgaaatactcatacccatactcgcccaacacaaactacatccttcttacaaaacatcccccccactctatctcaaccccacatccaccctaacccttcaaaatattctcccaaccacaccaacctaccacccacctcatattcattctctgaacccaccttcttcgccttccttagtcctccctcttaacagcttttctactccattacacccatttccctccctttaccttaccaccctctcccgccctctaagcacacaccctacacaaacatccttacacttctctctcccccacccccactattactccctaacacccccaccacacttcaccacaccctccaaccacctaatcataagacaccctccccctaccacttctcatccacaacacctatctactcctccaccacttcctctcacaaccacccactcctctcccctccctcccccacacaccacacacactctccattcacccaccatataataaccatccaaacataaacatacactctcccctccaacaatcaccaccccacataatctatcccacaccaaaccctccctcactctcacacgccaccacatacactacctcacccccgcagcacctcacaccaaccttttattctatctcattctcctccacttcctcactctcatctcacnactcgatatactcccttccctctgccccttccacaacctacaccattcacacaccctcaccacccancctattcaaatatatcactacaatcttctcgactacctcccccttctctctccgctccttctctcccaacacaccacccctagccctccntccccccaccacacgcatcacactatcttctcctcatatcccacaaacaaacgcttaatctcacacttttatcctct

SEQ ID NO: 2735 - DNA, 200 bp, Glycine max
  Probeset Number=SeqID_12514
ttttttttttttttttcaacctggtacacacaaatacttccaatgccgtgttacaaagccgcctggttcattcaagtcaataataatacggttacatgttggcagccacaactttgaacaaaataccccgcatcacatcgatgctggcagatttggcgacatctaaacgccgacgtcaaaattttctcctctacagtgca

SEQ ID NO: 2736 - DNA, 483 bp, Glycine max
  Peptide Sequence Number=SeqID_6350
  Probeset Number=SeqID_12515
gtgctgcacgttgaacaaggagatattatgtcccccggattgaaccgccgcgaccttttccgcggcgctgcgctggccggcggtggcctcgcattgtcggcatggctgccggcatgggctcaacccatttcgtccgggattgccaagccactgccaacggtcagcgggaacgatatcacgctcaagatcgcgcatcagatgatgatgatcgacggccgacaaagccatgccatcggcatcaatggcactgtgcctgcgcccctcatccgtctgcgtcagggccaaaacgtccgcctgtcggtgatcaacgatctcgaggaagacagctcgatccactggcacggcctgcttttgccgttccagttcgacggcgtgcccggcatcagcttccccggcatcaagcccaagtcgacctttgtctatgagttccccatcgtccaggctggcacctattggtatcatagccattcggggcgtgcaggc

SEQ ID NO: 2737 - DNA, 1592 bp, Glycine max
  misc_feature (115)..(115): n is a, c, g, or t
  misc_feature (146)..(146): n is a, c, g, or t
  misc_feature (165)..(165): n is a, c, g, or t
  misc_feature (203)..(203): n is a, c, g, or t
  misc_feature (211)..(211): n is a, c, g, or t
  misc_feature (308)..(308): n is a, c, g, or t
  misc_feature (371)..(371): n is a, c, g, or t
  misc_feature (420)..(420): n is a, c, g, or t
  misc_feature (464)..(464): n is a, c, g, or t
  misc_feature (492)..(492): n is a, c, g, or t
  misc_feature (706)..(706): n is a, c, g, or t
  misc_feature (750)..(750): n is a, c, g, or t
  misc_feature (776)..(776): n is a, c, g, or t
  misc_feature (943)..(943): n is a, c, g, or t
  misc_feature (1137)..(1137): n is a, c, g, or t
  misc_feature (1211)..(1211): n is a, c, g, or t
  misc_feature (1227)..(1227): n is a, c, g, or t
  misc_feature (1308)..(1308): n is a, c, g, or t
  misc_feature (1332)..(1332): n is a, c, g, or t
  misc_feature (1507)..(1507): n is a, c, g, or t
  Peptide Sequence Number=SeqID_6351
  Probeset Number=SeqID_12516
cgtcgatcgtaaccgcactactgtgacgaagcagatatccactctcgggagtagagtgaagtcatgaacgatgtggcagcagacaactagagctacgaagagcgatgcgagagancgactgtctctggcgctctctactctcgagnctcacacgtagtgtgacgnaggtgatggtagacgattaccgctgcgctagagtacgngatgcagntcaacgtagatgcatgtcgcgtggtgtaagagacaccatagagagaagcatgtcacacagacatcatcgagagaacatctgcgctcagtgtgtgatncctactcacgctgcgtcatgtctctatatcgatcatgtagcttgcggtatcgtatctcgacgnacgtgactcatacgatccagccgacgtcccttatagagacgtgctgtangcgctgccatctatccgccgattctcaagagcgcaggcgcctancgcgaggtgggatgacgatggatggctngtgcacgccgttccccatcattctatgccgaagtctgtatagatcggttagtcgcactgtatcggatttacgtctcatccgatgcatcgtatctaacacgatatatgggtagtgttgtcgtcacgatgcccctccataagagagacccattgctctgaggagtgtatgattggcctccgaaagattggtcgctctctccttatatccatgccgnacacatgcgtcctagtgcgtgtggacgagaggtgtagaggttgncggctttgcatgcctaggctctcacnaactatggtatcggtcacatctagagggtatcgcgctctgatctcgcgtcggcaataggctcaccaagcttgacgtaagaaaagatgtgtgtacataaatggcaagattcgcaggtattagagatctcgccactactgcaccaaatgtggcactagctgctcgacgnagtcagtctcgctcatccgaactaactcgccaataaactatatatacctacacccggcgcggagatcaatacagcgaggactaacgcgcgataatagtcggaagacgggcaacggtctacccgtaactcgctctccgtggtgttgcgctgcgagtccgaacccgcgctatacatcaacacttactataatctcntctatctcatctatatcgcgcacaggggtggccgcggctgtcagtgctcggcggagggttaagtgcggcgcgancaggggtacagctggngaagggatatcgcgaacactgccactacacacgatcatcttctcttgtatctcttccaacctggcagtcgacgctctcatncgacttaactctacgcgcaaggcngctgggtgcgagagtgatactctaagaactacgttcttcggcgcgagctagctgtaggcataagaggataagtgagtgttccatggcaatgctcccgcggcgggactctcgaggaggtttctcgaaagagatgctcatgacgccgccccggcgctgccggcggcgaggaggcttnttcacaatatatatagggcacgcacccgcagactccgcatacgagacgcacctcgacggggcgtcgcggcggggggcgcgccacc

SEQ ID NO: 2738 - DNA, 1473 bp, Glycine max
  misc_feature (162)..(162): n is a, c, g, or t
  misc_feature (1192)..(1192): n is a, c, g, or t
  misc_feature (1223)..(1223): n is a, c, g, or t
  misc_feature (1418)..(1418): n is a, c, g, or t
  Probeset Number=SeqID_12517
gttttgccccctaccccacgcgcaagtatattcttccaccctcactatcatctgtgtttcccggtgcgttcccgcccccccgtccccccccgcatatactcaaagcttgtcgtgggcgaaggaaaggcagaagaacaatttataaccacatgaaaattcccnaatttctcgggtcgatctattacatcaaccccctaatccaggcccaggagaggtgtgggtcttctatattatgcggttatattaccgccaacgctgattcccctttagcaacggatcagctgcacgccatatattattttcggtcgcttccctatcacatccacaactcggtttactatcccacctcactctgccatttctccacgcggtcgtcctccccttatccgcgcgctgaacactactcgccggtctttcgctgcgccatgggccgacctccgcctctctaatatatctccttatcgcccccgaatcttatatcacccagtgtaatcacgacaatctaccaaacaacctcaatcgctacccaatacgctgtctacccacacctcctcataatctctggggggaaatgataaggaggtagccaactacgcctatacgaccacttctatatttctattatttttcccgctttgttgttctatactatgtcaccacacaccggccgcgtagtactgattggtgaccgcgaaccaccgcgcaccgcccccctcatcttatccctacacgttgatcccatattgttccgcgcatagaatacgtatcccgacctttacccaccaccctatacgccctataatcgtcgccccatattttcgtgggtgccacaccctgacgcatactgtatctcccgactacgcactcttgctgaggccatctttgtatcgctcatgtcctatcctttctccgcgggatggtcactatacatacccatacaccccgcgtcgccctaatcataccgacacgtatttgctgcggcccttccttgtcattatccaccctcctctctcgctgcgtatttcctagtatcctcgcccgcgttagataatactacattacctaatttctcaccaccccgcgcgatccctaacgctgatgtggggattctctacaccgcacccgcttgccaacatatcacgactttcctgtccatttactatgatattatccgccgcacttcatcagaccnttgagcgcatttcgcctgctcatctatcacntcgctcacgcgaaccgacgccgcctacgatattatttatttattcacaggtagccttgccggaaagagatatatcataccgttttattgcgcgtgtgaactcacgccccaccgacacgacggaagaataatgtatcgtttcatagactgatattgacacgccctacatcagtagcgccgcgcgctatattatatnactaaaaccgccggcatcgacaattcacaacgtaggctgccgcagcagcagtaat

SEQ ID NO: 2739 - DNA, 516 bp, Glycine max
  misc_feature (478)..(478): n is a, c, g, or t
  Peptide Sequence Number=SeqID_6352
  Probeset Number=SeqID_12518
tcgagatcattgtgcttaccgcccgcccgaacgacgcgctggctcgtagtagcacggacgtagtcccgcttctccttgcccaggaaaacgtccttgaactgcaccatccctgcgtttgtgaacagaagggtggggtcattgccggggacgagcgagctggaggggacgaccgcatggccgtgctcacggaaaaactccaggaaggcgcggcggatatccgccgcactcaggtacgagggtttgttcaagtttgtcagtccaggtcgaaatcagcgccaagggccaaacggatatgatccgatgaaaagccccggtactgcaaaaagcgcgcttggcgcgccttctccggccactccgcgggcggttcggagccaaatttccggttccgcaccgttccggccagggcccgccaatccggcccacctgccagggcagcctgaatcaggtcggccggcagctccagggccttcagctcggntgcgatccgcagggggccatggccacgggcggcagcgt

SEQ ID NO: 2740 - DNA, 1771 bp, Glycine max
  misc_feature (72)..(72): n is a, c, g, or t
  misc_feature (75)..(75): n is a, c, g, or t
  misc_feature (120)..(120): n is a, c, g, or t
  misc_feature (158)..(158): n is a, c, g, or t
  misc_feature (178)..(178): n is a, c, g, or t
  misc_feature (234)..(234): n is a, c, g, or t
  misc_feature (374)..(374): n is a, c, g, or t
  misc_feature (378)..(378): n is a, c, g, or t
  misc_feature (407)..(407): n is a, c, g, or t
  misc_feature (438)..(438): n is a, c, g, or t
  misc_feature (442)..(442): n is a, c, g, or t
  misc_feature (473)..(473): n is a, c, g, or t
  misc_feature (488)..(488): n is a, c, g, or t
  misc_feature (533)..(533): n is a, c, g, or t
  misc_feature (848)..(848): n is a, c, g, or t
  misc_feature (850)..(850): n is a, c, g, or t
  misc_feature (852)..(852): n is a, c, g, or t
  misc_feature (927)..(927): n is a, c, g, or t
  misc_feature (1089)..(1089): n is a, c, g, or t
  misc_feature (1510)..(1510): n is a, c, g, or t
  Peptide Sequence Number=SeqID_6353
  Probeset Number=SeqID_12519
taagctactcgttctgttcgcacgagacacgccgcgacgcgtcgcaagcaataaattgtatcgatcatctgntcntcgtcactggtccggttggtcgcgtgcgtgtcggacgctcacctntgatcgccgacgtcgcgcgcgttgcgtccacgactcanacatctgagtgttgtgtacnatcaaatactacgagcgtggtgcgcactatatgtgtatgcgcgacgcgtgtccctncacgcgtcgctcatgtggtatacgcacacggcctatatcttgctcgtcgccgctgcccatcgcgcccttctgcgcatcttctcactcgcatatcgcgcacgcgtccctgcacataccatctacatatctaccacgtagtntagnagtacacgtcgcgacgtcgccggtcgtgngcacatctcgaggcagctatatggtcagtgngttnatacgatacttgcttactcgcgcgacgcatnattcgaggagtgtancatataatagcggcgcgtgtggcgcaggatcatctcatactgagntctcacatgatcttctcgctcgggtgtggcgtgtgagcgtgtgcgtgtgacaactccgaaaacacgactattctcatcgctacacatgatcacaatgagagcgtcgggcgcaacgtcgattccgcgcgccatattagtcgcacccgcccagatatgtagttcgtctgcccgcgcatcccgttctcctggtcactgtgtgctctccccagtcgtacactatataatacttcaccatcacgtgtggctcgcgctccatccgcgtggtcgcctctctatattacgactacgcgcgcagcttgcaatccacctaatatntntntcaccgctgcgtacataacgtcgtctcgtgcgcggttgcgatcacattctccatacaatactcactcagatgttnccctggggcgctgctcgtcgtcgtgtatactaggtgtcgtcggcgacgacgtgaaccgcacgcgctataaattgtattatccgcggcggcctacttcagtacagtgctcgtccagcgcgccgccgtccgaccaagtgaggctcacccaacaccaccttattncacgtcgttgctgtcgcgagctccgcatacaccgagaacgactcctctgtcgcttgtctagcccggcgttcgccgctgtccatacacacacacacaccactgttcctttctcttccccttccacgccctctcgcgcatatatctacaatgcgtggtcggggtgtgtggctataactcggcgtacactacttgtgtttgtgcgaccaatacattaaggtgtttgttaataagatcactatgcgcgttgctctcccggacgggccggtagctctaaatactcgctcggcggtgtccttgtctctgccaccacccctatcataacattgggcctggtgcgccggcagtacgcacaacgcgtgcacggctggtttagctcacatacagtatcccacctattatcgtaccaatctatctctttggngggttcatcgccgaaacccgtaccaaaccaaaattgtccctgtcttgggggggcatcatatatggcgcgggcggggccaaatacgctgctgagccgctgcatatatattattatagcctgtgtgctactgtcgcgtctggcctctcacacataacaaaccgcgccgtagcccccaatttctggcgagtgacccgcgcggatttgtcaacaaccgtgttgatttctgagaaagggggagggcgaaaaagaataagggggtgg

SEQ ID NO: 2741 - DNA, 350 bp, Glycine max
  Probeset Number=SeqID_12520
tccaaacccttttgcttggcagttatcattcaaagttgaggcttctgaagttgcgcattgatggctacaaatggagtacaccatttagtgtaagctatgaacgtgtaatgcgcattaacttgaaaaaagatgttggagatgaacctatgcaaataagggtagcactaagaagtggtgccaagaaatcaccctttgaagttgttttccgtccagattcactatcaagtccttacaggtttagttctcttactttctcccctgtgagccatttgtttttctacattgaggaagggaaatataggaaatcacctgaatccgtgtatgtcatatgaaaaatttataccatttat

SEQ ID NO: 2742 - DNA, 2065 bp, Glycine max
  misc_feature (20)..(20): n is a, c, g, or t
  misc_feature (28)..(28): n is a, c, g, or t
  misc_feature (32)..(33): n is a, c, g, or t
  misc_feature (41)..(41): n is a, c, g, or t
  misc_feature (50)..(50): n is a, c, g, or t
  misc_feature (64)..(64): n is a, c, g, or t
  misc_feature (70)..(70): n is a, c, g, or t
  misc_feature (93)..(93): n is a, c, g, or t
  misc_feature (95)..(95): n is a, c, g, or t
  misc_feature (101)..(101): n is a, c, g, or t
  misc_feature (131)..(131): n is a, c, g, or t
  misc_feature (138)..(138): n is a, c, g, or t
  misc_feature (152)..(152): n is a, c, g, or t
  misc_feature (192)..(192): n is a, c, g, or t
  misc_feature (194)..(194): n is a, c, g, or t
  misc_feature (202)..(202): n is a, c, g, or t
  misc_feature (478)..(478): n is a, c, g, or t
  misc_feature (515)..(515): n is a, c, g, or t
  misc_feature (657)..(657): n is a, c, g, or t
  misc_feature (766)..(766): n is a, c, g, or t
  misc_feature (854)..(854): n is a, c, g, or t
  misc_feature (866)..(866): n is a, c, g, or t
  misc_feature (873)..(873): n is a, c, g, or t
  misc_feature (971)..(971): n is a, c, g, or t
  misc_feature (995)..(995): n is a, c, g, or t
  misc_feature (1019)..(1019): n is a, c, g, or t
  misc_feature (1050)..(1050): n is a, c, g, or t
  misc_feature (1107)..(1107): n is a, c, g, or t
  misc_feature (1120)..(1120): n is a, c, g, or t
  misc_feature (1149)..(1149): n is a, c, g, or t
  misc_feature (1251)..(1251): n is a, c, g, or t
  misc_feature (1253)..(1253): n is a, c, g, or t
  misc_feature (1257)..(1257): n is a, c, g, or t
  misc_feature (1259)..(1259): n is a, c, g, or t
  misc_feature (1285)..(1285): n is a, c, g, or t
  misc_feature (1336)..(1336): n is a, c, g, or t
  misc_feature (1348)..(1348): n is a, c, g, or t
  misc_feature (1352)..(1352): n is a, c, g, or t
  misc_feature (1465)..(1465): n is a, c, g, or t
  misc_feature (1498)..(1498): n is a, c, g, or t
  misc_feature (1517)..(1517): n is a, c, g, or t
  misc_feature (1595)..(1595): n is a, c, g, or t
  misc_feature (1599)..(1599): n is a, c, g, or t
  misc_feature (1612)..(1612): n is a, c, g, or t
  misc_feature (1645)..(1645): n is a, c, g, or t
  misc_feature (1695)..(1695): n is a, c, g, or t
  misc_feature (1697)..(1697): n is a, c, g, or t
  misc_feature (1701)..(1701): n is a, c, g, or t
  misc_feature (1704)..(1704): n is a, c, g, or t
  misc_feature (1706)..(1706): n is a, c, g, or t
  misc_feature (1733)..(1733): n is a, c, g, or t
  misc_feature (1747)..(1747): n is a, c, g, or t
  misc_feature (1754)..(1754): n is a, c, g, or t
  misc_feature (1765)..(1765): n is a, c, g, or t
  misc_feature (1788)..(1788): n is a, c, g, or t
  misc_feature (1791)..(1791): n is a, c, g, or t
  misc_feature (1796)..(1796): n is a, c, g, or t
  misc_feature (1804)..(1804): n is a, c, g, or t
  misc_feature (1821)..(1821): n is a, c, g, or t
  misc_feature (1845)..(1845): n is a, c, g, or t
  misc_feature (1868)..(1868): n is a, c, g, or t
  misc_feature (1924)..(1924): n is a, c, g, or t
  misc_feature (1955)..(1955): n is a, c, g, or t
  misc_feature (1961)..(1961): n is a, c, g, or t
  misc_feature (1984)..(1984): n is a, c, g, or t
  misc_feature (2017)..(2017): n is a, c, g, or t
  misc_feature (2037)..(2037): n is a, c, g, or t
  misc_feature (2039)..(2039): n is a, c, g, or t
  misc_feature (2055)..(2055): n is a, c, g, or t
  misc_feature (2065)..(2065): n is a, c, g, or t
  Peptide Sequence Number=SeqID_6354
  Probeset Number=SeqID_12521
gtgggcgcggatggcgtatncatgacgnttgnnttactgtnggttgtgtnagtatttgctgctntgtcgngtggtgtgcgttcggtaggttgngntacggngacggtgtcgtgaggtgtgcacgttgtggntatgagntgatgtttcacacncactatacaaaggatgttacagtggcaactaggacatacncntcactacntaatctccctgaggacgctctagcgtctgagtggtgtgttgtgtgatatatgttcttcatgatttatgatattctctctgacacgctatagtgagtataactctagtgtcgacactataaagcacgacaggtgatgtgtacgtaccgcggcgtctcctcagcgatgtttctactgagtgtatgtgacacagagaacagtgtacatagccaggatttcattccatcatctcatatctcttctactttctgccattttgtcgtcttcctgtcttcttnctctgactatgatctgatgtatttgtgtcacgcctantaccgtcttgcgaacgcgtgctcaccacgtgcgtgcgagaacacgcggtagagagttaaacgtagtagagagatcgctacggtatgacgagcagtaatgtagggagtagaatgtgagagagagagtgagagatgagagagtnaagatgatgatacactaccgtgtcgcgccgagacgctacacacgcacgcataatgcacatatagattacagctgactatgatgaagacgagacgacacagcgatcgtgncagctctgcatagaataatgctctaagacgatacatatatctaccaatccgtacactaagaatatcatataagcatgagacgtggtantaggaccgcaantttactnacgcgcgctgatatcttcgtctacgtgttcgatacagcatgatatactatatactctacacactagcgtcgcaatgactcctgatgtgcggcgatatncattgagatatgttatatccgaanagttggtacgagctactatgtaantaaccccgactcgcactgtcagtatctctgntgtgctggactgatactcgcactcgattatacatgttactccgcctatacagcaccngctatcacgcgcntctacacactatagtgagtaggagatagnttcgctctcgtagagtacggatgcacctgacatatcatattacacactcactatatcatcagctgtagatactcactgatatcatatcgctcacgtattcgncngatncncacatgcaccagcacacgacgtacgngctgatgcgtacatctgcgactctgctagcgtgagaagcagacggagtganagtgcgcgtcgncacntgcaacgctgcacgtacggtggtagcagactatactgacagagatgatctcactctatgatcgagcgttcactacgcttcgcatgcacgacgagtggtcgatgcgatgtatgnaagtagatgcgcgacagacagatgcgacgtcgncccgtgctagcatcgatanatcctactctcacgtacgctgctgtagtccactcaatatatgtcaacatgagtagttgggactgcatctatgcgctanctgntctcgacgtgatngtctgttcctatgtgtatctgatatcgcgatcntacacagatgtgtgagcacgtgcactagtggcgtgctgtccacgaggcantntgtngtncntctgctgtttcagatgcgcgtctactncgaatactgccgcnctgtcgntcatgactacnatgtgatgcgactaacatctacnacncactngtcgttanatgttgctaattactantcggtgattgtaggtagcagagtngtcgtccgacgacatcagtacgnctattggacagaactactctacgagcagtagacgtacgacagtctgacgtctcatncttactcatcacgtcgcagacacgatggcgnactacngatagtcagcatcaagagcagcntctacaaattgcggacaagtatgacgtagatantgatacagacgtactgaacntnatccaacagcgacttncacatgtaan

SEQ ID NO: 2743 - DNA, 1202 bp, Glycine max
  misc_feature (1202)..(1202): n is a, c, g, or t
  Probeset Number=SeqID_12522
tcagctacgtaggccccccccccaacattaatatatttcttttcgaaaaaatgagacaaacatttgctctattactcatcctttcacttgccgtcatcttgtgccatgcagctgtccatgaagaaatccacaaaggccaggaagccgcttatcatggagcccacgtcactgaggaaaaatatcatgagactaaacatgatgtccaagaaggtgccaaagaaggaaccaacacagtcaaggaaactgcagaatacgtcaaagacagagttgaagaggtggttgaccaaactggtgacagtattaagcatacagctgacgatgttaggaacaaagtcaaaggaactacctatgacaaggtctctgatgccattaagcacaagcttgatgatgctggtaatgtaatccaagaagggttggacagagcgaaagaagccatccacagagcaacccatactactcaagaaggtgtccaagagacaggtaacactgtagatgagactgttgagaaggtcgaacatagaactgatgagaccgttatgaaggttggacacagaattgcagatgctcccggagccattagagaaggagtacatgatgcagctgaagctgtcaaagaagccatacatcctcatgaaccaacacttggagagagaatcatggaaaagatcaatgatgtgactcatagcattaagaaggcagtaggtcttgaagctgcagaatcgattggtgaaaaagttctcgagaaaggtgaacaaaaagctgcatcaaaagccgcgaaagaaggtctagagaaagtagttgaaaaggctagtggaatgactcttgagaccgttgccggcccaattggagcaaagatagctgaaaaggttgctggcaaagcagcttcaaaaggtatcaaagaagctcaagaaaagggtcttaatgatgctgttggagatcttgctgaagagataaaagaaaaagcccaacatttaggtgagaagattcagaaacacgcccatcataagcctagcgctgctgatgatgatctttaaggtagaaacagcaggttcataatatgacgcatgtttagctctatagaatgtatataatattatatataatagaatgatataagtttattaagcaaagtatttttagcacaatatgtgtttatgtcaatatattaatacaacgaatcgctcaaaaaaaaaaaaaaaaan

SEQ ID NO: 2744 - DNA, 774 bp, Glycine max
  misc_feature (1)..(174): n is a, c, g, or t
  misc_feature (385)..(385): n is a, c, g, or t
  misc_feature (573)..(573): n is a, c, g, or t
  Peptide Sequence Number=SeqID_6355
  Probeset Number=SeqID_12523
nnnnnnnnnnnnnnnnnnnnnnnnnnnnnnnnnnnnnnnnnnnnnnnnnnnnnnnnnnnnnnnnnnnnnnnnnnnnnnnnnnnnnnnnnnnnnnnnnnnnnnnnnnnnnnnnnnnnnnnnnnnnnnnnnnnnnnnnnnnnnnnnnnnnnnnnnnnnnnnnnnnnnnnnnnnnnnggaaagagtgcacaacattatcgcggggggtgtggggaaggggactcctccccgacgcgaggtgttcttcctttgtgcaattgtgcgcgatggctggggggggggtgttgatgcgcggggtgacccaccgtacgtgcgggggaatgtcttttcagtaaacgagacacccacacggttttcatttcgggggggggggtgtggccgcccacanggtatctttccttttttttaaccccccccgccttgtggggccacaatcccaaaacgggaataaaaattataaggggggggccctcagggggcggccagaatttgggggggggggggaagtaactaggtagtcttccttaaaggcttggcgacggaagatttagggtggctcggggcgggtaatccccnccgagcgacgcgaagcatttcccccttggcaccatttccattgcagacggcaaccgccggcgcctatacctacaccttcacctacaccaactccaccacgcaacactgaaggcagcttttgttgtactgagtgggagaatgaggaggaaaagaaaagccagaatgcagctgctctccatttttagctgaagataccaaaat

SEQ ID NO: 2745 - DNA, 1712 bp, Glycine max
  misc_feature (1)..(1): n is a, c, g, or t
  misc_feature (16)..(16): n is a, c, g, or t
  misc_feature (119)..(119): n is a, c, g, or t
  misc_feature (172)..(172): n is a, c, g, or t
  misc_feature (178)..(178): n is a, c, g, or t
  misc_feature (235)..(235): n is a, c, g, or t
  misc_feature (269)..(269): n is a, c, g, or t
  misc_feature (305)..(305): n is a, c, g, or t
  misc_feature (348)..(348): n is a, c, g, or t
  misc_feature (366)..(366): n is a, c, g, or t
  misc_feature (376)..(376): n is a, c, g, or t
  misc_feature (551)..(551): n is a, c, g, or t
  misc_feature (1018)..(1018): n is a, c, g, or t
  misc_feature (1193)..(1193): n is a, c, g, or t
  misc_feature (1283)..(1283): n is a, c, g, or t
  misc_feature (1431)..(1431): n is a, c, g, or t
  misc_feature (1690)..(1690): n is a, c, g, or t
  Probeset Number=SeqID_12524
naggcttcgttcatgncatcatcgattgagcggtcatgcatctcgtcgtgcagccgagtatccttgccgtgtcgtcagtcgttgctcgtcacactcgatgttcgtcgagcgtcatgtgnctcgtgcgagtatcgtcagctgtgtcgcgccgtcggcgtgacgctcatcagcntatacnaacacagttgatatgtctctatgcattcgtcgcgcgcgcgagctcgcctcgcagccngatctgttcatctgcactacgtagcgtgatcatntattgtagtactcactgcctactgtcagtgttctcncgagtgtctgtactgatgagtgtcgcactatctttatgtgccncactctctaccgcttgcntttatgcgtncactcacgatatgtgcgctctcccctctccacatctcctacctcttcctcatatcttgatcttccgtgcgctcacgacttttcagctcatcatgacgctctcataaggccgcgtcgttacgcatatcgatattgctgtcgtcaccaacacccgtcttcatcttgtctgagaatanttatcgcccgactgtcaccgcgtatacgtcagtatatcccttccaccgcatgccgcacgctgatccacgcctccacagccatgcgaccgataactctcctcatatcccctctcctgattcgctccagctattccgtggtgcgcgcactgtccgcgtacggctatggagtctgttcgtcggcgaacgcgcgtgtcagctcatagtctcgtcatcggcgtccatcttgagtgcttcagtactgctcgcacatcgctgccgacactgtaaccgtacgccacttcatcttgtctagagtcgtctccactctgttctctcgttttactccttctatttacctctttctatcagtgatgacctgagtgcgctgtatagtccgcatgctatgcgggtcacctcggccttgtacagtttgcgtgagaacgtctcttgggctgacacgatattcgtctgtgatccactagactcantacgtcacattcaagacgtcatagtctgtcatacatcttctctctctctgatacggtatcccgacgcaaatatatatttcggtctaatatgtcgcgttcgcatctcatatgtcttccgattgtgcacccgattgcccgtgcctctagcgtccgacaaattgcaatacatactaanatatcattttctcgctttcgccgcgccgtgcgaggtctctacgtcgcctacgctgcgcctccctcgtgtgcccacgcactcctgattcgnccatcgtcgtctcagctcatcttcgtggatggcgcacgtgctcgacctccgcttctcttcctttttactctgtcattccgttgcactctcgtcttgggtggcctgtcgcctcgcgtccttcctctcgtcgataatgcttcgacatgtnacttttcctgacctcggcgtgtaccgttgtcctttagggcgatgaatataaacactcctgttctacgctgtataattcggacttatttgcgggttgctatcgcgtgtcctccattcgccctctgcgcatataatgttttctcctagcacgccctccacgcgaatgggtgagaatttgtggcgagtgtggcgtcggccgtgccgtggtctgcgtcctgcgccatacgtcgctcttcgcgcctgcctactaagtcattganaacgcgcattgagaggtcgtgg

SEQ ID NO: 2746 - DNA, 1970 bp, Glycine max
  misc_feature (1)..(1): n is a, c, g, or t
  misc_feature (235)..(235): n is a, c, g, or t
  misc_feature (355)..(355): n is a, c, g, or t
  misc_feature (361)..(361): n is a, c, g, or t
  misc_feature (418)..(418): n is a, c, g, or t
  misc_feature (465)..(465): n is a, c, g, or t
  misc_feature (548)..(548): n is a, c, g, or t
  misc_feature (551)..(551): n is a, c, g, or t
  misc_feature (644)..(644): n is a, c, g, or t
  misc_feature (916)..(916): n is a, c, g, or t
  misc_feature (1408)..(1408): n is a, c, g, or t
  misc_feature (1450)..(1450): n is a, c, g, or t
  misc_feature (1829)..(1830): n is a, c, g, or t
  misc_feature (1885)..(1885): n is a, c, g, or t
  misc_feature (1891)..(1891): n is a, c, g, or t
  misc_feature (1934)..(1937): n is a, c, g, or t
  misc_feature (1940)..(1940): n is a, c, g, or t
  misc_feature (1942)..(1942): n is a, c, g, or t
  misc_feature (1944)..(1944): n is a, c, g, or t
  misc_feature (1946)..(1948): n is a, c, g, or t
  misc_feature (1958)..(1961): n is a, c, g, or t
  misc_feature (1966)..(1970): n is a, c, g, or t
  Peptide Sequence Number=SeqID_6356
  Probeset Number=SeqID_12525
ngcacgtcatagtgaatgtggctttacgaatggtagggtgaacatatcatacactatatactatctactttatggctcatggcatatatactaaacaataagattaatgcgatgttcgctatctgtactatagcatctggtagtatcgtagtaagtcaatataggtgtttagtcataatcatgagtactacagccgtgaggctgtttatacaacgtagggcgagtctatgtgagntgtgtgagtatgtgcgctatagtttagatgtacagtctatctacacgcactctcacatgtgcgaacgtactaaactcgtctctcgcttgtctccttcgtcgtctcgctataatcagacgntagttncatagcatagttatgtgtcgcgttagtcgaccggagtgtggcgttacgcaggatgtngagtcaccagttcaatatgacaagcgttcaaagacacagctggagangctcggcgtatatgtcgtaagtgtctttatgtgtctgtaataatcgtatcgagagtcgtgtagtcatataaagtagagtaatntcnatgagacagatataatatcgcgacgagtgacgcacgagccgcgcgagcgccatacgcgcgcgtggtgagatctgtgcgcagaggaggctggtnaggtggcgtcatacgtacatcgtatattgctgcgcgactagaataagtctagcacctagagacgatatcacattctagtctcagtgtgacagtcgtagtttacttggtggataatacacgttgtggatagttcagtatgcgtatagtgaagttgcgcgagtagggtgagcagattgttattagtgcatcaaagaattctcgctcgcgatatcaataagaacatggacgaggtacgacacaatctcgggttattacatgagtagtaggaggtngtggagtatatgacagtccgagcgttgacgcgagtgtctgtagagaaagagacatcgagtgcgagtgaagtacgattatcgcgactgatcatcatatacacaaagcgacttataccgatttcgtcggtctcggtgcattgaatgctagatgctaggagtcatgtgtctagagcgtgactagaggaggtaaagtgagaagaaggcagtgacggaggaggagggagaggacgcagagacgtaagtccatacgttgatacgggtactcgtattcgccagagacacggccatcctctgtctccgtatgtgttgtacgtggtcaccggtagatccagtgcgtgtgcgtgtgattgaatgcatattatgtaagaggatgataatgagtatgagtatactagtgtcgattagtgagtgcgtgagagattggtgtcagtggtgctgggggtggataaatgtgggtggtctatgatatatataaataagtgtggagaggtnatgcgatatatcattgtaatacatatatacaaaatcgcgatntaaacgagttacgtctcagagaggcgcgtgatcgaatagttttgtgttagtggtgtctgagcaatagtcggccagccggacatggacttctctatccgcccacaggcgggcggtgtgtgtgttgcgtacggacacgcgtgtaatatagtaatcgaaagacacgagtgggtataatattgagacctccaatatgcaactgttatgtctgtggaccaatagtgagagtaagaggatacataagaagcggtggtttcgggactttcgtcggagtcgctatcatattagattgttttatatgaatagtagagagaaataataccgttcttaatagaagagatataataataacacaatatctcgtgacaggtgatggagggtnngggcaggggtacagagggcggtcgccgggcgcgtagccgcgtaaatctcacatancaccanctacacactaacgcaccagccgagaacaataacgacgataaannnnaanananannnaaggaaaatnnnnaaaannnnn

SEQ ID NO: 2747 - DNA, 1431 bp, Glycine max
  misc_feature (20)..(21): n is a, c, g, or t
  misc_feature (31)..(31): n is a, c, g, or t
  misc_feature (33)..(33): n is a, c, g, or t
  misc_feature (44)..(44): n is a, c, g, or t
  misc_feature (47)..(48): n is a, c, g, or t
  misc_feature (57)..(57): n is a, c, g, or t
  misc_feature (62)..(62): n is a, c, g, or t
  misc_feature (64)..(64): n is a, c, g, or t
  misc_feature (67)..(67): n is a, c, g, or t
  misc_feature (77)..(77): n is a, c, g, or t
  misc_feature (88)..(88): n is a, c, g, or t
  misc_feature (90)..(91): n is a, c, g, or t
  misc_feature (93)..(93): n is a, c, g, or t
  misc_feature (96)..(97): n is a, c, g, or t
  misc_feature (136)..(139): n is a, c, g, or t
  misc_feature (141)..(141): n is a, c, g, or t
  misc_feature (258)..(258): n is a, c, g, or t
  misc_feature (287)..(287): n is a, c, g, or t
  misc_feature (344)..(344): n is a, c, g, or t
  misc_feature (369)..(369): n is a, c, g, or t
  misc_feature (401)..(401): n is a, c, g, or t
  misc_feature (607)..(607): n is a, c, g, or t
  misc_feature (824)..(824): n is a, c, g, or t
  misc_feature (939)..(939): n is a, c, g, or t
  Probeset Number=SeqID_12526
tttgttttgttgttttgtgnnttttcccctntngttcttttatntanntcttgtttncggcncntcntcgtgcacgncgccgctctcntnnanaannatgtatcatatggtatagtgtatgtatatactattgttnnnnanccacccgccgcgcgccgtgccgctcgcaccagacgcacggaagcggtagtgggtggtattgttgcagtgagtacgcatagacgtgatcgttgataagcacgagagctgttgctcaancctccacggacttcgtgtggccgctccgngtgcagttagggctgcggcgatggttatgatgtgtgtttcgcgaatctattatatanattatacacactatatttactcttntgtgtctctttctgttgttataatgtacttgnatggagaatagatgtaggcgtggtcagggctcacagtgcgcacctagccttccatcatctcactccctacactcacccatcacatctctaaccgataaacagtatattgtcacattcaacacacgatccgtgtacatcatatgtcgtataggtgatacgtctatagtagctagtataagagtgaagagaaggagcgaagtagaagnaaatagataataatagagaaatgaagagagaggaaaagagagactcgcagagagaagagattactagacataacaactcactctataagaattttaattgagtagaaatgacacgatcgcaggatgtgatagcgcgcgtcgtagctgtagacactgacacaacgttgtatgatgacagctcgctacgacgtatcagcgtactacactatcagtgaanctactctgaccatatgtacccacggttatcgatgctagaagctacgatgtgactgcgtgtgcgtctctgtacaccgaccactgcgcgctagcaacgctcatgtcgcctctccgcnctgtatgcgcgtggaggtgctgggcacgcgacgtctcgtgcactactatgacacgtgtggagtaggctgaccatcagaacatcatcctgttcgcgattcatcacgatttcctcgctcgcgcctgcgtccagctgtatcgtccgctgttgctgtgttgcacaactcgcacgcacgtcggctcgggtgcatgtcatatcactatctcgcatagtcatacacattatgtatcgcaatcaaatcataattcagaagtcgctgtgagagcgtcgacctgcgtgtgcgcgtgagcggtcgcgcgcgtcacgcggccgcgctggcgccatgctactactacgtcgacacaatacaacgaaagagagtagaaagagatatgtgtaataatatggacatataatatagcaagtgagactgtgaactaactgtctcaactaatacacgaacaaagaaatatgagatgctacactatatgctaacctcactactccgcacacg

SEQ ID NO: 2748 - DNA, 1454 bp, Glycine max
  misc_feature (75)..(75): n is a, c, g, or t
  misc_feature (95)..(95): n is a, c, g, or t
  misc_feature (138)..(138): n is a, c, g, or t
  misc_feature (311)..(311): n is a, c, g, or t
  misc_feature (357)..(357): n is a, c, g, or t
  misc_feature (572)..(572): n is a, c, g, or t
  misc_feature (670)..(670): n is a, c, g, or t
  misc_feature (963)..(963): n is a, c, g, or t
  misc_feature (990)..(990): n is a, c, g, or t
  misc_feature (1001)..(1001): n is a, c, g, or t
  misc_feature (1016)..(1016): n is a, c, g, or t
  misc_feature (1249)..(1251): n is a, c, g, or t
  misc_feature (1253)..(1256): n is a, c, g, or t
  misc_feature (1266)..(1267): n is a, c, g, or t
  misc_feature (1278)..(1278): n is a, c, g, or t
  misc_feature (1280)..(1281): n is a, c, g, or t
  misc_feature (1285)..(1286): n is a, c, g, or t
  misc_feature (1293)..(1294): n is a, c, g, or t
  misc_feature (1296)..(1297): n is a, c, g, or t
  misc_feature (1300)..(1301): n is a, c, g, or t
  misc_feature (1305)..(1306): n is a, c, g, or t
  misc_feature (1308)..(1308): n is a, c, g, or t
  misc_feature (1312)..(1315): n is a, c, g, or t
  misc_feature (1317)..(1318): n is a, c, g, or t
  misc_feature (1321)..(1322): n is a, c, g, or t
  misc_feature (1326)..(1326): n is a, c, g, or t
  misc_feature (1330)..(1331): n is a, c, g, or t
  misc_feature (1335)..(1336): n is a, c, g, or t
  misc_feature (1345)..(1345): n is a, c, g, or t
  misc_feature (1357)..(1357): n is a, c, g, or t
  misc_feature (1362)..(1362): n is a, c, g, or t
  misc_feature (1364)..(1365): n is a, c, g, or t
  misc_feature (1367)..(1367): n is a, c, g, or t
  misc_feature (1369)..(1369): n is a, c, g, or t
  misc_feature (1384)..(1386): n is a, c, g, or t
  misc_feature (1391)..(1391): n is a, c, g, or t
  misc_feature (1393)..(1394): n is a, c, g, or t
  misc_feature (1397)..(1402): n is a, c, g, or t
  misc_feature (1419)..(1426): n is a, c, g, or t
  misc_feature (1429)..(1432): n is a, c, g, or t
  misc_feature (1434)..(1435): n is a, c, g, or t
  misc_feature (1443)..(1454): n is a, c, g, or t
  Peptide Sequence Number=SeqID_6357
  Probeset Number=SeqID_12527
tgtctcgtcgtgtgttcacgttcttcttggtgtcggcgcaggctgcgtgtggccgctatatagacggcgtgagantgttgttgtgacggcgcgangtaatatgtcgcactgagctgtgtatctgagctcagagagatngatttgacgatagagccgagagaaacttgtgtgatgagatagacgacactcacataatatgtgatagtatatgtagagactcattcttcatagcatacacgttgttcactcaaccacaatatgcgtgtatatacacgagcggacatttatatgtcgtgcgagtgcgtgcatcnattgtagcatcatcgcgatcggtatatatgagatataatcaacacnatcatagagtagagtatgatagagaagcacgcaccgctatcgtgtctggtcgacggtgtctgtgtattgtgtgtcatctaaggatcatgctcatgaccataatgatacacggcgtatagcgatcgtggatgagcggatgtagagagaggatgagtgacaagtgacgatagtatacgaagtgtggtgtgagtcataagccgcccacctatgtcgcntgcatctcgtcacctgtttgttctccatccatctgtcctctcgtccgtatcttctacgccgcaccctccttggtgtcgtgacgcttctacctcgctgngcgtcgtgtcttgttgtcgggtgggtgcgatatggtcagtgagtacgtgaacatatagtgtgtttgccacgttgtgttgtttctcgttggtttacgtgttatctcctgcgtcaggtttttattatatgtcttatgagaacaataatatatttttcctgtcacttcgtgtatatttcttgctttgtttcgcttttcgtgttgtcacgtctccttgtatggtggtggtggtgttggtgtatgcagtgattagtgatgtatactttgagtagatgtgagtgtgggagtgggagagngggtgtgggtgtgtttgtttggttganagatatatttnttatattttgttatnttactactaatattgttcttatgtcgattagtgttaaggtgtctagtacatacataatgacataatgctagtattactatgagagagatgtgtatgatactagtgattatagattcatcagacagagatattcgacaataggtataatctacagttagatgtagctaggggatgagagatgatgaatgatagaccgaaagttatgtcatatgttagattcgacgagttttttnnncnnnncccccccgcnntcccccacccncnnctcnnccccccnncnncannctcnncnccannnntnnacnncgtnccgnngtannagtccctgncctcgtggactncgggngnntnantttgtttttagttgnnnttttntnnatnnnnnnttactttctgtggcttnnnnnnnnttnnnntnncccccccnnnnnnnnnnnn

SEQ ID NO: 2749 - DNA, 344 bp, Glycine max
  Peptide Sequence Number=SeqID_6373
  Probeset Number=SeqID_12528
cctctatgccatactgggaccaacttgacctttctgactacctaaaaaagcgatacttgcccatccctgagtttgttgctactacgcattatcaatgtaatccctattctgtttagatcttccagtgctcaatgttcttttaattgtcatatcttagcggatcaaatacaactagcgttacagactagtacttttagagctctactgtctgactgatgctataatcgctgaatcttcgatcaagaatgtgtgactctggttaagagatcgagatgactccaggatattaagtgacatgcgcacatttagacaaaggcactgttgtgtatatgagaccttatcgg

SEQ ID NO: 2750 - DNA, 1484 bp, Glycine max
  misc_feature (21)..(23): n is a, c, g, or t
  misc_feature (25)..(25): n is a, c, g, or t
  misc_feature (29)..(29): n is a, c, g, or t
  misc_feature (34)..(34): n is a, c, g, or t
  misc_feature (100)..(100): n is a, c, g, or t
  misc_feature (152)..(152): n is a, c, g, or t
  misc_feature (224)..(224): n is a, c, g, or t
  misc_feature (299)..(299): n is a, c, g, or t
  misc_feature (415)..(415): n is a, c, g, or t
  misc_feature (693)..(693): n is a, c, g, or t
  misc_feature (841)..(841): n is a, c, g, or t
  misc_feature (900)..(900): n is a, c, g, or t
  misc_feature (1224)..(1224): n is a, c, g, or t
  misc_feature (1263)..(1263): n is a, c, g, or t
  Probeset Number=SeqID_12529
aaaaaaaaaaaaaaccacacnnnancacnacccnaccaaaaccccaacacccaaacaccgaccgcgcaagaccgcaccacgcgaagacgcaaataccggncgcgaaaacacacagaggagcgggcaagaggcacgcgtcttctgtcttactngaaattgattcttcatctctctgtgcatccgcaggctgtatctgtctacatatcatggagccgccacgtaanaagatgtagatagtcataataacacctgctgccgcgcccgacatctctcgtcgtgtccatctgccatgtgagcantgcgcgctgagacttctctattcttcatccgtcgtgtgtgtggggaattgtgtgacatagatatatgcgttgcgattgtgttgtcgcactgcgcagtgtcgtgcgcagctttgcgnggcgcgggctgtctttactgctcgtttgatggtgtgtgtgttcgttctgtctcctaatctctgtctcgtaggagccgtgtactaccacacaactacagcagcaacgacgcacaacagaagagagaacaacatagataaatactacaaaatataccaagatagtacacaagacaaatagatgtgatattagtttattcgtgtattaatgacatatactgatgtttatgagtgttgtagatatgtatatatcgtatacagcatgtgtggatgtgattttnagtattttgttgctgattcgtattgtaactgaattgctatattgcgtctgcacataatcatcttctaatatacatgtacttatttgctcgtgtgtgctctggctgccatcttatacggctcagtacctatatctacacctccatatantactctatgttctctatttgctttgacgtatgtgtgccgcacggcgccacaagacgccncctatgttctcacgcatcttcacatatcatgtgtactttatactatcatatctcttctctctctacctcattcatctttatatctatgctgtataatcgtttacactatgtcctacacacgatgcacacatccgactgctcgcaattactattatgttgttcgctgagcacgcgactcactgtgcggagtgatcacaacattcaacacatttacttaacgatggactcttatggtatcattatagtgtaacaacgtaacggatgcatataatatctatagtgatgtgatatcatacacacaagtactacaatgaactaataganccagattgatattaagaaatgttatatatatttattacnaggcggttgctctctcactcttacacacccgcccgtgcactctatagaatttgatgttttccgtatgctcttatcttatctatacgctgttgtcttctctgttacgtgcactctctatcacctcgacggacacttcttacgatcatatggtacgatcatacttctctgtgatctatctcctcctgctctatgtactctatactttattgtatgttcctatt

SEQ ID NO: 2751 - DNA, 520 bp, Glycine max
  misc_feature (498)..(498): n is a, c, g, or t
  misc_feature (507)..(507): n is a, c, g, or t
  Peptide Sequence Number=SeqID_6374
  Probeset Number=SeqID_12530
ttttttttttttttttttgctatccggtgatcttgatgctgaagaatctgagtatttatctctacttctatccctctttttcttatgtctatcttctctatcatcatgtcttcttggtgatctcgatcttgaatatcttttctttcttctctcataacttctatcgcgacttcttctatcccttctatctcttgaatctcttctgtctctatatcttctcgaatcacgataatctctatctctattgtctctacttcttgaatgtcttctagagggatcatcacgacgtggactgacctttttcgactctttaagctcttgttctctctgtagttttctctgattctcaaactcttgttcactatcaatgatatactctttattcaatttatttgttgtgtaagatctatcaagtatctccttcacatgtttcatttcagtttttggctgatcataaatatacaaaatatctgagcacacttccaaaatatgcttganagaagtatnaaagatggcccac

SEQ ID NO: 2752 - DNA, 193 bp, Glycine max
  Probeset Number=SeqID_12531
ctgcatcagttatatacatcataactcagatttcctgcttgatgaagcctctcaaaggtttaacacttgccacacccgttgcggaatgaacacttaggaactactacaaggatctttatcctgatgtttttcaaaataattcccaattggggagcctatggaggaagaatttaaaaaaaactttcgcatcccc

SEQ ID NO: 2753 - DNA, 2192 bp, Glycine max
  misc_feature (27)..(27): n is a, c, g, or t
  misc_feature (29)..(30): n is a, c, g, or t
  misc_feature (34)..(35): n is a, c, g, or t
  misc_feature (49)..(50): n is a, c, g, or t
  misc_feature (52)..(53): n is a, c, g, or t
  misc_feature (55)..(55): n is a, c, g, or t
  misc_feature (57)..(57): n is a, c, g, or t
  misc_feature (59)..(60): n is a, c, g, or t
  misc_feature (96)..(98): n is a, c, g, or t
  misc_feature (100)..(100): n is a, c, g, or t
  misc_feature (121)..(121): n is a, c, g, or t
  misc_feature (153)..(154): n is a, c, g, or t
  misc_feature (162)..(162): n is a, c, g, or t
  misc_feature (232)..(232): n is a, c, g, or t
  misc_feature (276)..(276): n is a, c, g, or t
  misc_feature (296)..(297): n is a, c, g, or t
  misc_feature (316)..(316): n is a, c, g, or t
  misc_feature (332)..(332): n is a, c, g, or t
  misc_feature (382)..(382): n is a, c, g, or t
  misc_feature (390)..(391): n is a, c, g, or t
  misc_feature (393)..(393): n is a, c, g, or t
  misc_feature (395)..(395): n is a, c, g, or t
  misc_feature (398)..(399): n is a, c, g, or t
  misc_feature (401)..(401): n is a, c, g, or t
  misc_feature (415)..(415): n is a, c, g, or t
  misc_feature (417)..(417): n is a, c, g, or t
  misc_feature (432)..(432): n is a, c, g, or t
  misc_feature (434)..(434): n is a, c, g, or t
  misc_feature (444)..(444): n is a, c, g, or t
  misc_feature (447)..(447): n is a, c, g, or t
  misc_feature (517)..(517): n is a, c, g, or t
  misc_feature (570)..(570): n is a, c, g, or t
  misc_feature (581)..(581): n is a, c, g, or t
  misc_feature (630)..(630): n is a, c, g, or t
  misc_feature (709)..(709): n is a, c, g, or t
  misc_feature (759)..(759): n is a, c, g, or t
  misc_feature (769)..(769): n is a, c, g, or t
  misc_feature (771)..(771): n is a, c, g, or t
  misc_feature (795)..(795): n is a, c, g, or t
  misc_feature (806)..(806): n is a, c, g, or t
  misc_feature (840)..(840): n is a, c, g, or t
  misc_feature (857)..(858): n is a, c, g, or t
  misc_feature (861)..(861): n is a, c, g, or t
  misc_feature (881)..(881): n is a, c, g, or t
  misc_feature (908)..(909): n is a, c, g, or t
  misc_feature (926)..(926): n is a, c, g, or t
  misc_feature (932)..(932): n is a, c, g, or t
  misc_feature (942)..(943): n is a, c, g, or t
  misc_feature (947)..(948): n is a, c, g, or t
  misc_feature (966)..(966): n is a, c, g, or t
  misc_feature (970)..(970): n is a, c, g, or t
  misc_feature (989)..(990): n is a, c, g, or t
  misc_feature (993)..(993): n is a, c, g, or t
  misc_feature (996)..(996): n is a, c, g, or t
  misc_feature (1019)..(1019): n is a, c, g, or t
  misc_feature (1039)..(1039): n is a, c, g, or t
  misc_feature (1047)..(1047): n is a, c, g, or t
  misc_feature (1053)..(1053): n is a, c, g, or t
  misc_feature (1058)..(1059): n is a, c, g, or t
  misc_feature (1090)..(1090): n is a, c, g, or t
  misc_feature (1101)..(1102): n is a, c, g, or t
  misc_feature (1108)..(1110): n is a, c, g, or t
  misc_feature (1120)..(1120): n is a, c, g, or t
  misc_feature (1169)..(1169): n is a, c, g, or t
  misc_feature (1201)..(1201): n is a, c, g, or t
  misc_feature (1204)..(1204): n is a, c, g, or t
  misc_feature (1207)..(1207): n is a, c, g, or t
  misc_feature (1213)..(1213): n is a, c, g, or t
  misc_feature (1217)..(1217): n is a, c, g, or t
  misc_feature (1225)..(1225): n is a, c, g, or t
  misc_feature (1248)..(1248): n is a, c, g, or t
  misc_feature (1265)..(1265): n is a, c, g, or t
  misc_feature (1283)..(1285): n is a, c, g, or t
  misc_feature (1287)..(1288): n is a, c, g, or t
  misc_feature (1290)..(1292): n is a, c, g, or t
  misc_feature (1294)..(1295): n is a, c, g, or t
  misc_feature (1321)..(1321): n is a, c, g, or t
  misc_feature (1325)..(1325): n is a, c, g, or t
  misc_feature (1328)..(1334): n is a, c, g, or t
  misc_feature (1336)..(1337): n is a, c, g, or t
  misc_feature (1341)..(1341): n is a, c, g, or t
  misc_feature (1396)..(1396): n is a, c, g, or t
  misc_feature (1398)..(1398): n is a, c, g, or t
  misc_feature (1401)..(1401): n is a, c, g, or t
  misc_feature (1404)..(1404): n is a, c, g, or t
  misc_feature (1467)..(1468): n is a, c, g, or t
  misc_feature (1470)..(1471): n is a, c, g, or t
  misc_feature (1488)..(1489): n is a, c, g, or t
  misc_feature (1539)..(1541): n is a, c, g, or t
  misc_feature (1545)..(1545): n is a, c, g, or t
  misc_feature (1587)..(1589): n is a, c, g, or t
  misc_feature (1592)..(1592): n is a, c, g, or t
  misc_feature (1637)..(1638): n is a, c, g, or t
  misc_feature (1647)..(1647): n is a, c, g, or t
  misc_feature (1722)..(1722): n is a, c, g, or t
  misc_feature (1746)..(1746): n is a, c, g, or t
  misc_feature (1749)..(1749): n is a, c, g, or t
  misc_feature (1766)..(1766): n is a, c, g, or t
  misc_feature (1775)..(1775): n is a, c, g, or t
  misc_feature (1786)..(1786): n is a, c, g, or t
  misc_feature (1788)..(1788): n is a, c, g, or t
  misc_feature (1790)..(1791): n is a, c, g, or t
  misc_feature (1813)..(1813): n is a, c, g, or t
  misc_feature (1815)..(1815): n is a, c, g, or t
  misc_feature (1851)..(1851): n is a, c, g, or t
  misc_feature (1859)..(1861): n is a, c, g, or t
  misc_feature (1869)..(1869): n is a, c, g, or t
  misc_feature (1873)..(1875): n is a, c, g, or t
  misc_feature (1886)..(1886): n is a, c, g, or t
  misc_feature (1928)..(1929): n is a, c, g, or t
  misc_feature (1932)..(1934): n is a, c, g, or t
  misc_feature (1948)..(1950): n is a, c, g, or t
  misc_feature (1969)..(1969): n is a, c, g, or t
  misc_feature (1972)..(1972): n is a, c, g, or t
  misc_feature (1982)..(1983): n is a, c, g, or t
  misc_feature (2000)..(2000): n is a, c, g, or t
  misc_feature (2002)..(2002): n is a, c, g, or t
  misc_feature (2024)..(2025): n is a, c, g, or t
  misc_feature (2081)..(2081): n is a, c, g, or t
  misc_feature (2093)..(2093): n is a, c, g, or t
  misc_feature (2097)..(2097): n is a, c, g, or t
  misc_feature (2099)..(2099): n is a, c, g, or t
  misc_feature (2101)..(2101): n is a, c, g, or t
  misc_feature (2103)..(2104): n is a, c, g, or t
  misc_feature (2106)..(2109): n is a, c, g, or t
  misc_feature (2128)..(2129): n is a, c, g, or t
  misc_feature (2131)..(2131): n is a, c, g, or t
  misc_feature (2133)..(2133): n is a, c, g, or t
  misc_feature (2142)..(2143): n is a, c, g, or t
  misc_feature (2163)..(2163): n is a, c, g, or t
  misc_feature (2165)..(2165): n is a, c, g, or t
  misc_feature (2181)..(2181): n is a, c, g, or t
  misc_feature (2183)..(2183): n is a, c, g, or t
  misc_feature (2192)..(2192): n is a, c, g, or t
  Peptide Sequence Number=SeqID_6375
  Probeset Number=SeqID_12532
tcgcttccttcccctctcccctcctcntnncacnnagcctcagctcggnntnncncntnnatatcggcttaaaggtcgtgcgtgagctgatccacnnnantactatcctctactaatatanagctctcggagtagagcgttgccactgcccgnncacgctgncttgcgctccgcggctaccgctgcttccctgattgtgaaacttgataagtcggcgttactgcctccactntcggtgcgtgtcttaggcctaggtgcagatattataactattanatctctcatatctgtcgtgnngtgctctggcctgtgctcnatgtcatatagtgtcntgtgttctgccgcgacgctcagctcgctctcagaggcacatcgtagagtngagcgccnntntngtnnangctgtacagagcanancacaccgagcactcntnctagtatcgnganattagagatagatgttctgctcagtcactatatctctgggtgtatcgtaatgttataacataatcacatntatgttctctaggtaagtatatggcaaacagaattgacgcacggcacgacgcncgactcgcatnatgtagagtattaacgatgacgcagcactgcatgagatcaaggacggcnggcagcaactactgcgcgacgatgtcgcatgtgggcgacgctgcgcacgagtattgtagacaacggctacccctactcnacgcccgctcgtgcagacgacgacgctctaccactatattcatacgactnacatatattntncttacatcactcatactgactgcnagcgacgagcngcagtacgctgctgatcgtgctcgcctgatcgcnagcgactataaccgatnnctncgctctcgagcgagagttcnatcatacgtcccactatcagtgatggnncttcgcgtcttacttgngatatncacgacatcnnatannacgcatgacagacacagnagtnactactatctgcagatgtnnaanagngtgatgtcggagagtgagcagantgatacgcggtgctgacagntagctggntggcangcgcnnctcgtacgcacatctatgataagacgagtangacgaacgaanngtcacnnntggtgttgangaagcgacgacgtgacgagaagttcacgagagcacatgatagagctatnctagtagacgatcacgctgctgatgatctgtnctngtncgttgnagtngaggaaangtgatcacgactactgtacgtgntctactactcgcgtgtntcgacgcgcggtctacannntnncnnntnntatgcgctgctgtctttactatctcnctcnttnnnnnnncnnctcnccggcgtactgctgtgactactacatcaccatcgtatactaccgtagcgcagtcngncgnganatgggatcgtgagtcgacgtagacgtcttcgcgtgactaatccagcgcagcagcatactcatnntnncgtcgagcatcgatagnntctcctaatctgacgatacgtgtgcgatcgatgaatcacacgattgtatnnnctcngaccttgatgatgcacgcgtgattatgtgacacgtatatttnnntangtcacatatcgtaccctcgatgctgctgtatctcgttgactctgnntgagtgatncagtaaaatagatcactgctatatcactacctcgtacaagtcatgcgccgctgtcacaggactgagagtatagtngcattgtagactagacatgatggnganattacaatgatcatcgntcgtacgtntcattcgaaantntnnttacaccatcagcgagcatgangngtacgtatgacgtcgcgacatcacagcactcagtgncgcatgcnnnttgtgtgngggnnnttagagatganacacagagctgcgacgcgcgacgactacgctgacacaccgtnngcnnnacactagtgtgagnnngagactattgacacgagcnatntcacaacatnntatcactagcatgacantnctgcgcatcatacgacgtgctnnacggtgctgcgaatcgcttatgacgtcgtcgcgtgctggtacgatgagtacgtctntagtgcgcgtgntggntntntnntnnnngctgacatcagctggatgnngntntcgtggctnntgctgatatggtatcacgangntgatgtactgcatgangncgatgctgn

SEQ ID NO: 2754 - DNA, 1464 bp, Glycine max
  misc_feature (1069)..(1069): n is a, c, g, or t
  misc_feature (1342)..(1342): n is a, c, g, or t
  misc_feature (1375)..(1375): n is a, c, g, or t
  misc_feature (1405)..(1405): n is a, c, g, or t
  misc_feature (1411)..(1411): n is a, c, g, or t
  misc_feature (1464)..(1464): n is a, c, g, or t
  Probeset Number=SeqID_12533
tgtgcatacactagtacgttttttaactggatttttaacccccctaaccccaggggcgtatgtggtgaatggtttaacgacggggcaccgcccaaaggccttttctcccaaaagaagaagacacagcacagataccaatttttctaccgaaaagaagagaagaactagtgtagataaccccctcccacgaccttatataataataaaattaatattctcgcgccccgcagagattataaagtgagtttgatttaagtgaccgtaggcagaaagaaggggtgaacgatagtttttttatatccagacagccataaattacgaccgacacggtgatctctagggagatcgtgccgaactgcgttagttttaaatgaaaagaacgcctttccgttgtgctacaaaccagcatattatgacgtgatgagcagcgagaagaagagattgggggcccattactctattcgtaccgttagcggttgagtgtaatgtacacggattagatgagaataacatatgacctctagggtctgatgcacgaaaagacctaatctatcaggagaagtgtacacgcaccctcacgaaattacagagtaatgatatgatgaagaggcgtacggaacatcaaagataagcgcgccaacggcatagggatgaacgacaataattacaaaaaatgtaggacggaataccaaaaacgtgacacgccgtcgctcccgcgactattaatgtagcgaaatacgaaaaagagagacagttggaagactggacgcggagagcgacgttagcgatgatctaagcacgacgacggcagtatacgagtttcacacgcgacggcaacatatctatagaggtattgtttcgtgtcacgcccccgacgatactattcagagattggatgtccgaggaatttacaccatgcgtacaacaacgttgagatgcaatgcgtgagctgggactaatatgtatatatatgagcgctagatcgctgaccggtgcacgatctacacgcacgccacagaattaatcatatattttaacatatatcttagccgcgacaaatagtacacgnatgactgagtacaatagacactgtatcgctataaacacttatgcgctacgcactagacttcttatgtgtatgtatcatattgcagcacgctgcagcacgcccagcgatatcgtgacgcgagatttacaagtgagatgtatagcgagcgtcacatgcgtctaggcgttgatatgcgtcggatactagcatcttcagacacctctcttagtacttgtaatgaatgcatagaggtccgattctatcaatactctctctatctgacgacgagaatantctatagctattatagtggtaaagacacgcgcntccactatagattagtataattatcatganctatcngccgcgagatggatatatgacacactatctgatgatgtaagcgtatggcgggn

SEQ ID NO: 2755 - DNA, 1761 bp, Glycine max
  misc_feature (1)..(1): n is a, c, g, or t
  misc_feature (95)..(95): n is a, c, g, or t
  misc_feature (128)..(128): n is a, c, g, or t
  misc_feature (173)..(173): n is a, c, g, or t
  misc_feature (175)..(175): n is a, c, g, or t
  misc_feature (229)..(229): n is a, c, g, or t
  misc_feature (231)..(231): n is a, c, g, or t
  misc_feature (299)..(299): n is a, c, g, or t
  misc_feature (394)..(394): n is a, c, g, or t
  misc_feature (443)..(443): n is a, c, g, or t
  misc_feature (605)..(605): n is a, c, g, or t
  misc_feature (619)..(619): n is a, c, g, or t
  misc_feature (667)..(667): n is a, c, g, or t
  misc_feature (856)..(856): n is a, c, g, or t
  misc_feature (1225)..(1225): n is a, c, g, or t
  misc_feature (1253)..(1253): n is a, c, g, or t
  misc_feature (1288)..(1288): n is a, c, g, or t
  misc_feature (1329)..(1329): n is a, c, g, or t
  misc_feature (1338)..(1338): n is a, c, g, or t
  misc_feature (1459)..(1459): n is a, c, g, or t
  misc_feature (1659)..(1660): n is a, c, g, or t
  misc_feature (1701)..(1701): n is a, c, g, or t
  misc_feature (1737)..(1737): n is a, c, g, or t
  misc_feature (1739)..(1739): n is a, c, g, or t
  misc_feature (1746)..(1746): n is a, c, g, or t
  Peptide Sequence Number=SeqID_6376
  Probeset Number=SeqID_12534
ncgagagggagacgatgtggagtacgtagagacaaacgagcagatacttataagcagtggggacagcgtggctagtcggcacgagatcgagatangagtgagacgttcgcacgagtctgagcggagtnagcgtgacggagagagcgattagcgtagatctgggtgagagctcngntatacgtgaagcagagtaatgatatcgtgtgtcatctgcatacgagatgtgagntnacacatggtgtcagatgggtaacgtggcgagtgccagcggtgtgtgtgtcgatgtgagaggaggaagnagtgatagttgaaggagtcgcgtatcggttgccgtatacagtcaaatatcgtgacaacgcaggacgcgcgatatctattagatgagagatagtangtgcagtatattaccgtgtcacacgacgtcgctgtagtctgagtctcangatagcgtcgtgtgtagtcgcgaagcgagtgtggagatgatgtgtgacagcgcggcaggacgcgagcattctatcgagttgagatgagtagtgcgagagcaatacgtgtgtcacgtgtgctgagcgtgcatactataacaaggtgtgaggtgaaccagctgntatattacacatgnacaagaactagagagtaagtatcgcgtagcatacttcatatacaagantggcgtgagacgggtgacggcgactgacacgttatgtacgtgtagtcggtgagaatggaacagctgagtcagctagatgaacattgtaatattagcttatcaggagtaagagagggagtgtgagtggtgagagagacgtgtagagagacgcagattgtgcgcactgatcagggcgcgtacacagacacngcgcggtggaggtgcaggtcggtcgatacgataacatagtgaagacagatgcagtgagagtatgaggtgggagtgtgcgacgaggtgcagatgaggatagtgtggtgtgagtgagggatgatatgtgagagaggcgtaggtggatgtaggtagtgtgtgtggaatagagctgctagactgaagtctgagacgcgtgtagagagacggatacgcagccgcacagcacgcagtgacaggtctggcgcgtcatagatgcggcattgaagttcatgatattgatcacgaagtgcgttgtaggctgcgtaagtatctatacgtaactgactggcatagatcagctatctggatactgtctctatggttgagatnagcgattagaggcatacagatataatanaatagcagaatgagcagaggatgtgaagaagcgangttgaggaagatcatcgtgcagcggatgcggtgtagcgtgncgggacagntgagtgttcagcatatcgataaggagatgagaacagtaaattctggtcgtacctcgccagcccgctcctgaattggagatatgttgataagattgatgagagatctcggatatgcgtgagntagtgcagatgtagcccatattcttactcgttatacctgcttgtacttgtctggtgcgtacgctagtatggaggtatatgtgcaatatgtagtgagtctatgtgagaatagggtgatatatgtggtgctatgagtactgtgtgtagttagttaatagtatctcttcgggtatgcgtccaggctcgtccactctctctgtnntactatgtgctttggtttagattctgtatgtctgtcgtgtnttctcattcgctagtggtgtggttcgcattctgtantnattactntcacacacgacaatc

SEQ ID NO: 2756 - DNA, 753 bp, Glycine max
  misc_feature (14)..(14): n is a, c, g, or t
  misc_feature (18)..(19): n is a, c, g, or t
  misc_feature (31)..(32): n is a, c, g, or t
  misc_feature (76)..(78): n is a, c, g, or t
  misc_feature (100)..(101): n is a, c, g, or t
  misc_feature (131)..(131): n is a, c, g, or t
  misc_feature (133)..(134): n is a, c, g, or t
  misc_feature (269)..(269): n is a, c, g, or t
  misc_feature (281)..(281): n is a, c, g, or t
  misc_feature (322)..(322): n is a, c, g, or t
  misc_feature (343)..(343): n is a, c, g, or t
  misc_feature (376)..(376): n is a, c, g, or t
  misc_feature (397)..(398): n is a, c, g, or t
  misc_feature (464)..(464): n is a, c, g, or t
  Probeset Number=SeqID_12535
gcgagggagaatantgannagaatttaaaannttcgcgtcaataggacttttgttgcttataggcactaaaagagnnntcctgaagaaagggagtggggnngatgctatagatgagtgacgcgcagtggcncnntggaaactaacatcttagagactctatcctaggaatgaattcaagagttttctttgggcccaaagtaggagagactttgacactcgaagggtaatagaacccttcctacgtttagtctaatgtttctcgtgaaanaacgtccagggnttccaacctatcacaagaaagagctggtgccatgaatgcancttgttcgagtctcagcagtnccttactttaatggacctttcttattgaatctntgattgtgatcaactacatannaacaacagcaaaggccttgagggaaagcttatgtgctttatgaaatggatcccaaccttgggaaancatgtttgcttatgtccagtttccgcagaaggtttgacgagtattgataggaatgatcgatatgccaatcgcaatacagttttctttgatataaacttgagaggtttgggagggcatccagggcccggttaaggggggtactggatgtgtcttcaacaggacagctttatatggttatgaacctgctcttaaacccaatcataaaaagcctgagttgttatcatcaatctatcatgcaaaaaggaacaaaaagcatccatgtaccataaaacaatcaccccgaaaaaaa

SEQ ID NO: 2757 - DNA, 394 bp, Glycine max
  Peptide Sequence Number=SeqID_6377
  Probeset Number=SeqID_12536
tggaactcctccgaaaaattactatttgcgggcggacactggcagtaaaattatgcgggtgaattgcgttcaatgctaagaatgccccaccagaaccaaccttggtatggaccttacactctaccacataaacgactcctcctcagggaaatttgttccctgctatccagaatattgcgaagagatctatgtttgtctgcagacccgatacactgctaatattacctgtccatatctggagatatatggagatgggagctctactgctggatactctctagaggatctctcactttatgaacaagtgtctgtcgaccctacaactgaatcactcaatggacgtattgtatgtgggcgtggtgcaacactgtctggagatctaaatgcttccaac

SEQ ID NO: 2758 - DNA, 181 bp, Glycine max
  Peptide Sequence Number=SeqID_6378
  Probeset Number=SeqID_12537
atcaagggtggaccagacgccacaccgacgcaaaccctcaccactctcccctccgtctcgcaccattccctcgccggcggcgccgcctcgccgacgccgccatgctccgcctccggcgcagcgtgctcgccaagctcctcccgtatccttccgtcttccccgtctctcctctccatcgctt

SEQ ID NO: 2759 - DNA, 1450 bp, Glycine max
  misc_feature (689)..(689): n is a, c, g, or t
  misc_feature (1074)..(1074): n is a, c, g, or t
  misc_feature (1187)..(1187): n is a, c, g, or t
  misc_feature (1239)..(1239): n is a, c, g, or t
  misc_feature (1292)..(1292): n is a, c, g, or t
  misc_feature (1309)..(1309): n is a, c, g, or t
  misc_feature (1317)..(1317): n is a, c, g, or t
  misc_feature (1359)..(1359): n is a, c, g, or t
  misc_feature (1390)..(1390): n is a, c, g, or t
  misc_feature (1450)..(1450): n is a, c, g, or t
  Probeset Number=SeqID_12538
ttttattatttcttattgtttatgggacatagacaccacgacaggaaaagagatgagatggcgaatatgggggataggggacccccgctcgaggtgcgacggtgattgggtaagctctttatttttttttcttttcctcaagcgggaacagaataacatttttaagggtcaagaagagccaaatacatgtagatgcataattctgcgatagtaacgagctggctcgcagcaaatggtgaaacccatatttgggtaaatatgctagttttacgctctactgctttggctaactaccgcacttccgctcaagacgcattcgagatgcgcgaggaaaattaatgtacctggtaatacccacgggggggagcaatactaagagggagacctgcggaggtgaggacgaatttagggggcgtgagcggaggtgactccccacgggcggtgagtatgtattatgaatacttcttatgggcgagagaagtgtagaaatggatcacctgtttctcttgtgcttctcgcaagaaatcagtacacattcatactctagctttggcgaacgtaagaactaccacccgttgcgacaaggcaacccagaatacctccgaattaaccgtgtctgtgggacaaagcagtccctttcaatccgatcgcggatgtaaatacagcgatgacacgggtggagtttatantacgaagtctcccatcattgtatgtgggcatctactctgtaacgactgtggtgatcgtaaaccagtgcgaaagcggaatggtgatatctacttacgtcgtatcctctcttccacattcgtttatataagaagaagtggcaacatgttttattgtacactgtgcaacaacaagaacacgcgcgggccacagtctcggtcacttcagcggccatcgaccgcactgctgatatctacgaccttcaagcgtcacacccgaatgtattcaatatagcttgagtgattctgtgtgggcactcggcttagcagtccgtacgcaccgttacaacaatttgcagagactcacatcagtctctgataatccgactgtatactcgacgctgtgtgncgtgtgatgaatacggacctgtcagtctctctagtgcctctgcggaagatacaggacgaagcgctgtgccgcatacgggactccggcacgccgcccataacatttcactccgntgtctgcagacgctgaatcctgacgctgcagcacgacccacactgcagcccnagatattattgatacagcgctcatgagagattgcccgactaatttagagatcngtgtcgaagctctccanacatatantaggcaactagcgcgcgctgcacgtctcaacctgcagtgtgngtgtacgcgcgtagtcgcgtgcgctccgatntacacgatccgtctcgtagctactgtcgaaaatatcgcacgacaggcctctacatctgtn

SEQ ID NO: 2760 - DNA, 1695 bp, Glycine max
  misc_feature (88)..(88): n is a, c, g, or t
  misc_feature (263)..(263): n is a, c, g, or t
  misc_feature (267)..(267): n is a, c, g, or t
  misc_feature (289)..(289): n is a, c, g, or t
  misc_feature (469)..(469): n is a, c, g, or t
  misc_feature (497)..(497): n is a, c, g, or t
  misc_feature (555)..(555): n is a, c, g, or t
  misc_feature (557)..(557): n is a, c, g, or t
  misc_feature (573)..(573): n is a, c, g, or t
  misc_feature (588)..(588): n is a, c, g, or t
  misc_feature (601)..(601): n is a, c, g, or t
  misc_feature (605)..(606): n is a, c, g, or t
  misc_feature (610)..(610): n is a, c, g, or t
  misc_feature (710)..(710): n is a, c, g, or t
  misc_feature (724)..(724): n is a, c, g, or t
  misc_feature (760)..(761): n is a, c, g, or t
  misc_feature (775)..(775): n is a, c, g, or t
  misc_feature (821)..(821): n is a, c, g, or t
  misc_feature (831)..(831): n is a, c, g, or t
  misc_feature (845)..(846): n is a, c, g, or t
  misc_feature (851)..(851): n is a, c, g, or t
  misc_feature (858)..(858): n is a, c, g, or t
  misc_feature (875)..(875): n is a, c, g, or t
  misc_feature (884)..(884): n is a, c, g, or t
  misc_feature (912)..(912): n is a, c, g, or t
  misc_feature (1007)..(1007): n is a, c, g, or t
  misc_feature (1012)..(1012): n is a, c, g, or t
  misc_feature (1022)..(1022): n is a, c, g, or t
  misc_feature (1093)..(1093): n is a, c, g, or t
  misc_feature (1241)..(1241): n is a, c, g, or t
  misc_feature (1284)..(1284): n is a, c, g, or t
  misc_feature (1304)..(1304): n is a, c, g, or t
  misc_feature (1312)..(1312): n is a, c, g, or t
  misc_feature (1319)..(1319): n is a, c, g, or t
  misc_feature (1351)..(1351): n is a, c, g, or t
  misc_feature (1385)..(1385): n is a, c, g, or t
  misc_feature (1461)..(1461): n is a, c, g, or t
  misc_feature (1499)..(1499): n is a, c, g, or t
  misc_feature (1538)..(1538): n is a, c, g, or t
  misc_feature (1545)..(1545): n is a, c, g, or t
  misc_feature (1567)..(1568): n is a, c, g, or t
  misc_feature (1576)..(1576): n is a, c, g, or t
  misc_feature (1578)..(1578): n is a, c, g, or t
  misc_feature (1580)..(1580): n is a, c, g, or t
  misc_feature (1583)..(1584): n is a, c, g, or t
  misc_feature (1587)..(1587): n is a, c, g, or t
  misc_feature (1596)..(1597): n is a, c, g, or t
  misc_feature (1604)..(1605): n is a, c, g, or t
  misc_feature (1609)..(1609): n is a, c, g, or t
  misc_feature (1611)..(1611): n is a, c, g, or t
  misc_feature (1613)..(1614): n is a, c, g, or t
  misc_feature (1618)..(1619): n is a, c, g, or t
  misc_feature (1623)..(1623): n is a, c, g, or t
  misc_feature (1625)..(1625): n is a, c, g, or t
  misc_feature (1628)..(1628): n is a, c, g, or t
  misc_feature (1644)..(1647): n is a, c, g, or t
  misc_feature (1650)..(1650): n is a, c, g, or t
  misc_feature (1662)..(1679): n is a, c, g, or t
  misc_feature (1684)..(1687): n is a, c, g, or t
  Peptide Sequence Number=SeqID_6379
  Probeset Number=SeqID_12539
ttctcatcatatgctcatgtctgcatcgcgcgattgatagctcagctctgatacgcgagtcggtcgtgtactcgacacatcacgtgcnactatctgcgctacatacgtgtacgctcacacaacgcacataccagtcgccgtcatcgcctctcatccgctcgcgctatcgtcgcagcacacgcatctatattgcttgtctctactgtctaatagcgagtcgtgtgctgtgtcatctcgttctcatatgctattatctaccgtgnttantcgatcgtcccagatctctacncacgcgatatcatcacacatccaatctactgatagtctcgcgagtcgtctgcgatcgcatagtacgatatcatcgcacacatctctcgtcctgtcgttcctccatatcacacaccgtccacccactctctctcgcgtacagtcttcgcatctcacctctacatcagctatcttcgtccgntcgtctcctcatcgtctcgacatcgtcnagtctcttcgctgcgtacttatatcatatcttatcacgtcgcgtgcgcacacactctncnctcactctctctatcncttcccgactctatnaccgctgctacancgcnntctntctgtctgtgactctgacatgcgactgcgtactcgtcatcatttttatcatctccatgtctgtgtattgtcttgatctcagacagcagtcgatctcgtgnatgtctctcgtttnaagagagttgtgtgtacgatcgaatcgtgagtgccnnatacgtctatttantcaccatcacgaaagtatatgattttccactaattagctatttgangcggtaaagncacagatttatganntgatngtgaagnaatatgaagtgattagntatgtgcanggttgcagtcgatacgtgtgagcagtgntgtgacgcgaatgataggacgtgatagacttgagtcgtggtacgagtgatggtgtgagagcgtcgggacagcgagatagagaggtgttgagacgnggcgnggacgtgtgntcgaagtacatgtgcgatgtgctgtgtgctagcgctgcgcagcgttcgcgcccacgagaagttctctacancgcgcgaccgcagacactgcactactgcggatcatgcgcactagccggtcgcatataacgtatcttcgcgcacacgacgcgatcacgatctccacttcgcccactcgcctctcaactcttcacatctaccgccttatctcttcttatnactctcttctcctctacttccatctctactgtctctattacanatatcacacacacctcctcnttccatcnaaataantgcacactcacgtttctatcacatactgagtnctcctcctactcatccgtccgcacttcccgtctnttgcgctctctcacacaacattccccacctatacttctcactcactagcatctctctactctctcccatctccctncccaccaaactacacccacccgcacgacaatctctcanaccatctatcgcgtccgtgacacaggcacctcgcgggcngctgagngcggcgccgtcgagcggagggnngccggtcnantnccnngangcccaggtnncgcaganncggncnanngtgnnacancncancgcccgcggcccccgnnnngcnggccttgggggnnnnnnnnnnnnnnnnnnccccnnnnaaaccccc

SEQ ID NO: 2761 - DNA, 470 bp, Glycine max
  Peptide Sequence Number=SeqID_6380
  Probeset Number=SeqID_12540
aaatgaaacatccaaagtaatggcagggcacttacccgtacacaccatgcaaggattaacacggtgttcatacatacatgttccatccaattcaccaaataaacacaacaacttaatcagcaccaccactaccactactgctactactacatcattccatcagttactggacttggcactgctagcggtttacaaatggccaaataacaccaacaagcaagagccactacatggaagagaacatgcaaattaacactagccagagactgcagtctgcagaccccatctaatatatatgtggcaggtgggctggtggacgggccatctaatatgaaagcactcaagttgcacacatgccaaatcgaccaacatgcgtgcatgtatgccatcaaaaggatcggatgcgagactcaagtcaacaagccaaacacaggcaattacttgatgtatgtgtcatccttccttgcaat

SEQ ID NO: 2762 - DNA, 1528 bp, Glycine max
  misc_feature (19)..(19): n is a, c, g, or t
  misc_feature (21)..(25): n is a, c, g, or t
  misc_feature (27)..(27): n is a, c, g, or t
  misc_feature (29)..(29): n is a, c, g, or t
  misc_feature (34)..(34): n is a, c, g, or t
  misc_feature (36)..(36): n is a, c, g, or t
  misc_feature (38)..(39): n is a, c, g, or t
  misc_feature (41)..(41): n is a, c, g, or t
  misc_feature (48)..(48): n is a, c, g, or t
  misc_feature (127)..(129): n is a, c, g, or t
  misc_feature (133)..(133): n is a, c, g, or t
  misc_feature (144)..(145): n is a, c, g, or t
  misc_feature (149)..(150): n is a, c, g, or t
  misc_feature (152)..(152): n is a, c, g, or t
  misc_feature (271)..(271): n is a, c, g, or t
  misc_feature (294)..(294): n is a, c, g, or t
  misc_feature (447)..(447): n is a, c, g, or t
  misc_feature (641)..(641): n is a, c, g, or t
  misc_feature (831)..(831): n is a, c, g, or t
  misc_feature (1056)..(1056): n is a, c, g, or t
  misc_feature (1218)..(1218): n is a, c, g, or t
  misc_feature (1254)..(1254): n is a, c, g, or t
  misc_feature (1265)..(1265): n is a, c, g, or t
  misc_feature (1418)..(1418): n is a, c, g, or t
  misc_feature (1488)..(1488): n is a, c, g, or t
  Probeset Number=SeqID_12541
ttttttttttttttttttnannnnntncnggggncnanngngtaccgnggtgagggatgtgtgagagtgagaagtaacgtacaatatacatgaatacatatatgtagtgtatttataattatatctnnntaanccccccccccnngggnnanatatatatattcggatgactctccacacagctgggagtgggacgcgcgccgggtattgttaaatatattaagtgtggtaaattcgcctccacggcgttctagggagaggtgggatgtgnagataaacgagagagacctaatnacaccactgcgacagacgagtcacacgagtgtgctgaagagtgggagagaggagaggcgcagtgtagctgtcgtagcaccccagcgtcactatgcactctatccctacatcgacggagcgctcaattactccagatctaatgttggtagtgcnagtgagcgcgctgaccataaatgatgtatgactataaatgctaggagtatgcaggatgttatgtaattattataatgcggtgaagctctaacaacacagaggcgaggttgtatgagagagggcagtacaataattctggctcgcggcgtgctgtggatgcgtttataacgttgtgggacctcgcatggctcagncgccgtggtatgtctttcgtggtcgcgctgttgtgtgagtgatgctgtttctgcgcggtcgtggttggtacagcacgaatgtatgatcacctataataagcttaggacactcgcgccacctatatatgataaatactatctacctctacaacgcaaaagccaagctaggagagttggtcagctcgacggncgtcctgatgtagcagatatgagactgaatgctctagctacgacgccctccaccagccgcaccgtccgctgagagtgtgatataggagaagattccgatacactgtgttccgtccgctgcacttgcctcatcggcagaaatgcgtcgcgtgggtctgcgcgtagcgcgggggaggagtgtggtgagcacagaacacttctctactacgggtatatgacttacgancagtctcagtatcacatccagtctctctcacagcctatctttacgcgtctacgtagctatgtgaatgaggccaaccgccctcgcatctcttctcaccacagatgtgcggtacgtcgcccggtgccagcgtgcgattatcctacaaggcctacaatcgttcancaacatgtgcgacatactgacacgaacgatgatcgncatataagganggacgcggacacagcgatagtacatactcatcagtgtgcgtcagcgtcgtcctacatggggcgcgagcacagaggctggcggtctgtgtcacagcggtgagtctgtgtccgtcacggatcatctatcactactcattctactacacacgactnttatcctactatctccaaaattagtcagtgacacgcgcagacgacaactatccgtgactctgtgatgcantagaggcgatacatatcgacactcactcgcgatctgcacg

SEQ ID NO: 2763 - DNA, 515 bp, Glycine max
  Peptide Sequence Number=SeqID_6381
  Probeset Number=SeqID_12542
acaagcacacatacacacccagagcgaacgaagcagtagcaatcaatcgaacagccatgaagaagggaagcagcgccgccgtcctgctgatgctctcgctcgcggccctcctcctcgtcggcgccgccgtcgcggacgacgccatcattcgcctccactccgacgcggggacgggggagacgaggccgtgggactgctgcgaccaccccgtgtgcaccaagaggagctggtgcggctgcaaggacgtggtcgagcagtgcttccccgcctgcaggagctgcaagccggccaagcgagcggacgagtcggccccttccggctacatgtgccgggacgcctatcacggcagtcccgggcctaagtgcatgctctgattctcatatctgtttgttgttcgagatggacgtacggtgctagctgcctagctgacgtgtctgatgttgtagcactactacgctagctgctggtgagcctagctgtacggcagcgattgaataagattttttttttgcggg

SEQ ID NO: 2764 - DNA, 1683 bp, Glycine max
  misc_feature (21)..(21): n is a, c, g, or t
  misc_feature (25)..(25): n is a, c, g, or t
  misc_feature (27)..(28): n is a, c, g, or t
  misc_feature (31)..(31): n is a, c, g, or t
  misc_feature (35)..(36): n is a, c, g, or t
  misc_feature (55)..(55): n is a, c, g, or t
  misc_feature (60)..(60): n is a, c, g, or t
  misc_feature (73)..(74): n is a, c, g, or t
  misc_feature (90)..(90): n is a, c, g, or t
  misc_feature (101)..(102): n is a, c, g, or t
  misc_feature (106)..(107): n is a, c, g, or t
  misc_feature (131)..(131): n is a, c, g, or t
  misc_feature (144)..(144): n is a, c, g, or t
  misc_feature (147)..(147): n is a, c, g, or t
  misc_feature (235)..(235): n is a, c, g, or t
  misc_feature (244)..(244): n is a, c, g, or t
  misc_feature (250)..(250): n is a, c, g, or t
  misc_feature (279)..(279): n is a, c, g, or t
  misc_feature (308)..(308): n is a, c, g, or t
  misc_feature (337)..(337): n is a, c, g, or t
  misc_feature (382)..(382): n is a, c, g, or t
  misc_feature (448)..(448): n is a, c, g, or t
  misc_feature (459)..(460): n is a, c, g, or t
  misc_feature (538)..(538): n is a, c, g, or t
  misc_feature (569)..(569): n is a, c, g, or t
  misc_feature (596)..(596): n is a, c, g, or t
  misc_feature (604)..(604): n is a, c, g, or t
  misc_feature (606)..(606): n is a, c, g, or t
  misc_feature (634)..(634): n is a, c, g, or t
  misc_feature (677)..(677): n is a, c, g, or t
  misc_feature (690)..(690): n is a, c, g, or t
  misc_feature (771)..(771): n is a, c, g, or t
  misc_feature (773)..(773): n is a, c, g, or t
  misc_feature (826)..(826): n is a, c, g, or t
  misc_feature (876)..(876): n is a, c, g, or t
  misc_feature (958)..(958): n is a, c, g, or t
  misc_feature (980)..(980): n is a, c, g, or t
  misc_feature (983)..(983): n is a, c, g, or t
  misc_feature (1008)..(1008): n is a, c, g, or t
  misc_feature (1024)..(1024): n is a, c, g, or t
  misc_feature (1030)..(1030): n is a, c, g, or t
  misc_feature (1061)..(1061): n is a, c, g, or t
  misc_feature (1095)..(1095): n is a, c, g, or t
  misc_feature (1097)..(1097): n is a, c, g, or t
  misc_feature (1137)..(1137): n is a, c, g, or t
  misc_feature (1209)..(1209): n is a, c, g, or t
  misc_feature (1219)..(1219): n is a, c, g, or t
  misc_feature (1225)..(1225): n is a, c, g, or t
  misc_feature (1240)..(1240): n is a, c, g, or t
  misc_feature (1254)..(1254): n is a, c, g, or t
  misc_feature (1281)..(1281): n is a, c, g, or t
  misc_feature (1297)..(1297): n is a, c, g, or t
  misc_feature (1366)..(1366): n is a, c, g, or t
  misc_feature (1426)..(1426): n is a, c, g, or t
  misc_feature (1444)..(1444): n is a, c, g, or t
  misc_feature (1462)..(1462): n is a, c, g, or t
  misc_feature (1470)..(1470): n is a, c, g, or t
  misc_feature (1472)..(1472): n is a, c, g, or t
  misc_feature (1490)..(1490): n is a, c, g, or t
  misc_feature (1497)..(1497): n is a, c, g, or t
  misc_feature (1548)..(1548): n is a, c, g, or t
  misc_feature (1579)..(1579): n is a, c, g, or t
  misc_feature (1592)..(1592): n is a, c, g, or t
  misc_feature (1612)..(1612): n is a, c, g, or t
  misc_feature (1683)..(1683): n is a, c, g, or t
  Peptide Sequence Number=SeqID_6382
  Probeset Number=SeqID_12543
gttgtgtgtgtggtgctcttntttntnnttncttnnctttctgcctctgtctgtntcgtncttcaccggcccnntctcctcctcgcaggncgatagcaccnnaacnnaccacccccgcagcgcgcacaatngagtgatacgccnacncccaagcagacaagaaactgaggagattgttgttggtataatcaaatccacaacaaccattaacacaatcatatcaggcaggatgagngaaggagcncgcccncgcgacggaccagataggggctcatggcngtaggacgacagagtaagcgctcgagcanggagagccgacgcgacgagaagcatatancaaaatgtatctacacataaaaagcacagcgacaccacgatatanactagactgacgagagatgtatagcaatgcacaacggcagtgtataacaggatagatgacatactnatcatcctgcnntgtgtcgtcctacctcatacgactagcatctctcaagctacacctgtcatctgattttagtaagtactagcaattacntagatataagatagtgagaggatagattaangcggagaggcgctcgcgatgtgatatncacgtgangngatcgccccagtagcgctgcccagagcncagcacatgaatgagatgagcgacaacggcgctgcgaggccantacgctatattgnatgagtgtgcgcgtgctgatgtaatgtgcctgtgtaaggataggatagatcctaccacaaaacaacaacacaccactgagntntatcatatctcaggatgcggaggaacgacactgtatgcgatgtacgtaggccntctcgcactacgtagacatgaactacgccaggaccaagtatgcgcaggcntaagtgactatggtagatcaactgtgtctagcgcatatacagacacagtaggcatattgctgtgagtagatcatgcgctctnccaccgctgctcctccacgctngtngttgtgtagagttgttgagatgttntgagctcctgctgatntgcgancgcacgcatgacactccgcgacgcgcagcgnctagcatatagatgagagacacgtatatcaagangngagagcgcgacgcacgctgacacgtatcatgactatactntctcttgatgaattactacatgactctattcgcaagacactacacgtatgagtactggatactgcagtaganacagtatgtngtaganagatgaagatgtgangagtgaatgtgtanagtagtacccacacactcaccaagcantgtactgtctattagngaagcatgataactcgtctgtatctcatctcaatatgacatagtggtcgtgccgcagacgtagacgccncggtgcacgtcatctcgtatcatgacatcacctgtaatagtcattagctcaatcccatangactcagaatatgctacnacataactgagcgatgtnctcaatantntcgaatcatgcatgactnatatctntacacacgtgcaattctactctcatcgcagtctatatactatacatatcantatatatataaacaatctctatatgtatgantctcaatgtctangcgcactggtacatatgagntgtcggtgcgcagccagagacggtgctgcgccgcagcggttgcagtgcgaacgctctctcacctcactctn

SEQ ID NO: 2765 - DNA, 1635 bp, Glycine max
  misc_feature (22)..(22): n is a, c, g, or t
  misc_feature (28)..(28): n is a, c, g, or t
  misc_feature (53)..(53): n is a, c, g, or t
  misc_feature (91)..(91): n is a, c, g, or t
  misc_feature (94)..(94): n is a, c, g, or t
  misc_feature (97)..(97): n is a, c, g, or t
  misc_feature (103)..(103): n is a, c, g, or t
  misc_feature (109)..(110): n is a, c, g, or t
  misc_feature (127)..(127): n is a, c, g, or t
  misc_feature (152)..(152): n is a, c, g, or t
  misc_feature (167)..(167): n is a, c, g, or t
  misc_feature (182)..(183): n is a, c, g, or t
  misc_feature (203)..(203): n is a, c, g, or t
  misc_feature (241)..(241): n is a, c, g, or t
  misc_feature (247)..(247): n is a, c, g, or t
  misc_feature (264)..(264): n is a, c, g, or t
  misc_feature (271)..(271): n is a, c, g, or t
  misc_feature (297)..(297): n is a, c, g, or t
  misc_feature (330)..(330): n is a, c, g, or t
  misc_feature (333)..(333): n is a, c, g, or t
  misc_feature (336)..(339): n is a, c, g, or t
  misc_feature (341)..(341): n is a, c, g, or t
  misc_feature (345)..(346): n is a, c, g, or t
  misc_feature (351)..(351): n is a, c, g, or t
  misc_feature (358)..(358): n is a, c, g, or t
  misc_feature (364)..(365): n is a, c, g, or t
  misc_feature (520)..(520): n is a, c, g, or t
  misc_feature (579)..(579): n is a, c, g, or t
  misc_feature (608)..(608): n is a, c, g, or t
  misc_feature (613)..(613): n is a, c, g, or t
  misc_feature (615)..(615): n is a, c, g, or t
  misc_feature (621)..(621): n is a, c, g, or t
  misc_feature (625)..(625): n is a, c, g, or t
  misc_feature (627)..(627): n is a, c, g, or t
  misc_feature (654)..(654): n is a, c, g, or t
  misc_feature (681)..(681): n is a, c, g, or t
  misc_feature (722)..(722): n is a, c, g, or t
  misc_feature (894)..(894): n is a, c, g, or t
  misc_feature (904)..(904): n is a, c, g, or t
  misc_feature (931)..(931): n is a, c, g, or t
  misc_feature (939)..(939): n is a, c, g, or t
  misc_feature (946)..(946): n is a, c, g, or t
  misc_feature (1040)..(1040): n is a, c, g, or t
  misc_feature (1042)..(1042): n is a, c, g, or t
  misc_feature (1164)..(1164): n is a, c, g, or t
  misc_feature (1187)..(1187): n is a, c, g, or t
  misc_feature (1263)..(1263): n is a, c, g, or t
  misc_feature (1535)..(1535): n is a, c, g, or t
  Probeset Number=SeqID_12544
ggtggatgcacccacacccctnaataantaagaattgagtatgtgagcagcgncactccacccactctcacccctcctattgctctcttcntcntanttccanacattnncaccacactgtgggcgntgcgttactccttattcatctacantaatatataacgagngtaatgttgtatgcnnttcttattattttatgtgtngtatattctagatgctagctcatctcacgtgatatgancactgnctctaccccactcactnacacccnacccacacacagcgcaacatcgctgngcgtacgcatgtcgtacccaacgacgcatatgntantannnntnatannactantggaggngagtgnngcgcgattgcacgtgtccgcacttggttgtcgtccccaacacacgccagcgcgctgttctacgtgctggcatacatgatacgtcactctcttatactaggatcgcgcgaagaagggaggaagatagtaaatatatattattgaatgataataaanagacagatataatcatagactagtatactacaaagataagaagtagagataatatagantacttagagagaatagagagaatatgagnagaananacacancatncnacaaagtgatatgagaagaggatgacnagacgctgctcgactcatcatctcccncccccaccaacatctaccaacatgtttataagttagtgttnattgtgtatatagtatattctatatatatcagaacaacatctattaattctcataacaagagcaccaacacactatatcactatatataataatcacataccataccacagagctggggtgtggcggctccattactacatgtatgcatgttcatattagattatgacgatnagatgagcgngtggtggaggacacacaacgaaaaganatataganaagaaanagtcatacaacactaccgcgacagagatgagaacaaggataaaaaccgacgctggcgcacaccacacctcgtgtgatgtgttagagcagatatnancgcgtcttgctcttctgttcatctctcatcgttctattcgattctcttgctctctcttgctgttgatataactcatggacaatgatgtagtcatatacgtatatagtctgtgtagtcgacanttactataacagtgatgtatgcntcaagattatagtcacacacctgatgcatccgctgcgtgtgctatgcttatgacgtgtgactatgctcactcaccncgctgcgcgctgcaatgagcgatgtccgtgttcgtgccgacgtatgatcgatagtctaaaggatgtacaatgacggggtaagtgtgaatatgtttgtatattatacgatgtaagtgcgagcgctactagttgcctattgatatgtatcctctcactcgtcagatcacgcgatgagctccgagtgatgttgactacgtcccgatacgatctacgttctctacaatccaatatctggtagctgcctatatataaactatgatgatgacatactnatctcagatcgagatgttagagcagtcgtagcgaagtacgagtttctcatgcgtgtgggccgtgcggctgatgtctgctgtgtgtgtgtgtatgtgtgtg

SEQ ID NO: 2766 - DNA, 325 bp, Glycine max
  Peptide Sequence Number=SeqID_6383
  Probeset Number=SeqID_12545
tgttggctgttctcttgtgcttatgaatgctaagcgaataacgatgggacctgaccaaccctgtatcctccacatgctggacattcctccggctgaaaaaccattgaatggtgttaaaatggaatagaaggatgctgcattccctcttcttaaaggtgttgctgccacaactgatgtggctgaggcatgcactgaggtcaatattgccgagatggtaggcggattcccaacaaaagaacgtatggagaggaaggatgtgatgactaagaacgtataaatttacaagtgccaagcttctgcccttgaaaagcatgctgctgccaac

SEQ ID NO: 2767 - DNA, 419 bp, Glycine max
  misc_feature (254)..(254): n is a, c, g, or t
  misc_feature (338)..(338): n is a, c, g, or t
  misc_feature (347)..(347): n is a, c, g, or t
  misc_feature (358)..(358): n is a, c, g, or t
  misc_feature (393)..(393): n is a, c, g, or t
  misc_feature (416)..(416): n is a, c, g, or t
  Peptide Sequence Number=SeqID_6384
  Probeset Number=SeqID_12546
ttttttttttttttttttgaatgaacttttaagtttaataataattatcaaggacaattatgaatactgactataaatgaatgaaaccattttttacgcataaattatgaggggagagtattcatgaatttccttataaatcctgtgtttaccaccatctggcggcgactttagtttgggagagtctggtcaaatcagcttgtccagtgacgacaccaccatcgataccgcattggccgaaagcgattctgaanaaaccgttttcaccccaagctgggccccaagagttggcgacgatccagtagttggtaccgttttcgttaccccaaccgatgatnttgacagcntgaccaccganagcagcaccactttggtgagtgtagataccaccanagtaggacatgaaatcttcgtanacg

SEQ ID NO: 2768 - DNA, 1496 bp, Glycine max
  misc_feature (1)..(1): n is a, c, g, or t
  misc_feature (7)..(7): n is a, c, g, or t
  misc_feature (26)..(26): n is a, c, g, or t
  misc_feature (33)..(33): n is a, c, g, or t
  misc_feature (40)..(40): n is a, c, g, or t
  misc_feature (42)..(42): n is a, c, g, or t
  misc_feature (57)..(57): n is a, c, g, or t
  misc_feature (75)..(75): n is a, c, g, or t
  misc_feature (77)..(77): n is a, c, g, or t
  misc_feature (84)..(84): n is a, c, g, or t
  misc_feature (110)..(110): n is a, c, g, or t
  misc_feature (119)..(119): n is a, c, g, or t
  misc_feature (130)..(130): n is a, c, g, or t
  misc_feature (191)..(191): n is a, c, g, or t
  misc_feature (216)..(216): n is a, c, g, or t
  misc_feature (236)..(236): n is a, c, g, or t
  misc_feature (251)..(251): n is a, c, g, or t
  misc_feature (312)..(312): n is a, c, g, or t
  misc_feature (357)..(357): n is a, c, g, or t
  misc_feature (368)..(368): n is a, c, g, or t
  misc_feature (394)..(394): n is a, c, g, or t
  misc_feature (1103)..(1103): n is a, c, g, or t
  misc_feature (1439)..(1439): n is a, c, g, or t
  misc_feature (1476)..(1476): n is a, c, g, or t
  Peptide Sequence Number=SeqID_6385
  Probeset Number=SeqID_12547
nctcgcnacgctcttcatgcactgcncgaagcnccgacgntnccctgtcgctgcatnactccgcctctacgactncngcagcanaacacgagactctcgtacgccgcgancgccgacgntccgcctgcgncacagactaccatctcgccgtcgtaaatctgcgttcgcgctgctcaagcccgcactctctnctccttctcgctcacctgcactcgntttacacaacaccgttcgtnatctcgctcgacgtnccgccgcgtcacgtatacgctctgtgcgaacactgtgtacatgcgtacgcgccgactcgcnacccctacatcgcgccctgccgaccgacacgtctcccgacgcgcncgcgctgttgntcgtctcgctcgtctcactctccatngatctctctcacgcttgtctgcttactccgcgctatctcttctcacttctagctgatatccgtctcgcttgccttctactccttgcatcctcttctcgccaccgcgctcacgccgtgcgagccgcgccgaccggctcgaaccgccgtcgcactcgtcgtaacactccctgctgccttcccgctcggctccgccctccgccctcactactccgccgtctcgtacgctttgccccccgcccacactctctgctcctccctcctctgtctgctactcccggccccctcgcgcccgctcccacgccgtccctctcttcgtcctccatcctcccgcacagcccgctcctcgcgctcgttctcgacctgcctgccccgccctcgactctccagcaccatcctgccacgaccgccctcccgctctagctcagaacgcgcgttccgcccttcgcactctccaccatccacctctggcgtggacgtactactctcccccatctgtcgccgggctacctacgctcacctctcggccgcccacctcgccctcgcttcctccgctcgcactgcctcctctacttccacatctgcggcgctcgcttctctatgcacgtctttcatgttctccgtcggtcaccgcaccctcctacgctatccgtagccgcccccgcctatactcactcgccgctctccaggtcctcgcgccgttctccccacncccgccgcctctcggcctccccgacttattgtctcccaacctccccccacctctcgatcacgctcatctccgtcccacatttcatcctctctcaccgtcctcgctccacgcctcgctccccgtcgtatctctccctctcgcccgcccctcgcctccgccgcggccgacttctttactttcccacagcccacagttcctcgctcccacaacatacacacccaccaaccccaccccacaacaacgaaagagcgcactttccctgacactccgcggggtcactcccccttagaaattagagccgtcccccccaacccacggtggagccttccatcgggntcgtcgccaagctctccccccgctccatcttgtttgntttcatatcccccccccccc

SEQ ID NO: 2769 - DNA, 1898 bp, Glycine max
  misc_feature (1)..(1): n is a, c, g, or t
  misc_feature (65)..(66): n is a, c, g, or t
  misc_feature (81)..(81): n is a, c, g, or t
  misc_feature (110)..(110): n is a, c, g, or t
  misc_feature (114)..(114): n is a, c, g, or t
  misc_feature (132)..(132): n is a, c, g, or t
  misc_feature (267)..(267): n is a, c, g, or t
  misc_feature (293)..(293): n is a, c, g, or t
  misc_feature (311)..(311): n is a, c, g, or t
  misc_feature (316)..(316): n is a, c, g, or t
  misc_feature (320)..(320): n is a, c, g, or t
  misc_feature (336)..(336): n is a, c, g, or t
  misc_feature (413)..(413): n is a, c, g, or t
  misc_feature (428)..(428): n is a, c, g, or t
  misc_feature (477)..(478): n is a, c, g, or t
  misc_feature (496)..(496): n is a, c, g, or t
  misc_feature (523)..(523): n is a, c, g, or t
  misc_feature (561)..(561): n is a, c, g, or t
  misc_feature (648)..(648): n is a, c, g, or t
  misc_feature (755)..(756): n is a, c, g, or t
  misc_feature (775)..(775): n is a, c, g, or t
  misc_feature (789)..(789): n is a, c, g, or t
  misc_feature (795)..(795): n is a, c, g, or t
  misc_feature (818)..(818): n is a, c, g, or t
  misc_feature (825)..(825): n is a, c, g, or t
  misc_feature (837)..(837): n is a, c, g, or t
  misc_feature (882)..(882): n is a, c, g, or t
  misc_feature (884)..(884): n is a, c, g, or t
  misc_feature (886)..(886): n is a, c, g, or t
  misc_feature (892)..(892): n is a, c, g, or t
  misc_feature (898)..(898): n is a, c, g, or t
  misc_feature (916)..(916): n is a, c, g, or t
  misc_feature (918)..(918): n is a, c, g, or t
  misc_feature (922)..(922): n is a, c, g, or t
  misc_feature (962)..(962): n is a, c, g, or t
  misc_feature (990)..(990): n is a, c, g, or t
  misc_feature (1016)..(1016): n is a, c, g, or t
  misc_feature (1073)..(1073): n is a, c, g, or t
  misc_feature (1106)..(1107): n is a, c, g, or t
  misc_feature (1122)..(1122): n is a, c, g, or t
  misc_feature (1124)..(1124): n is a, c, g, or t
  misc_feature (1189)..(1189): n is a, c, g, or t
  misc_feature (1227)..(1227): n is a, c, g, or t
  misc_feature (1230)..(1230): n is a, c, g, or t
  misc_feature (1233)..(1233): n is a, c, g, or t
  misc_feature (1245)..(1245): n is a, c, g, or t
  misc_feature (1261)..(1261): n is a, c, g, or t
  misc_feature (1333)..(1333): n is a, c, g, or t
  misc_feature (1336)..(1336): n is a, c, g, or t
  misc_feature (1341)..(1341): n is a, c, g, or t
  misc_feature (1349)..(1349): n is a, c, g, or t
  misc_feature (1362)..(1362): n is a, c, g, or t
  misc_feature (1372)..(1372): n is a, c, g, or t
  misc_feature (1394)..(1394): n is a, c, g, or t
  misc_feature (1396)..(1396): n is a, c, g, or t
  misc_feature (1404)..(1404): n is a, c, g, or t
  misc_feature (1428)..(1428): n is a, c, g, or t
  misc_feature (1475)..(1475): n is a, c, g, or t
  misc_feature (1492)..(1492): n is a, c, g, or t
  misc_feature (1495)..(1495): n is a, c, g, or t
  misc_feature (1519)..(1519): n is a, c, g, or t
  misc_feature (1526)..(1526): n is a, c, g, or t
  misc_feature (1533)..(1533): n is a, c, g, or t
  misc_feature (1535)..(1535): n is a, c, g, or t
  misc_feature (1546)..(1546): n is a, c, g, or t
  misc_feature (1554)..(1554): n is a, c, g, or t
  misc_feature (1562)..(1562): n is a, c, g, or t
  misc_feature (1566)..(1566): n is a, c, g, or t
  misc_feature (1568)..(1568): n is a, c, g, or t
  misc_feature (1570)..(1570): n is a, c, g, or t
  misc_feature (1590)..(1590): n is a, c, g, or t
  misc_feature (1595)..(1595): n is a, c, g, or t
  misc_feature (1610)..(1610): n is a, c, g, or t
  misc_feature (1612)..(1612): n is a, c, g, or t
  misc_feature (1615)..(1615): n is a, c, g, or t
  misc_feature (1623)..(1623): n is a, c, g, or t
  misc_feature (1626)..(1626): n is a, c, g, or t
  misc_feature (1629)..(1629): n is a, c, g, or t
  misc_feature (1637)..(1637): n is a, c, g, or t
  misc_feature (1662)..(1662): n is a, c, g, or t
  misc_feature (1667)..(1667): n is a, c, g, or t
  misc_feature (1679)..(1680): n is a, c, g, or t
  misc_feature (1684)..(1684): n is a, c, g, or t
  misc_feature (1700)..(1700): n is a, c, g, or t
  misc_feature (1708)..(1708): n is a, c, g, or t
  misc_feature (1712)..(1713): n is a, c, g, or t
  misc_feature (1715)..(1715): n is a, c, g, or t
  misc_feature (1717)..(1717): n is a, c, g, or t
  misc_feature (1720)..(1720): n is a, c, g, or t
  misc_feature (1725)..(1725): n is a, c, g, or t
  misc_feature (1743)..(1743): n is a, c, g, or t
  misc_feature (1764)..(1764): n is a, c, g, or t
  misc_feature (1771)..(1771): n is a, c, g, or t
  misc_feature (1775)..(1775): n is a, c, g, or t
  misc_feature (1778)..(1778): n is a, c, g, or t
  misc_feature (1785)..(1786): n is a, c, g, or t
  misc_feature (1799)..(1807): n is a, c, g, or t
  misc_feature (1809)..(1809): n is a, c, g, or t
  misc_feature (1816)..(1817): n is a, c, g, or t
  misc_feature (1819)..(1819): n is a, c, g, or t
  misc_feature (1823)..(1827): n is a, c, g, or t
  misc_feature (1832)..(1832): n is a, c, g, or t
  misc_feature (1834)..(1840): n is a, c, g, or t
  misc_feature (1843)..(1843): n is a, c, g, or t
  misc_feature (1850)..(1851): n is a, c, g, or t
  misc_feature (1860)..(1860): n is a, c, g, or t
  misc_feature (1863)..(1865): n is a, c, g, or t
  misc_feature (1867)..(1867): n is a, c, g, or t
  misc_feature (1869)..(1869): n is a, c, g, or t
  misc_feature (1872)..(1872): n is a, c, g, or t
  misc_feature (1876)..(1877): n is a, c, g, or t
  Probeset Number=SeqID_12548
ncgcgtgtccagggtcgccgagtgaccaggtcttataggtgcagatgtgtactagtgtatgctcnncactctggcgtcgantcatgataaggtgtgcgcatgtcgacggngctngacgaggcgagtgcagtngggggctgcgcgttcagactagtagtgacagttgactacagagaatagtgagagtagatgatagagataggtaatacagagacactacatacatggtacgagtcatcgtgtagagctgatatctgtgtatcgatntatactgctcggatgtacctcgctcnatagcctagcgaagctgncacgntagncatcgtgcgtgtagtntgagagcggtgcagacgcgagcgatagacctcgaccagagtgactgcagcactgattgttagacgtacacgacggtntatcgtgttggttgntatgtgtcgctggggacgtgtcatcatcctacacatcctgcgtatgctnntctctcctcactaactcntcccttctatgcgtcagagccagtctntctgtccttctccgtgtcgctcgcatcttctatatatntgaatgtagacgtgtctcgtcgggatcgtatcctcgcgtccatgtaatagatagtagcgacgaacgtgcacgcgcagcgcacaaccntcacaacgtcatccagacgacgtatgcgcgtgggagtggtggcaagcatacgatgcggcgactagctcgaccacactacactacacactatatatatctataatatnnttttctagagagtacactncacacctctcatcntccacncgagccgcgtcgatcatatactnactagtntcgtgtgtgatncttgcatcaaatcacatcacgcagccgacactactacatctagcngnangacctncatcancacatcatgtgatagtgnangtgngtgaggtgcgtctcgttgagagatacttacatgtcagtanacaacacacaccaaccaagacaacagancatattaatataatatatgtttcgtngatcgtgcgagatgtatagtatgcgtacacgtcgcacgcacgcatcactgttcgtgntggagagacgtgagtgatgagggtgtggggtgnngcgtccctttagtananactgccacgctccccctatctcactacctcgacgacaacttactatacgcgacgcactaccatgncaatcgacaggaacgtagcagcagtcatcgacagatgntgntantagtatagcatnagtaggagagtgaggnagcgagcagatgtgctatatatatctcatcctgcatctcctccttcactagtcatatacacatctcatgttntgntggcntgccttcnctgatcgtccttntattctctanccatctctacacatatgatatnantactgatngagtgtgttagtgtgagagtaaanactcagtacagatcactgtatcagactgtcctgtcttgctgggcgtntcctctctcagacgtanagncctcagcatcaccagtacatccgnatctacnatccgcnanccatgcatacnccggttgnatggttgnttgntncntctactgctctatctcgacntagtncagatagtagttagnantangagatatnatnatnaaatttanaggtagactgcgtatctctgaatcngtganaatctcatctcnntttngctctgtccctgcgtngtgagtgngggnngngngtnatacntcctctcgcatctcactnctcgcatagagagtcgagaanatagcanagcngantgcgtgnngggggggggggannnnnnnnntngaggcgnngngagnnnnntgacntnnnnnnntanacacacnncacagcagnacnnncncnccngcgnngcacatacaacaatacacaca

SEQ ID NO: 2770 - DNA, 1564 bp, Glycine max
  Peptide Sequence Number=SeqID_6386
  Probeset Number=SeqID_12549
gatgaataaagagtttgttcaagcgaaaaaccaggcttctacatacgtagaaataaagagagtgacctggacaaaagactctcatggattgtttgactacgaaagcaagagtgtgaacttttcaaagaataaagttgacagttcgtgcaaggtttataaagaagaaagcgacattaaaatcaggccagccaagggttctgagccccagatggagttggaagagccaaactatcttttttcgattgtgaatgaagggtctcaaaaggagaagtatgtattaaaaacgctaccgatccagaactacgagagtaataaacagaatctgtttctcatcgtaagaagcttgaagaatgaagaaggaattcaaagaggttacactttagagctaggtgacataatcagacttggacgtattgagtacagagtcatagaatatcaagacgcgagtctcaacagattctccttgtttgatcttggggatgacatgctgagtgggccattcaagcttgacgtcaaaaaatgtgagattgatcctacagtgaaaaaccagtgcagaatatgcctgatggatgagcacgatacacccgagattctgatcaatccttgcagctgcaaaggaacaggagcttacgttcacgtcgagtgcgtgcaaaaatggatcaatagtaaagttaaaaataaatcgaaccaagactctgcgtgctcgtattggaagcacttgatctgcgaagtttgcaagtcaactctgccagatttagttgaagtggacggcaacaaaattcagctagttcccacagtgagaccgaacgctccttatatgttggttgagagaatcttttatgacaaatcaaagggaggagagaattcaagaatgatggtgttactgagcctgacgaatcaagcaagtcaactcaagttgggacgaggccatgattgtgatatccgtgagaatgatatatcggtttccagactgcatgcttatataaaatatgaaaacgacaaatttgtgattgtggacaataactcgaaattcggaactctgattttgctgaggagggatttagagattgagaaaaagaagattgcagtgcaagttggaagaactgtgataaccttttctttgaagcaaggaaccagtaatttagctgctcaacctgaggagctgcagaaactgggcaacaatyttcagcaatggccactcaagaattttaatgatgttgataaagataccgatgatttgaacttgaacgaaggattatgaaagcaggtttgaagactttttaggccttgttggaaaagtttcagatattctgaataagaatttttcttaatgaagcattagaagtattgttggttcgactgaacaacttgaacggcaaataaaaataaaagtgaattgtagttttattctatattttttactattaaaaataattgttatggtactctccaacaaccctgtctataactagatattatgaatctaatcctcatggaactgcatacaaaaaaaacttcaagagtatctatatatgataaagtcttcttgcaatattttattttc

SEQ ID NO: 2771 - DNA, 552 bp, Glycine max
  Peptide Sequence Number=SeqID_6387
  Probeset Number=SeqID_12550
gctgctgctcccccgcgctggccgccgctccacacccagtcgatccccccgccgccaggcggtcccccgccgccagtccccggcgcatcctcttcgaggcaccatttcttcaaaccttatctttcctcaaaaacacacacagacgatggcgtcgctgctaatcggagctcctccgcgagtcaccgtcgcatcatcttcgaggctatcatcatctcactcggaaaccgtcggtgtctctctcccttgcttcactcagcagctgtctctctccgcttcgtcatcatccagctcaattccacttgtgtactgtggccgaggcgaccgcaaaacagcgagaggaaagcgtttcaatcactccttcgggaatgcgaggccacggaacaaggataaaggaagagggccgcagagagtaccagtccctcctgcaccaccgaggaaggataagtttgagaacgacgagaagatcaagattgacatcgacgagtccctcttctccaactagagtctttcttcacttcttctcactgtaattctctatttgagtagaagatg

SEQ ID NO: 2772 - DNA, 1613 bp, Glycine max
  misc_feature (160)..(160): n is a, c, g, or t
  misc_feature (233)..(233): n is a, c, g, or t
  misc_feature (239)..(239): n is a, c, g, or t
  misc_feature (255)..(255): n is a, c, g, or t
  misc_feature (288)..(288): n is a, c, g, or t
  misc_feature (403)..(403): n is a, c, g, or t
  misc_feature (405)..(405): n is a, c, g, or t
  misc_feature (435)..(435): n is a, c, g, or t
  misc_feature (490)..(490): n is a, c, g, or t
  misc_feature (502)..(502): n is a, c, g, or t
  misc_feature (506)..(506): n is a, c, g, or t
  misc_feature (625)..(625): n is a, c, g, or t
  misc_feature (662)..(662): n is a, c, g, or t
  misc_feature (673)..(673): n is a, c, g, or t
  misc_feature (714)..(714): n is a, c, g, or t
  misc_feature (751)..(751): n is a, c, g, or t
  misc_feature (770)..(770): n is a, c, g, or t
  misc_feature (834)..(834): n is a, c, g, or t
  misc_feature (976)..(976): n is a, c, g, or t
  misc_feature (1065)..(1066): n is a, c, g, or t
  misc_feature (1075)..(1075): n is a, c, g, or t
  misc_feature (1157)..(1157): n is a, c, g, or t
  misc_feature (1207)..(1207): n is a, c, g, or t
  misc_feature (1294)..(1294): n is a, c, g, or t
  misc_feature (1363)..(1363): n is a, c, g, or t
  misc_feature (1381)..(1381): n is a, c, g, or t
  misc_feature (1386)..(1386): n is a, c, g, or t
  misc_feature (1402)..(1402): n is a, c, g, or t
  misc_feature (1481)..(1481): n is a, c, g, or t
  misc_feature (1505)..(1505): n is a, c, g, or t
  misc_feature (1509)..(1509): n is a, c, g, or t
  misc_feature (1511)..(1511): n is a, c, g, or t
  misc_feature (1613)..(1613): n is a, c, g, or t
  Peptide Sequence Number=SeqID_6388
  Probeset Number=SeqID_12551
gattagctacgcactcgcactcgctctcctcgccctcaccagtccgctaccgctcgtcaccatctgagtgcaatgtctcacaacctcaccatactaacctaataactagagagctagagttaaccactctctaacattagagatagatggcccgcgcacncactcatactctcatatagatcgaaggatacggcctactcgcgcgcacagtgacgacaaggaaatgagactanagtcantatctctgtgtatatntctgcttatcattctcaactgacaataatcagnagtcatcatagtcttcgtctgtctctcgtgtctcatactcgacactgaactcgaccatagctagagggcgcatgtgtacatctagataacgacggtcactacacgcgcactgagnancactagtgcactcattacatataccttcangcgagtacccttcttagactgctgcggcgcgtcgcgtgtggtctgccagtcggcngcagccacagtnagcncttgtgctggtgtctggtgaagctgtgtgattctttgctacggtaggctgttagcgcgtgtggcagcttgcctatcccttagtgttgttgtagtgcttatcctgctcctcgccggtagntcagtgcccgcagcggcgctcccattctatgcatatnaacccgcgacntgtagcgtgtacgacaccgtcgtgaatgcgcaagctagatncggtagcgcgcgtggcgtggtttgtgagcgtgggcgngatcggagtcgtgtcacanctctcatcttataatctcgtgcgtgagcgaagcgaacccgcctaacacgtgtatgtgaggagantttaggtgctttagcggcgcacgcgagtggcgattgggtcttggtcgtgcgcgtgcaccagggcaacaacacccagtagagaagcatattcaggattatataggtggtattagatgagtgcaccccccccccactatctgcnctcatgaatggcataatataaagcgggatatgagaggttatatcatgttgtcatcatgagccgtgctcacaagacatgactgagttgtnnagtggaggncgtgctacgccggtgtcccatctgcgatattcgaccgtcataaagtatgtaacacaagtgtacagacaatgatactcattantagagtaatatgtttatctatgactctctgatagaccgtgccgggaggangtgagagtagcatggctacattatcgacgcacatcatccgctgatgatgacgcattatcgcgagctactaaatcccccacgatccancagtagacatcgtaaagtatgagattctctccaccataatgtatcagatgctctgactattgtgaactncacacatacgcaacatcntccantgccacgcaaagcgantcacaccaataagatatgtctggagtcgttcgaggaatccacgtggtctcttcgcggtctctagtcgatactctatctncatctcgtctgcctcgcctccgcntacngntacccttatcaacactatacatatacaggtgattacagacgtaggagatatgcgtgtgtcgtatgctgcagatattacactagacgacccatacgacactan

SEQ ID NO: 2773 - DNA, 370 bp, Glycine max
  Peptide Sequence Number=SeqID_6389
  Probeset Number=SeqID_12552
tgtaaccgacggtgagcggattttgggacttggggatcttggatgtcaggggatgggaattcctgttggtaaattggctttgtacacagcactaggaggagttcgtcctttagcatgtttgcctattactatcgatgtgggggcaaacaatggagaattattgattgatgaattctacattgggcttaaacaaaagagggcaattgggcaggaattattataccttattcatggattttttactggtggggagcaaaactaccgggaaaaaatcccttgtccagtttaagaaattttcaaacacaagggttttttggtccttgctaaaattgggcaacccctttttttttttatggcgaatatacggggg

SEQ ID NO: 2774 - DNA, 560 bp, Glycine max
  misc_feature (71)..(71): n is a, c, g, or t
  misc_feature (249)..(249): n is a, c, g, or t
  Peptide Sequence Number=SeqID_6390
  Probeset Number=SeqID_12553
agataagcagtatatgtgggaagcagaagctgacagtagctcttatgtgataaaagaagaaactgatcctngaaagtttctgcgtcgtggtacacagattacactctatttaagagaggatgaccagtatgaattctcagaggccagcaggattccggggttgggtgaaagattactcttcagtcggttcctttcccatctacccatggcagaaaaagtcaaaaactgtggaggtgggaaaagaagganaaaccccaaaaaggggagaaaaccaagaaaaaggtggaaaaaaaaaaggggaaaagacctaaactggggaatactgggactgggaattggcccatgaaaccaaccctatggatgcgccaccccagggagttgaaaaggggagaccctggattttttagaagacttttttggaattttttaacccctgtgcttatcccttcctatgcaaggggaggggggttcaaagaatttttatgttccgcaagggaccctttccatgagggaaatgggacccccaaaaaaaaaacccctggttggttagcagggtcctt

SEQ ID NO: 2775 - DNA, 1547 bp, Glycine max
  misc_feature (75)..(75): n is a, c, g, or t
  misc_feature (77)..(77): n is a, c, g, or t
  misc_feature (126)..(126): n is a, c, g, or t
  misc_feature (277)..(277): n is a, c, g, or t
  misc_feature (359)..(359): n is a, c, g, or t
  misc_feature (380)..(380): n is a, c, g, or t
  misc_feature (390)..(390): n is a, c, g, or t
  misc_feature (408)..(408): n is a, c, g, or t
  misc_feature (444)..(444): n is a, c, g, or t
  misc_feature (764)..(764): n is a, c, g, or t
  misc_feature (780)..(780): n is a, c, g, or t
  misc_feature (880)..(880): n is a, c, g, or t
  misc_feature (950)..(950): n is a, c, g, or t
  misc_feature (1002)..(1002): n is a, c, g, or t
  misc_feature (1067)..(1067): n is a, c, g, or t
  misc_feature (1110)..(1110): n is a, c, g, or t
  misc_feature (1181)..(1181): n is a, c, g, or t
  misc_feature (1192)..(1192): n is a, c, g, or t
  misc_feature (1196)..(1196): n is a, c, g, or t
  misc_feature (1198)..(1198): n is a, c, g, or t
  misc_feature (1292)..(1292): n is a, c, g, or t
  misc_feature (1302)..(1302): n is a, c, g, or t
  misc_feature (1381)..(1381): n is a, c, g, or t
  misc_feature (1447)..(1447): n is a, c, g, or t
  misc_feature (1454)..(1454): n is a, c, g, or t
  misc_feature (1463)..(1463): n is a, c, g, or t
  misc_feature (1470)..(1472): n is a, c, g, or t
  misc_feature (1486)..(1486): n is a, c, g, or t
  misc_feature (1493)..(1493): n is a, c, g, or t
  misc_feature (1512)..(1512): n is a, c, g, or t
  misc_feature (1515)..(1515): n is a, c, g, or t
  misc_feature (1524)..(1524): n is a, c, g, or t
  misc_feature (1545)..(1547): n is a, c, g, or t
  Peptide Sequence Number=SeqID_6391
  Probeset Number=SeqID_12554
atgaatgatacataatctatgtgagattatagtaggtgaattatatgaccatgatatatacagataatatgatantntataccactctagtctcggtagattctcacttccgactaccacgcgganagatttcgtgtcttcggacgtccagcggcgtttggtcatgcggatacacgccagagtcacattaatgttagttagttagcgccgacgcagcatattatcaatatatgagtcgtataggttcagaatgagagacagagagcacgttatattnacgcgctcactctctttgtgtgtatgtgatattgaccgcactcaatattatatctataacacatatatagtcgttatcctcncagtacattagactttgatcntgttcccacncgcacacgcagtcgtagnagctgtgagaggggactgcgatcgtgagagctgtgngagcagctagttcagcgctatctattaattcactattcacgcgttgttctgtgcagagccggttcacgatgtggtcgtcgtggagtcgttagtgtgtatacacagtcgagttaggatgtggtgtgtgtgtgtgtatattatatgaggtgtgagagagtatgtgaggtgggtgtttatggccgcagtgctgtttagcgtaatatatgattagttgttttctgcccgctgactgtcggtctagtgttagttacgcctgctgagtagatgtgtgttgttataataaactctttaatatcttggtgttttgtgcggcgccggcnactcgcctgccctgtnatattatccacacccttttgtgtgtgacccatattatgtctatatatctacataactgtgcttatcgtgcgtttgccacgcgcgattgttgtcctttttncgcctgtcgtggtggttgtggtgtgggtgtcgtcgcgcgctattctgtgtattgagatattgcaagtatnagaaatcacacaccactacgatatgtgtgtttgtgatatgtgtatcacatcncatgttatgctgttgtgatagttagacgccaccacgcaggcgtcacatcatactatcgacagatnctatcacacgccaacaccgcccacagatgattgacgatcgcgnaagacgagcccgtatgtcaagagtgagtatgcgtaagggatagtcgcgcgaccagttattatagtcccgcnagatttgtgtngagntngtgtgttcagatagaagctacatcgctagtcggttgagtgagcagagtgtgttgctagttgttgagtgttgaatatagaattagcgcatgatancaccgacacngtatgtcagtaggtaggtctgtagcgctcgcgtaatgggtgtgttggtgtggtagtggcgcgcgcggtgatatagagtnttgtcgtggtatgtggtatagtagagtgtaaccgcaccgagtgatagagagtacttatctttctgntcttgtnttattattntcttttnnnttttctcacacatntcatacntcttctcccactacacacnacncacaaatanctacacaatatcatccccccnnn

SEQ ID NO: 2776 - DNA, 2143 bp, Glycine max
  misc_feature (1)..(1): n is a, c, g, or t
  misc_feature (41)..(41): n is a, c, g, or t
  misc_feature (43)..(43): n is a, c, g, or t
  misc_feature (53)..(53): n is a, c, g, or t
  misc_feature (83)..(83): n is a, c, g, or t
  misc_feature (177)..(177): n is a, c, g, or t
  misc_feature (192)..(192): n is a, c, g, or t
  misc_feature (215)..(215): n is a, c, g, or t
  misc_feature (217)..(217): n is a, c, g, or t
  misc_feature (228)..(228): n is a, c, g, or t
  misc_feature (251)..(251): n is a, c, g, or t
  misc_feature (323)..(323): n is a, c, g, or t
  misc_feature (325)..(325): n is a, c, g, or t
  misc_feature (368)..(368): n is a, c, g, or t
  misc_feature (409)..(409): n is a, c, g, or t
  misc_feature (417)..(417): n is a, c, g, or t
  misc_feature (419)..(419): n is a, c, g, or t
  misc_feature (423)..(423): n is a, c, g, or t
  misc_feature (433)..(433): n is a, c, g, or t
  misc_feature (568)..(568): n is a, c, g, or t
  misc_feature (577)..(577): n is a, c, g, or t
  misc_feature (606)..(606): n is a, c, g, or t
  misc_feature (609)..(609): n is a, c, g, or t
  misc_feature (616)..(616): n is a, c, g, or t
  misc_feature (646)..(646): n is a, c, g, or t
  misc_feature (650)..(650): n is a, c, g, or t
  misc_feature (677)..(677): n is a, c, g, or t
  misc_feature (687)..(687): n is a, c, g, or t
  misc_feature (697)..(697): n is a, c, g, or t
  misc_feature (699)..(699): n is a, c, g, or t
  misc_feature (723)..(723): n is a, c, g, or t
  misc_feature (772)..(772): n is a, c, g, or t
  misc_feature (795)..(795): n is a, c, g, or t
  misc_feature (892)..(892): n is a, c, g, or t
  misc_feature (918)..(918): n is a, c, g, or t
  misc_feature (924)..(924): n is a, c, g, or t
  misc_feature (938)..(938): n is a, c, g, or t
  misc_feature (944)..(944): n is a, c, g, or t
  misc_feature (982)..(982): n is a, c, g, or t
  misc_feature (1264)..(1264): n is a, c, g, or t
  misc_feature (1384)..(1384): n is a, c, g, or t
  misc_feature (1413)..(1413): n is a, c, g, or t
  misc_feature (1447)..(1447): n is a, c, g, or t
  misc_feature (1597)..(1597): n is a, c, g, or t
  misc_feature (1653)..(1653): n is a, c, g, or t
  misc_feature (1671)..(1672): n is a, c, g, or t
  misc_feature (1682)..(1682): n is a, c, g, or t
  misc_feature (1718)..(1718): n is a, c, g, or t
  misc_feature (1802)..(1802): n is a, c, g, or t
  misc_feature (1865)..(1865): n is a, c, g, or t
  misc_feature (1939)..(1939): n is a, c, g, or t
  misc_feature (1984)..(1984): n is a, c, g, or t
  misc_feature (2052)..(2053): n is a, c, g, or t
  misc_feature (2099)..(2100): n is a, c, g, or t
  misc_feature (2102)..(2102): n is a, c, g, or t
  misc_feature (2106)..(2106): n is a, c, g, or t
  misc_feature (2134)..(2134): n is a, c, g, or t
  Probeset Number=SeqID_12555
nttgatgacggacgatgtctagtagtgtcagtgtagtattngntgagattganatttattcgtcatatatcagtatgtgtgantacgacagtagatgaacattgcgtatgtgatagatgtgcgcacactcagcttaccatatatactactcatgacgtaggcagacatagtgacagnagtccactgccaagnacgttacgactacataccgctantntaacagtatcnagtgaactacctatcctcatctnacagactctgactatgcgagcgtctgatcagcacgtcgcgtattgctagtcgctatcgctctgagatgacgngnattatgctacgtcgctgtacgtcgttgcttgtgattcagtctngtacgaacagactgatgtgcaagcagccaccctactattgntagtcttncngtcntgttgcagtncaccgctcgacatcctcgggtgcacggtcacacgctgcgtatcacgtgtagagacagttgatggttggagttatgtacgacacgcgagagcgagtacaatgatcaacacacctcagctgacgacgatcaatcgcngtcggatcntaattgctcgtgctactaagcagtgcgangcncaacgtntgccgcacgctcacgaccgacctcgtcgcngcanccgccgcgcactcacctcgactctacnagcatacctntgcctgtcancntcagtcacatcgtgacagtcatcnacatcgtcgatgatcacagcatcctcacatatctcactcgttactactnacatctattcgtacacgatatcngcgcacggcgggcgatctggtatatatgtatcgagtaagtaagtaacactacgagcgtagtacgcatcagcaaatatcgtatatacatcagtatcancacatagcagcgcactgcgcgctcangacacngtagctattgacanactatncacactatgtcatgagagatgaagcatctacgtcatgngacggctagatacaaccgatatagctaactactcatcagcgtatcgcgagacctcatagagtaatgctcgtggtagtacgtaatagatatagcggagatatatcatgtctcactcagcgctgcttatacagtcgcccatatcgcatgtatcgtcgacattcacatatgatctcatacgcatggattatactattaatcatactgagtagcgtccgtagcgtcgatacattctccattaagatgatagtacatattagagactattcgtgaagcagtctaacngaggcctagtcactaactgtgctactcgaatatgcacatgtatctacatttgtgactagtacgcgtcgactttccctctggtcgtgacagccacgtcatactcgcgcacgcatcgcgcgncggagagacgtgagcgtcagcatctcgangtaagtgtagtagttgtgcaggtgacgcaagagncgcatactcacatcatgcatgttgagctgttcttacagagatgcgcgcgagcgagtaactcaagtatatgacctaatgatggcgcgagtcgccgatagggctaataagcatatattagcgagcagtgtgagagctatgagataagtaatngtcacaactgattacgcgagactcagtatctatgatgtctatgatacatcagagcnacatatcagtcttgttgnnctaatagatnacctatctctgcgagcgtacgctactagcatgcgtnccctcgtatgcctatgtgactagccgtccctggcgtacagggcgatccctagcttgcgtctatgcgccgtgagcagattcgctngtcgtgtcgagaggaagtagaggtagagataccttcatgacgacctaactatctctcgacaantcaagctgctacctagatacaaccaagtgtgacttatatccttctcattatgataagtagagagagacaaacanagagaagaaaagatagactcgttatatatagagtaatgaccgttncgggtcatctctcgagagggaggggggggaggcgcacgcgtgatcactccaacatttatcgaggggtnnttgtaatgtggtgtgtcgttagaccgcaggatgctgtgcagtcacnncnatancctaagcaatcaaccagagtgctaacanaccacatac

SEQ ID NO: 2777 - DNA, 1554 bp, Glycine max
  misc_feature (1)..(7): n is a, c, g, or t
  misc_feature (26)..(26): n is a, c, g, or t
  misc_feature (34)..(34): n is a, c, g, or t
  misc_feature (38)..(38): n is a, c, g, or t
  misc_feature (53)..(54): n is a, c, g, or t
  misc_feature (85)..(87): n is a, c, g, or t
  misc_feature (91)..(91): n is a, c, g, or t
  misc_feature (764)..(764): n is a, c, g, or t
  misc_feature (831)..(831): n is a, c, g, or t
  misc_feature (834)..(834): n is a, c, g, or t
  misc_feature (854)..(854): n is a, c, g, or t
  misc_feature (867)..(867): n is a, c, g, or t
  misc_feature (883)..(883): n is a, c, g, or t
  misc_feature (1084)..(1084): n is a, c, g, or t
  misc_feature (1149)..(1149): n is a, c, g, or t
  misc_feature (1342)..(1342): n is a, c, g, or t
  misc_feature (1395)..(1395): n is a, c, g, or t
  misc_feature (1476)..(1476): n is a, c, g, or t
  misc_feature (1522)..(1522): n is a, c, g, or t
  Peptide Sequence Number=SeqID_6392
  Probeset Number=SeqID_12556
nnnnnnntttaataaatggggtggtnttggtggntgtncgaggtggcggcgcnntacggcgggctgcctcctcttgtctcacccnnncccncacccggtgggtgcgaaaaatggtggtatcgcttcaactccgcgcgtagggtgtagagagcgtgatgcagcataccacgagccacatcggtcgacaactccaaccccatcactgtagtatgacaatagatattaggaagagcgacccgattccctacattaatgcgcacccagaccccttttccacctccacatgtagtctctatttgattacgatccttctagtgtgattgtactgctaatcaactatagctccgcgccaccaaggagatcaatatggccgggtggcgcgcatcgccctctatcatcaaacttacaccccagacccttgcggcgtcacggcgaccttatcgcatgagtcgagtgcgtagcagtggtctgtagggagtggggcccgccgacggggcgatacagctcagcacggcgtcgtcggtctatgggggtagcgggaggagcgaggaggtgcgaccatcttgtgcacttacaacacaaacatatctcgttatatactaccgctctaacagcgcgccctgcagtaccgtcgctgcacataatgagcgtcactcataatgcacgccttcacaacacgataataacgtcatgtgatgaaggagcgtgtgggtctgagcatatgtaggtggatgagtctgtgtggctgctgtcgctggtatgcntgtgtgcatgagccggcgcagtcagcgtggttggagtgggtgtgtggaggtagaaaaatgaaagaanaanagaataataatataaatatnacaaaacaaatanaaattaagaacaaaanaacaaaggaaaagatgataaatactcaccacacaacgacgcccgcacacacccacctcacccctcctcatgtacatgtgtgatctgtcactcattcatgcagaatctcactccgcacccgccctctgtctcatcttgtgtgatgcgatataacagcacactatttactcaatactcgcctctatcatgtgctcgctgtgtntgtcacgatctcaccacctctatcatccagcctatcacatctatcagctgcgagccgcatgtggngtcagtgtcatcctcctataactatacgtcagcgccggagtctcaaactatctacgtcgtagccgcctttcactccacatgactgcatgataaatacactaccatgtaccatcacggtctgcgtcatccgtcatgtggcgggacagatccagatcactcgatcgatccgacatcgtgtgctcgcatagctacnatatggactgtcggcaccatatcttaacgctcgtatcgacataacagtgtcantatgtgtctcaggcgttatcgcacacatcatatgatcgacgcgaatgcggagatcgagtcttgctatcacgtacaatacgnctcagcattgtctatgcgattctactactcttatatacatcatcgnttaccgtcgtgtgctctgttgacgtactagaa

SEQ ID NO: 2778 - DNA, 1624 bp, Glycine max
  misc_feature (1)..(199): n is a, c, g, or t
  misc_feature (1574)..(1624): n is a, c, g, or t
  Probeset Number=SeqID_12557
nnnnnnnnnnnnnnnnnnnnnnnnnnnnnnnnnnnnnnnnnnnnnnnnnnnnnnnnnnnnnnnnnnnnnnnnnnnnnnnnnnnnnnnnnnnnnnnnnnnnnnnnnnnnnnnnnnnnnnnnnnnnnnnnnnnnnnnnnnnnnnnnnnnnnnnnnnnnnnnnnnnnnnnnnnnnnnnnnnnnnnnnnnnnnnnnnnnnnnntgtttcctgcctttcaaaaagttaatttgttgatctgttgatattatctagtgagtaatgcaacatcaaaactgtgtattatcattcgggcttgtctatccacaagagagtagacgttaaaagaaaaatggtaatgatggaaaagtccatatggtaagtacaaatagtgcttttggaatgtggatagacaaacctgatgttgtaagttgtgctacattttaaaattataataatgctgttatcattcacaatttcatgatcaactttgtttaggaattttacacttcaagaaagaaatttcatccttctctgtagataattccatgacttgatagttgatacttattgatcaccagtctgctgactaagaaatgccctggacagcctttttgtaaagccacatcattaccaaaaaccttcctctcaacctctctgaactttacacaggaagttcttttccaagccattttttcttgattgggttaactaaatttcaaataaaaatgataattcctacaattattcaaatccctagtgatcatcttataatcttattcttatccatccttcccaagtgcataagttggaagtataaacctactgccttgtaaacttaaatgtaatatgtatacgttagtgcagaacttgcttggctagggaaaatgtagacactttcaaatatagggatcagttctaacagcaagaaattcttattggtatcctaaatttatagattttgttactcaaattttcctttttattgtcatgttttcagcgctttgtcatccacaatacaatgtcgaactaatacgaaagctattatcaggaaactgaaaggtctggaacgctttgtcatcctcaatacaatgtcaaaatcaattgaaagctattatcaagaatctggaagggcatgataagaaatggccaaggatataaaaaggaaagttctaagacagcaatggctcacatctatgtactgtgaaattaagcaaactagtgctgtggattaaatcagacgaggaatcaagagatcagtgtggcagactaattcaagaaagaaattcaaagcaaagcaaaagtgatgctatgaaaccaaagaaacctcttgcggccttcttctcgcgattgtacagaagctacatttgttccctttttttttatttattctggttacatgtgatcttttatgaggtttagttattctttgtgttagaattgtttggggaaaatgttaattttatcagaatttagctagtttcatgtatccgttttctagatatctgccatatccatagctagctttgtatattttgagtttctaacttgaaaggtagcaaaacacaagacatgattttttgtaataatttacccttgnnnnnnnnnnnnnnnnnnnnnnnnnnnnnnnnnnnnnnnnnnnnnnnnnnn

SEQ ID NO: 2779 - DNA, 1695 bp, Glycine max
  misc_feature (1)..(1): n is a, c, g, or t
  misc_feature (16)..(16): n is a, c, g, or t
  misc_feature (20)..(23): n is a, c, g, or t
  misc_feature (25)..(25): n is a, c, g, or t
  misc_feature (27)..(29): n is a, c, g, or t
  misc_feature (31)..(32): n is a, c, g, or t
  misc_feature (35)..(37): n is a, c, g, or t
  misc_feature (40)..(40): n is a, c, g, or t
  misc_feature (47)..(47): n is a, c, g, or t
  misc_feature (59)..(59): n is a, c, g, or t
  misc_feature (61)..(61): n is a, c, g, or t
  misc_feature (63)..(63): n is a, c, g, or t
  misc_feature (65)..(65): n is a, c, g, or t
  misc_feature (67)..(68): n is a, c, g, or t
  misc_feature (73)..(73): n is a, c, g, or t
  misc_feature (79)..(83): n is a, c, g, or t
  misc_feature (88)..(89): n is a, c, g, or t
  misc_feature (94)..(94): n is a, c, g, or t
  misc_feature (99)..(99): n is a, c, g, or t
  misc_feature (154)..(155): n is a, c, g, or t
  misc_feature (184)..(184): n is a, c, g, or t
  misc_feature (224)..(224): n is a, c, g, or t
  misc_feature (226)..(226): n is a, c, g, or t
  misc_feature (231)..(233): n is a, c, g, or t
  misc_feature (235)..(240): n is a, c, g, or t
  misc_feature (242)..(242): n is a, c, g, or t
  misc_feature (301)..(301): n is a, c, g, or t
  misc_feature (410)..(410): n is a, c, g, or t
  misc_feature (434)..(434): n is a, c, g, or t
  misc_feature (446)..(446): n is a, c, g, or t
  misc_feature (459)..(459): n is a, c, g, or t
  misc_feature (487)..(487): n is a, c, g, or t
  misc_feature (548)..(548): n is a, c, g, or t
  misc_feature (603)..(603): n is a, c, g, or t
  misc_feature (716)..(716): n is a, c, g, or t
  misc_feature (845)..(845): n is a, c, g, or t
  misc_feature (867)..(867): n is a, c, g, or t
  misc_feature (959)..(959): n is a, c, g, or t
  misc_feature (990)..(990): n is a, c, g, or t
  misc_feature (992)..(993): n is a, c, g, or t
  misc_feature (1008)..(1008): n is a, c, g, or t
  misc_feature (1010)..(1011): n is a, c, g, or t
  misc_feature (1029)..(1029): n is a, c, g, or t
  misc_feature (1103)..(1103): n is a, c, g, or t
  misc_feature (1156)..(1156): n is a, c, g, or t
  misc_feature (1181)..(1181): n is a, c, g, or t
  misc_feature (1202)..(1202): n is a, c, g, or t
  misc_feature (1226)..(1226): n is a, c, g, or t
  misc_feature (1285)..(1285): n is a, c, g, or t
  misc_feature (1303)..(1303): n is a, c, g, or t
  misc_feature (1326)..(1326): n is a, c, g, or t
  misc_feature (1339)..(1339): n is a, c, g, or t
  misc_feature (1363)..(1363): n is a, c, g, or t
  misc_feature (1398)..(1398): n is a, c, g, or t
  misc_feature (1409)..(1409): n is a, c, g, or t
  misc_feature (1417)..(1417): n is a, c, g, or t
  misc_feature (1442)..(1442): n is a, c, g, or t
  misc_feature (1459)..(1459): n is a, c, g, or t
  misc_feature (1501)..(1501): n is a, c, g, or t
  misc_feature (1508)..(1508): n is a, c, g, or t
  misc_feature (1613)..(1613): n is a, c, g, or t
  Peptide Sequence Number=SeqID_6393
  Probeset Number=SeqID_12558
nggggggggaggaaanaaannnnanannngnngannnaanaagaggnagagaagagagngnanantnnagaanaagacnnnnnccccnncgcgnagacngcaggacgcaaacagcaaacacagcgcgaccgcgcccggcgcacacacacacatnnacaccacgcaggcaaaacacaaacgcacnaaaacacgacacaaacacagaccacaacagcacaacccgntntctannntnnnnnncncagcacagtatatcagtgttatgctcacatttctatatctactatttcatccgatcttnctgttacgccactacacctatctttactaatgtcctcatctcatatgacaaacatcagttcatttattaacattgtaatactaggtctcaacatacgtactcctgagancctcacccctacgcgtcgctcatncgcctgggtgtntgcgtcggttganggcttgtcggcttatacgtggtgtgtantactccctatcatattatatatatgtacagcttcgatactgtccagtgacattatacttancgggcatatgtaatacataagaggtgtagagatgctgaaagagaagacgattgangttagtgatcgtcgtgttaatatatgtagtgacgtctagcgatccggcatcatctagctcctttcactcatagttggtgattgtgctgtatatactcgctctatgtagtcatnctgatcacgtctagtcgacaaatactgcttgagtatataccagcacttatataatactactacatcgatagctactcactgcactgatccatgctgacagacattctctcagtatatgtatgtgagatnccatctctgtgcgatatgttgntcacagttaacacagtcactcatactacgctagtcgactaccaccggctctgctcatctcactcatcgtctctctattcgcgtagtctgcanacacgtccaccgtcgatctgagcatgttagnanngtgagaagttatttntnnactgtctgttatactatnatactattcaccatattcgtactacttactcattcatcattatcatctagacgacgataggtgctgtagacacnttttataactcatgctctatcatatagtcgtatctatgatacatgcttctacngactcactgtatgtatatatccatnatgctgtactatcgtatttcntcatgtcgtactatatcatacttnataatcatgcgtgtagtgatatgatacgaataactatcatctcgtctcactcgacacgngaactcaagtatctactnattctaagacatatctacttcantacacattacatntatatgatatacttacatcgtgtnactatactcctcactatcactcttactatctatcntatcatcgtcntatcacanatacgtcatacatcgtctactcaangttctaagaagaaacanactatgtacagcactacattagacgcagtcagtttcaatctncacatcngacttcatcaatataacactattacatattaatcttactctcatctatatcgatgatatgtatctctgatctatcatatacacgcatatcagtatgtactatgantaatcaatgtgaccgagcgttatgatctgcgatacgatgatccatctacgtgtacaactcttatgagctgactcatatcgag

SEQ ID NO: 2780 - DNA, 2328 bp, Glycine max
  misc_feature (1)..(1): n is a, c, g, or t
  misc_feature (9)..(9): n is a, c, g, or t
  misc_feature (21)..(21): n is a, c, g, or t
  misc_feature (46)..(46): n is a, c, g, or t
  misc_feature (65)..(65): n is a, c, g, or t
  misc_feature (73)..(73): n is a, c, g, or t
  misc_feature (77)..(77): n is a, c, g, or t
  misc_feature (90)..(90): n is a, c, g, or t
  misc_feature (110)..(110): n is a, c, g, or t
  misc_feature (141)..(141): n is a, c, g, or t
  misc_feature (173)..(173): n is a, c, g, or t
  misc_feature (184)..(184): n is a, c, g, or t
  misc_feature (186)..(186): n is a, c, g, or t
  misc_feature (191)..(191): n is a, c, g, or t
  misc_feature (194)..(194): n is a, c, g, or t
  misc_feature (196)..(196): n is a, c, g, or t
  misc_feature (204)..(204): n is a, c, g, or t
  misc_feature (219)..(219): n is a, c, g, or t
  misc_feature (238)..(238): n is a, c, g, or t
  misc_feature (284)..(284): n is a, c, g, or t
  misc_feature (286)..(286): n is a, c, g, or t
  misc_feature (299)..(299): n is a, c, g, or t
  misc_feature (304)..(304): n is a, c, g, or t
  misc_feature (323)..(323): n is a, c, g, or t
  misc_feature (386)..(386): n is a, c, g, or t
  misc_feature (397)..(397): n is a, c, g, or t
  misc_feature (404)..(404): n is a, c, g, or t
  misc_feature (426)..(426): n is a, c, g, or t
  misc_feature (435)..(435): n is a, c, g, or t
  misc_feature (445)..(445): n is a, c, g, or t
  misc_feature (478)..(478): n is a, c, g, or t
  misc_feature (506)..(506): n is a, c, g, or t
  misc_feature (523)..(523): n is a, c, g, or t
  misc_feature (526)..(526): n is a, c, g, or t
  misc_feature (542)..(542): n is a, c, g, or t
  misc_feature (546)..(546): n is a, c, g, or t
  misc_feature (571)..(571): n is a, c, g, or t
  misc_feature (573)..(573): n is a, c, g, or t
  misc_feature (579)..(579): n is a, c, g, or t
  misc_feature (589)..(589): n is a, c, g, or t
  misc_feature (607)..(607): n is a, c, g, or t
  misc_feature (625)..(625): n is a, c, g, or t
  misc_feature (643)..(643): n is a, c, g, or t
  misc_feature (668)..(668): n is a, c, g, or t
  misc_feature (670)..(670): n is a, c, g, or t
  misc_feature (672)..(672): n is a, c, g, or t
  misc_feature (697)..(697): n is a, c, g, or t
  misc_feature (709)..(709): n is a, c, g, or t
  misc_feature (714)..(714): n is a, c, g, or t
  misc_feature (773)..(773): n is a, c, g, or t
  misc_feature (776)..(776): n is a, c, g, or t
  misc_feature (825)..(825): n is a, c, g, or t
  misc_feature (870)..(871): n is a, c, g, or t
  misc_feature (874)..(874): n is a, c, g, or t
  misc_feature (887)..(887): n is a, c, g, or t
  misc_feature (942)..(942): n is a, c, g, or t
  misc_feature (951)..(951): n is a, c, g, or t
  misc_feature (956)..(956): n is a, c, g, or t
  misc_feature (1004)..(1004): n is a, c, g, or t
  misc_feature (1055)..(1055): n is a, c, g, or t
  misc_feature (1110)..(1110): n is a, c, g, or t
  misc_feature (1125)..(1125): n is a, c, g, or t
  misc_feature (1139)..(1139): n is a, c, g, or t
  misc_feature (1158)..(1158): n is a, c, g, or t
  misc_feature (1168)..(1168): n is a, c, g, or t
  misc_feature (1170)..(1170): n is a, c, g, or t
  misc_feature (1200)..(1200): n is a, c, g, or t
  misc_feature (1334)..(1334): n is a, c, g, or t
  misc_feature (1375)..(1375): n is a, c, g, or t
  misc_feature (1401)..(1401): n is a, c, g, or t
  misc_feature (1419)..(1419): n is a, c, g, or t
  misc_feature (1572)..(1572): n is a, c, g, or t
  misc_feature (1705)..(1705): n is a, c, g, or t
  misc_feature (1726)..(1726): n is a, c, g, or t
  misc_feature (1733)..(1733): n is a, c, g, or t
  misc_feature (1838)..(1838): n is a, c, g, or t
  misc_feature (1881)..(1881): n is a, c, g, or t
  misc_feature (1914)..(1914): n is a, c, g, or t
  misc_feature (1931)..(1931): n is a, c, g, or t
  misc_feature (1955)..(1955): n is a, c, g, or t
  misc_feature (1959)..(1959): n is a, c, g, or t
  misc_feature (2148)..(2148): n is a, c, g, or t
  misc_feature (2159)..(2159): n is a, c, g, or t
  misc_feature (2229)..(2229): n is a, c, g, or t
  misc_feature (2240)..(2240): n is a, c, g, or t
  misc_feature (2289)..(2289): n is a, c, g, or t
  misc_feature (2295)..(2295): n is a, c, g, or t
  misc_feature (2298)..(2298): n is a, c, g, or t
  misc_feature (2310)..(2310): n is a, c, g, or t
  misc_feature (2326)..(2328): n is a, c, g, or t
  Probeset Number=SeqID_12559
ncatccatnacctctagtcancaccgtatcgataacgcaagtgacntcatagtcagtaccgactnatagtagnacgncagactcagcacnacatcactacgagcgagtcntatacgaccaaaagtacagtcctagcagtcnatctcacctacacatcagatacgcagcagcancgcgtcgcgangnactcncanantgcgctgncgacgaccatacgtnctcgagaccagtcaccagngcgcactcgtagtgtcggcggaccgcttcgtatgatcagtactcancntcgtcgatgatgnctgcnagcaccagtcaacacgatntactaacgcactatgagcactgctggctactatcagacgacgtcgcaagcagcacgactactnccatactacgnctccaantaatgcgactcatgctactagngctatgatnggcgacgtcngtcagacacgacagtctcgttatcacgatgtcnatacagtcacgtcgtccgattcgcgatncgcagcacgacatagcnctntgacgcatgacgactnctcngctactgcgtacctagtcggcatgntnctgatnctacggtctnatgtgtacgacagatcgntcggtcatacgacagtangcaacatgagtcgtctanatcacgttgatcacgactagatcangnantgctatatgtctgctgccgtcgcancaacgtacatcngtgtncagcgatcagcgatgatggtcatcatcagctagtatgagtcgcgctgtacacagtacgnagntatgctgtagcgcagcagcgacgtcgacatcaatcatcatctcgcagancactcgcgtgatgtgcgcagctacgatatcgcagtcgtgactcgnngancttgtatcgtcgnacgagtctgtgcgtcgtcgggagagttgactatcgtgtacatgagtatatatganacacacagntcatncacgaacagtctgcggcgtatgaatcgtagtgatcgcagttcagtatngcagtcatgctcgtgctactcatacgcgatctcacagatagcatgctctanccactagctacgcatcgaatgctagtagctagttgacgatacgactccgctctantgtcgacctatctgncagttgataacctntcacatcacgagccgacgncacgatagcncntcacgacgtgctgcacatctatgtacgcgncatcacgtgtaataagagcgagcagagatagccactccgctcacgacgtcgagtcctcgcacatcatatgcagtagaagcgccactcgagatgacgagcatgagtacgatcatccagtgtatggaagactaganaataacagatgcaacatactcgcgcactatatcagacgagnataggcagccgatagacgtgcatcanagtcgatcataatagcantgcagacagagctccgacacgcaagcgtgtgcactaaaaacatgcgacaagcgcgtgagagcgtgcgcgcatgtgcgctccatacatccactactatcgcgcgttcgcatccctgaccgaacgactcggactagtcgtgcactatgtatgacncagacgcagtgagcaagataagcgtgatatcgtgtctgcgagtactcaccattcgtatctacagcacgctgagatggatagatcggcggtatcatcacagaatcatggctgatgtatagatcatactattctnatgagcttgattgaatagatntgtgctntatacgtatcgtggctgatcacgtcatcgtgtgtctgatcatatatgctgcgtggcgcctgtgatgcgaatacgataatattacatacagatgacacgatctacntgatcatctggtgtcagctaagatggtgaataatattatgctnatgctattgttatgcggtgaggcatgtcatatntacagctcatcgtgacntcgcattcgtcatatatatatatntacnaatatcgtatgaatctcatgaagcgtagatgagatgtaggcagacgcacactacgcgcgctcggcagccgcacgcgcgtactgcgtgagacgacgatcacactgtcattatcgtataccacacacacagtagttgaggcagagtagggtggtgggtcgcgcgcgcgtcgcagtcgttatacgcgtcttntgtcttatcantacgagggggggtagaagcgctcctcttgtcattacacttctatatcaatgatgggcgagaagggatagngcacagctggnctaacactacatctagtcacgtcatgagatgcatataagaataacgaantgtaanacnaaacacagagtnagaagtcgatgaaggnnn

SEQ ID NO: 2781 - DNA, 1414 bp, Glycine max
  misc_feature (78)..(78): n is a, c, g, or t
  misc_feature (80)..(80): n is a, c, g, or t
  misc_feature (235)..(235): n is a, c, g, or t
  misc_feature (470)..(470): n is a, c, g, or t
  misc_feature (488)..(488): n is a, c, g, or t
  misc_feature (1026)..(1026): n is a, c, g, or t
  misc_feature (1154)..(1154): n is a, c, g, or t
  misc_feature (1259)..(1259): n is a, c, g, or t
  misc_feature (1414)..(1414): n is a, c, g, or t
  Peptide Sequence Number=SeqID_6394
  Probeset Number=SeqID_12560
gtgtagctccctcgccgccgcgctctctcccatccgtataataatcattatctgactatattatctcacaccacaccntncctccacacattacgtagttattcatccgcacgccactctccatatgatgaagattatcgctaatggctacctcacgcccgccttccctgcgtggagtggcggcgatggatgtgcctatcaatatgctctcccctataacgcactaaattgatancaccctcatatcgtgcgtgacccctatatactaggcgagctaggttgatgtactgtagtacgcgctcgccacgcactgatactaagtgatatgcggatacgtagagaatctgctcgcggtgaggtacttatcgctaagacatgcgcagcgggtataatgcctgccgagacgctgaacctcgatgtataggaggtcgcgcgcatgccgaaaggtagaccacgagttgtagtgtatntgcgtatgaggacataanaaacaccagcagcgcagatcggtttctgtggtcgctgacatagccctattagtatgtgtgtagagcgcgaagcgacgctagggactcgatgccgccgcaaagatactctataagcagagcatcgagccccacatacccgctttcgccgtcacgcaacatgctgaatgcgttgcgccgactacaaacacgtccgcagtaaaatatgtggagtattaagatccaccaccccaaactcactcggtgcttcccgcgccgcctggtgagtcctcctatgtgcctcctccccacttccttcatgcgttacccgcagcgcaattcaccgcggcgcgcgcattatctcataatggctgatgaatataatgtatcatgaaatgacgattatcagtatcttgtcgttgtctcgattatcctctccgcctcgtcagcgcgctctattgaggtagacaataatcagatataattgcttctccatcatacgcgcgcaatacgcactgagatatgatacatagtcgtactcccagactagctctaatactangtcatgtcgtcaatagtataaacgaaacggatatatggagactcgatgatctcacacatccacacattctcccctctcgagtggtaatacgctgtcttaacacgtctcgtacgcgctgagcagtaaangtggcgactatagacggatggttgtgaaggtagatggtcgtgcgtaagtcagcgtgctcgatgtcgtagcgacactcgactatagctcatagaacgcgctagatnacgctcgatcgcttcgtgtgatagatgagcgtatcgttatgtttggatgtatatacacgaccctccgctctgcgcctgccgcgacctattcactgcgattcttataatatatcaacacactcgaatatcggccgcagccgcgacgcggccgtgcn

SEQ ID NO: 2782 - DNA, 304 bp, Glycine max
  misc_feature (125)..(125): n is a, c, g, or t
  misc_feature (144)..(144): n is a, c, g, or t
  misc_feature (205)..(205): n is a, c, g, or t
  misc_feature (209)..(209): n is a, c, g, or t
  misc_feature (212)..(212): n is a, c, g, or t
  misc_feature (221)..(221): n is a, c, g, or t
  misc_feature (244)..(244): n is a, c, g, or t
  misc_feature (268)..(268): n is a, c, g, or t
  misc_feature (277)..(277): n is a, c, g, or t
  Probeset Number=SeqID_12561
acattagctccatagttcaatagagagagtaaagagcagacataggaagagataaaatggccatggcaacaaaatcagtttcttacttcaccctcattttcatcctcgttttggttttttttttngaagcgccggaaatagaancgcaggatagcgagtgccttaaagaatacggcgggaatgtgggtttcggcttctgtgcgcntcanacntttccgacnatttgttatataagatgccgtgnggacaaggacgcgaaaggtggaanatgctttangggagatgccggtgcttttgattttaa

SEQ ID NO: 2783 - DNA, 1846 bp, Glycine max
  misc_feature (1)..(1): n is a, c, g, or t
  misc_feature (1635)..(1635): n is a, c, g, or t
  misc_feature (1693)..(1693): n is a, c, g, or t
  Peptide Sequence Number=SeqID_6395
  Probeset Number=SeqID_12562
nggccagtcctcgagtcagctacgtaggccccccccccaattgatggtgaagctgaagttccattagcgacatcagaaattaagtatgtgagagatgtcgttaacacattcattgcatggccattgcctttggtaaaactggtatcaaatgaggtagtatactttatgttctgcaaattagtatcttttcaacagtatattccaaacttttgaacattcctataatgaatacttttgttgcatgatatagcattcaggaatcactccagacaaagctgccaatgctgccgaattaaacaatgatgttcctaaacaggaccccttgcatgagttgattaagacccttgttgagatttacgacaagcctgtggagtttgtgtgggatcttactaaatttgggattccaaatgtaaattcattgttgttcttaacgtatactaatgtcagtgaaataacatcaggtgaaaaatgcttgaacatagccatacttcaattttggaccatgtatatgaatgagtggagtaatggcttgggtcatcgatcggtgtatggattccttgagcctcaatctatacacaatgcaaaggatagacgtgggcaatgtgaagaatatattgaaaaatggcttaaggaatctcaacgacaactgtacataggagcttatttgaatgacgcccattggcaaatggttgtgttgtgtcctaaagacaatgtggtggtctagttttgtttagtgcgtagaaggcctgatgttcatatcaaaactgcaattaacaagttaagtaatatatttttagtcgtttaacctattttaaagttggaggctacaattctgaacattatattaacatcatattaatcttccaatgcaatgcatataagaaattaaacacgactgctgatgggaaagttcctaaaactggaccccagtggcttgaactgaagactcacattcaacgcggaggctatgagtgtgggtattatgtgatgcattggatgtggaacataattggcgcagagttgaagagtgattggagtgtgtggttcggtgatggctcggcactagacccggaggcgatcacaacattacgtaaaaaatgggtagcttactttttgaaacttagaaccatccaatgtacaaagttgtaattacataacatgtggacatgaactttgttttactgatgtaattgttttggttgggttgaacagtgttgctcctttaatggttattatctttcaattaaaatatgaatgtcttaatttcaaaaaaaaaaaaaaaaaaaaaaaaaaagaaaaaaaaaaaaaaaaaagggggcgtgctcccacggggggatccacatacttctaaaaggggcccgcccacccggggggagcctccacccttttggtcccctttagggggggggtaaatttccagccttggccgtaaatccttgggcccatacccggttcccctgggggggaaaaatggttatccccgcgtcccgattttcccccccccgggttaccaaacccccggaaagcctaaaaggggggaaaacccccggagggtggccctaaagggaggcggggcgaaactcccccctataaatttaggttttgagggttccttagcccaccatttttcctccncggggagaaaacctggctggtgccaaggcggccttaataagaatgtcggtcaaacccnccacgcccaaaaagccggcgttttgcgaatgatgggggggacttttcgcgcttttccccccacaatgtaaaaccccagtgcccacctggatctccactgttcctgaggcatagaaaaaatatcattgtacctatggtggcgtaaaatacagct

SEQ ID NO: 2784 - DNA, 1500 bp, Glycine max
  misc_feature (25)..(26): n is a, c, g, or t
  misc_feature (31)..(40): n is a, c, g, or t
  misc_feature (42)..(42): n is a, c, g, or t
  misc_feature (47)..(47): n is a, c, g, or t
  misc_feature (49)..(49): n is a, c, g, or t
  misc_feature (51)..(51): n is a, c, g, or t
  misc_feature (56)..(59): n is a, c, g, or t
  misc_feature (61)..(62): n is a, c, g, or t
  misc_feature (66)..(66): n is a, c, g, or t
  misc_feature (71)..(71): n is a, c, g, or t
  misc_feature (74)..(77): n is a, c, g, or t
  misc_feature (82)..(83): n is a, c, g, or t
  misc_feature (98)..(98): n is a, c, g, or t
  misc_feature (111)..(112): n is a, c, g, or t
  misc_feature (129)..(130): n is a, c, g, or t
  misc_feature (137)..(137): n is a, c, g, or t
  misc_feature (141)..(141): n is a, c, g, or t
  misc_feature (230)..(231): n is a, c, g, or t
  misc_feature (248)..(248): n is a, c, g, or t
  misc_feature (272)..(272): n is a, c, g, or t
  misc_feature (285)..(286): n is a, c, g, or t
  misc_feature (289)..(290): n is a, c, g, or t
  misc_feature (292)..(292): n is a, c, g, or t
  misc_feature (295)..(296): n is a, c, g, or t
  misc_feature (391)..(391): n is a, c, g, or t
  misc_feature (837)..(837): n is a, c, g, or t
  misc_feature (1088)..(1088): n is a, c, g, or t
  misc_feature (1220)..(1220): n is a, c, g, or t
  misc_feature (1332)..(1332): n is a, c, g, or t
  misc_feature (1355)..(1355): n is a, c, g, or t
  misc_feature (1486)..(1486): n is a, c, g, or t
  Probeset Number=SeqID_12563
ttatatgacttaatctacttttttnnttttnnnnnnnnnnanacaananancaacnnnnanntaanatacnccnnnnaaccnnaaaacaccccacaanacgacggagcggnntctacacaccggggggnnagggggntggnattgtgtttgtgttttgttcctctcttcctctatcgtcggcgggtggtgatctctaacaactatatatacttctaattatattttatgnncgtatgcgagggtggangcgggggaggcgcgggaggtgttnggtggtgcgtctnnttnntntcnnttttagaaacacccacatatattaactctaacatcccacatctgtcaatccaaaacgaaccagtgtaaaaacttaacaatacactccccggtganatcgttcaactgaaccctccaccccgcccctccccgcccgaccaccgccgcctcacttgtctcggctactctcttcttcgtgtatcttattgttggttatggtatgtatataatatgacacacgctgagtaagataccaggcgaggcatcacacacactagtgggttatgcggctgccgcgcgcttcatgttgacgtgtgacgtggttctcgcccgttgttgttgcgccttgcgctgtgtgatattgtgtttattcttgcgcatcttcttgttttctcgatcatgggttgtttgtgatctctcctgcgcgctgatgtgagctctacttcactgcccttcgctctacacatgatgtattgtgctgatctgcttttattgttatctgtagtcactacctcctgacgtcacaatacaaatatacatcaataatactagaacagatcaanagacaacaaacacatcactccacatatacgcgcgtcacatgtctccgctctccccaccgcacgtacatactctttctccctcctccacacatgtactctcccaccatactcatgtgtctttgtttatctttctgctgctttctggttgtgtcttcatatcttctcattacacaggacagagacctacgtaactatgcgttatgctcgacactcatactatattacatcacgaaagaacaataagctgacantctccgtacattatatgcgcgctcaccaaccgctagctcctatttctcatactcactcttggtcctctgtgtttcttcttattcatgtctcagtcgtctattgctgtgcgtactctctcttcgcctctgtgnagacgcgacgagacgtccgcgcgtgtgtgtatgagagcgattagcgtgcaggtgcgcttcacagtgatagtgaataattatccgagtgtaaacacaggaccgataactacgnaaccacacacagtcatcattgtntatttgctgcttagcgctgcgttctgtcatatgtgtaccgtctctcttgtctgtatgatagtcgtttttgatactgatcatttactctctgctattcgtctgcgtgatatgtacttctatcatgactactntctataccccagaa

SEQ ID NO: 2785 - DNA, 477 bp, Glycine max
  misc_feature (462)..(462): n is a, c, g, or t
  Peptide Sequence Number=SeqID_6396
  Probeset Number=SeqID_12564
attttcctcttctcctagatcccctttctcgtctagctcgctcagggcgtcggtcgccattgcaacaccagccgcaggaatcggcgggatacgctggccctcagttcggatcgacgtccatgcctccggctctgacatgcacgcccgctggacgccgccgtgaaccaccttgttttccgcctcttggaccgaggccatcttcgtcggttccgtcggccgccactgcggcgccgcggttatcctcctcaccaaacaactccagggaccgtgacgggctccgtgttatccgcatctcctctggaccatggactcgaagccgcgggtccctcctacttcttccctgacgttgaccgtcattgtcgctgtccgagctcgttgctctgctccgtccgaccttgccactaacaacatgggtttcttgatcgtttcaataggagtccagtaatgaggggtattacgagntcgatccgtagcttc

SEQ ID NO: 2786 - DNA, 529 bp, Glycine max
  misc_feature (146)..(146): n is a, c, g, or t
  misc_feature (153)..(153): n is a, c, g, or t
  misc_feature (159)..(159): n is a, c, g, or t
  misc_feature (169)..(169): n is a, c, g, or t
  misc_feature (185)..(185): n is a, c, g, or t
  misc_feature (190)..(190): n is a, c, g, or t
  misc_feature (210)..(210): n is a, c, g, or t
  misc_feature (245)..(246): n is a, c, g, or t
  misc_feature (376)..(376): n is a, c, g, or t
  Probeset Number=SeqID_12565
tttcgtttccgtagcagttttctcacacttcaccgctgcttccccttcacctccgatttcgtatcagtagtcagagatcaaaatgtctcgaagatatgacagccgtacaacaatcttctcccctgaaggacgtctttaccaagtgnaatatgncatggnagctattggntacgctggtaccgcantaggnatcttatcaaaaaaatgggntgttggctggttggtgaaaaagaaagtcacatccnnagctggctcaaatttcaacttccacccgaaaaatgtacaagaattgacgatccttggtgcaatggccttgggctttggaataatggctggatgcgaaaatcccatttcataaccgggtaggggtccaagncaaaagcttaacaataacgctattcagaggcccatggccgtgggggcaaaaaaaatccccctccccctgggaaaccccaggaagggtacaccccctttggcgggggctttccggccttcggaggccccttttttgtgtttgtggggagaggga

SEQ ID NO: 2787 - DNA, 1502 bp, Glycine max
  misc_feature (61)..(61): n is a, c, g, or t
  misc_feature (99)..(99): n is a, c, g, or t
  misc_feature (131)..(131): n is a, c, g, or t
  misc_feature (171)..(171): n is a, c, g, or t
  misc_feature (206)..(206): n is a, c, g, or t
  misc_feature (259)..(259): n is a, c, g, or t
  misc_feature (345)..(345): n is a, c, g, or t
  misc_feature (674)..(674): n is a, c, g, or t
  misc_feature (693)..(693): n is a, c, g, or t
  misc_feature (740)..(740): n is a, c, g, or t
  misc_feature (814)..(814): n is a, c, g, or t
  misc_feature (1041)..(1041): n is a, c, g, or t
  misc_feature (1100)..(1100): n is a, c, g, or t
  misc_feature (1195)..(1195): n is a, c, g, or t
  misc_feature (1446)..(1446): n is a, c, g, or t
  misc_feature (1471)..(1471): n is a, c, g, or t
  misc_feature (1477)..(1477): n is a, c, g, or t
  misc_feature (1490)..(1494): n is a, c, g, or t
  Peptide Sequence Number=SeqID_6397
  Probeset Number=SeqID_12566
cggagagtgatgtcgagcgagtgatatatacacattgcgcactaccgtagcagatagtccncgacagcagatacgagcgcgcacgcacggtgtgtagcnttgtgcatcgagatcatacacgtgcgataganaggagaggatacactccatgacgccagatgtactggagtnagaagtacgggaatgcggcgtcgcgcatcagaganatagccagccaatagacataacggtatctctctacaacacctaatagctcatncgtctataccttattcgcagtggctccttctagagccgaacaacagtgtatgtgagggagcttatactccactacaacagaagagnaccagatacacgctgtcacgatatgatgagagaggcgagctggggggtgcgcggcgctggcatccagctagagtacctctcatattatttctcccagaggtacctagtagtatgaatggatatggcgctcatgatgtgttgttggcagaaggagcacatacaggagcagagagcgaagtgagtggagtgttagtatgcgcaccatacctctcacgtctcagacagtacaccataacatgctagtaccggtatggcgcggcgcgctccgcatggagagcctatctagacactccgcctcaagccaccaatgtagtagaggtagagaggangaagatgatagagtgaggngtagtgtctgtagatatctatttatattctttaagtgtattctatgntgttagtatcagttatgatgagtgtactagtagcttcatatctattgtccatgacatgtgcaataacgagagtntatcatccagatgagacctctatggaatgtagcgtcccatagctagacgagtgagtgctcacggcagagcctacatcatttgacctctcttagatgattagctaaactctctactgctcagtctacgcacaaagaatgcactttgtggagtgttagctcacagccgcacgtcatgagttgcgtagcttgtcagatataccagtagagggatatgcgagagtgtgcangggatactatgtaaggtgcactctgttcgttttgttcgtcgcatacgcactacagtagncttgatatagtactcctgacgtgagatgatactgcagacggctgtgcgtgctatagtatgctcttcgactgaatccaaccaatacgagcgagacncgttatgatagacgtgaagaatgacgcggataggagtagtaaagccaaacacagaaagcatcaatcaagatgagaatatcttgaacatagtagatagagaagacatacactataggatgttcctacttctttcctcccgcgaggcggtggtgtagtctcctctgcgtagattggcggaggcggcgcgtccccgccagcggaagaggtagacatcccccttgctatatatcataatttatttagagtatatnactctggccgttctctctccctcgnctaagngaattaataatannnnnaccaataa

SEQ ID NO: 2788 - DNA, 1368 bp, Glycine max
  misc_feature (31)..(31): n is a, c, g, or t
  misc_feature (38)..(38): n is a, c, g, or t
  misc_feature (56)..(56): n is a, c, g, or t
  misc_feature (88)..(88): n is a, c, g, or t
  misc_feature (131)..(131): n is a, c, g, or t
  misc_feature (134)..(134): n is a, c, g, or t
  misc_feature (138)..(138): n is a, c, g, or t
  misc_feature (155)..(155): n is a, c, g, or t
  misc_feature (172)..(172): n is a, c, g, or t
  misc_feature (186)..(186): n is a, c, g, or t
  misc_feature (200)..(200): n is a, c, g, or t
  misc_feature (219)..(219): n is a, c, g, or t
  misc_feature (221)..(221): n is a, c, g, or t
  misc_feature (223)..(223): n is a, c, g, or t
  misc_feature (226)..(226): n is a, c, g, or t
  misc_feature (228)..(228): n is a, c, g, or t
  misc_feature (235)..(235): n is a, c, g, or t
  misc_feature (268)..(268): n is a, c, g, or t
  misc_feature (270)..(270): n is a, c, g, or t
  misc_feature (289)..(289): n is a, c, g, or t
  misc_feature (291)..(291): n is a, c, g, or t
  misc_feature (335)..(335): n is a, c, g, or t
  misc_feature (359)..(359): n is a, c, g, or t
  misc_feature (367)..(367): n is a, c, g, or t
  misc_feature (499)..(499): n is a, c, g, or t
  misc_feature (527)..(527): n is a, c, g, or t
  misc_feature (530)..(530): n is a, c, g, or t
  misc_feature (536)..(536): n is a, c, g, or t
  misc_feature (542)..(542): n is a, c, g, or t
  misc_feature (549)..(549): n is a, c, g, or t
  misc_feature (551)..(551): n is a, c, g, or t
  misc_feature (557)..(557): n is a, c, g, or t
  misc_feature (560)..(560): n is a, c, g, or t
  misc_feature (634)..(634): n is a, c, g, or t
  misc_feature (636)..(636): n is a, c, g, or t
  misc_feature (900)..(900): n is a, c, g, or t
  misc_feature (906)..(906): n is a, c, g, or t
  misc_feature (908)..(908): n is a, c, g, or t
  misc_feature (1045)..(1045): n is a, c, g, or t
  misc_feature (1132)..(1132): n is a, c, g, or t
  misc_feature (1218)..(1218): n is a, c, g, or t
  misc_feature (1224)..(1224): n is a, c, g, or t
  misc_feature (1241)..(1241): n is a, c, g, or t
  misc_feature (1289)..(1289): n is a, c, g, or t
  misc_feature (1291)..(1292): n is a, c, g, or t
  misc_feature (1314)..(1314): n is a, c, g, or t
  Probeset Number=SeqID_12567
ctgtagactgagcgatatgtcgtgagatagnaggtgtnaagcgacttcgtctttcntgctgataatcgacgagctagccgctatcaangtggtctatttactggtacttttgccgtcgtggtcgcggtggncgntcangcgtcggtcgcgtgacnctacgtatagatgtcgncgtcgctgtgggtnacgtagacgtcttncgcggagtgacccgacacncnancangngacgatnctatatctccacgccgtgacgacccgacatatntnatatggtgtacggtccacncncacgtcgctttatattgtgggcagagatagctgccgcgcgactntctcaagaggggtgtggttctcantgcactanagttggttgatagcgatcgggcagattccactatgagctcgtatacatgcgcacagagtgcaatgttttagtatatcactgactcctctctttttcccttcacgtgtccgattccatattgagtgtacgcantcaaaggtatcattcttgcggagatttntgnttcgtnttgtgngtcctcntncggggnttnttccccgcataacatcaatacaacttcaccccactccagaacgtgactgtgcctgggtgttggttttttataantntaaattacaagggataccttctttttatttcataccctacaaataaaatctacactgcccactctctatatcgcttcctcaaggccttatgataagaaataccttgtatggtcttctgaaagcggccagtggttctctccagatcccaccttactcctgggtgtagaggaacgcgacgcattcaccggtctctgtagtatagacacgtatgtaggtaattgtgtgtgtcgtacgttgccctcagatagaccgacagcggaagangcgtgntnacatcatcgtcgatcgtttcggccactgaagagatacgttaccgattctggaggacttttgtcttctatttgttgccaaccgagagatagtgcgaggttcctcacgatatcctaatacgtctagacgcatcagagcncatgcctggcgataggacaacaggacccgaggtacctaaggttctacgcgtggagataacaacaatgctcgatctctgcatgctcgngattcacttgaaacatagtcgatgcgtctaccgcgactatgactgtgtattgggggggaaaacatgataagattgaatgatcatanctttgntatgtgaggggaaagtncccctcctacgagggggcgcgcgctctcgctacccatatagtcgtccncnncttacatccccttgtcgccgcntgaataatatacgcccgcgcgggcaccgaggcgcgagcaggaacaccaccccaa

SEQ ID NO: 2789 - DNA, 464 bp, Glycine max
  Peptide Sequence Number=SeqID_6398
  Probeset Number=SeqID_12568
ataaccaaccgcaaagtccaggtaacacaaagaagtaagtagccgaaaccctaaatcctcactcaaatcgatcgagatcatccaacgttgaagagctgtgtcactatctcacagatcaattctcaaaactctcccctacaatggttgcaccgatacttgcaggtgttgctgtcgcggctgctgcttacgctggtaaatacggaatcgaggcgtggcaagcgttcaaggcaagaccacctaggcctaaactccgcaagttctacgaaggtggtttccaagctgctatgactcggagagaagctgctctcattctcgacgttagggagagtgtagcggcagagaaggtgaaggaagcgcaccggagggtgatggtggctaatcatccagacgcaggaggaagccattaccttgcgtctaagatcaacgaagccaaagacatgatgcttggcaaatccgagagctct

SEQ ID NO: 2790 - DNA, 522 bp, Glycine max
  Peptide Sequence Number=SeqID_6399
  Probeset Number=SeqID_12569
tattagaaatcataataattatgcagcgtttttattctttattatttgaccttgatgatgattttgtaattttttaataaatttaagctaaaaatagaaagagtgttagaaggtgttacttattattactattattttggagcaagttttgttattgcttacaaatctcgtgccgaattcggcaccagtggtaatcaaacccctctcagttgcacctaacaacattacatgttatccacttctgatgctcaaaatttcaggcaatctctcgtggtatttggagtgaggtaacctcagtcaaggtttccaattataaatttgaaatgtgatcccaacgagatcatgtctcaattcatgtcatttgccaactagttcttttgtttgaaaattctgtaaattctacataattgtttgctggctgcatgttggtaatatacttataaacattaaacagtccgttggaaatatttttagaaatattttaactcgaatgattaaaaaaaaaaaaaaaaaactcgagac

SEQ ID NO: 2791 - DNA, 895 bp, Glycine max
  misc_feature (895)..(895): n is a, c, g, or t
  Probeset Number=SeqID_12570
ctaccattcgccttcccgcacccccttccgcccccctcccttcgaacctcccccaaatcaccagcactcgaccggaggccccaccacgccccgtgccccgcagcccgccggccggcccaccggccgcaaggcgccgcgcgccccgccagccaccacgccgccgagggggccgggcgggcccaccggccgacggccgaagcccccccgccccacggcggcgagcgggggccgccgggccaccgggaggtcccagaggaccaccgggccgcggacccgcaagcgcccagtcccgcgtctcgtccccgggtccgcgagagccctcaggacttccagccgcacccccgcctcccgcgccgcggcctgccggccctccgcgaggcggccgatccgtgcctcgtccggctgctccaggccacccacctgcgcccccaccacgcccaaccccgtcccccacgcccgccgagcccctcgccagcgcgccccagccgcgcggcgagccccgcggcaccggttccgcgcgggcccagcaggcttcgtatcctcctagaggcttatctctccgcggtggtctgctcctcgttatgtttccctccttgtatttctaatggatgccatcaaatgttcaaatcgcgttggtttgtttatagtcggtgtgccccgcgggaagagggaccccgtaccccacgcggcgcggtgccggtcgatacagaacccgtcgggatagtggcgcgtgcttcgccccgcgccccgcttgttccccctcgcgccgccccgcttgcttggcggtgggctcccacgcgcgcaaacatcacccgtatacctgtccgctaccgccccccgcccgtacccgccgcgcgcgcggcgtctgtcccggccgcgtcactcaccgcccgcn

SEQ ID NO: 2792 - DNA, 392 bp, Glycine max
  misc_feature (351)..(351): n is a, c, g, or t
  Peptide Sequence Number=SeqID_6400
  Probeset Number=SeqID_12571
gttacggttgagaaaaccccctttttgaaaatggagaaattgacctccgcggcaactcctcctcctccttccgctacttcatctctcccgcttcctacagcagctgcagcagatcagagatcttcgccggcgatggacttagataacccgccggttccgagtcggccacatataggaggagctcaggtggctccgtcagatccgtcgtcaagggggagaaagagggggctggaagggaatctgaaggtggagaactccaactactacaagatgcgtctccttgtcaaggatcttcgccctcacgttctcgaggtactacgagctcccgacttcagaaactgcaaggcagcngtcgaaattcaagagaagatgaagcttttgcttcaactata

SEQ ID NO: 2793 - DNA, 655 bp, Glycine max
  Peptide Sequence Number=SeqID_6401
  Probeset Number=SeqID_12572
atattcatgttcatcttcccacgagattctggttctctttaggccacccacacaccaccaccgctccccaactcgctccgagttgactcaatcctttcccttccgagatcaaccgccaccaccaccgctctccgccggcaccgcaaccccgccacccttttccttcaatgcaaaactcgtcgtcaattctcgccggaaccttctcccactcttcctttcccttcggactttgacttttgctttcttgcgattccgatgaggccctttcgttctctcttgctcttcggccccgtattcgtcgtcctccagcccctgggcgccacgcacggcgacaccgatgccgctttggctatagtggtcggggcaagaagcaagaactcgcagactgaagcgtagatgtgtaacagatcaacggttgccctaggatagcattttatgttgtagaaagatgagggtatagtatgttcccggagaatcttttctaagggttttggaggggctgtggcttacatgttaaaaataatatataggtggaaggagtttgatttgggatgtatttaccaaaagggtgctgggaacagggccaagcttcttgggtgatctgggttaaaaaagtttggagaactgaagggaaacgcccccggtttaaaaactc

SEQ ID NO: 2794 - DNA, 1636 bp, Glycine max
  misc_feature (1)..(1): n is a, c, g, or t
  misc_feature (9)..(9): n is a, c, g, or t
  misc_feature (15)..(15): n is a, c, g, or t
  misc_feature (76)..(76): n is a, c, g, or t
  misc_feature (91)..(91): n is a, c, g, or t
  misc_feature (156)..(156): n is a, c, g, or t
  misc_feature (177)..(177): n is a, c, g, or t
  misc_feature (189)..(189): n is a, c, g, or t
  misc_feature (196)..(196): n is a, c, g, or t
  misc_feature (206)..(206): n is a, c, g, or t
  misc_feature (215)..(215): n is a, c, g, or t
  misc_feature (217)..(217): n is a, c, g, or t
  misc_feature (219)..(219): n is a, c, g, or t
  misc_feature (221)..(221): n is a, c, g, or t
  misc_feature (238)..(238): n is a, c, g, or t
  misc_feature (332)..(332): n is a, c, g, or t
  misc_feature (356)..(356): n is a, c, g, or t
  misc_feature (430)..(430): n is a, c, g, or t
  misc_feature (468)..(468): n is a, c, g, or t
  misc_feature (488)..(488): n is a, c, g, or t
  misc_feature (539)..(539): n is a, c, g, or t
  misc_feature (545)..(545): n is a, c, g, or t
  misc_feature (551)..(551): n is a, c, g, or t
  misc_feature (553)..(553): n is a, c, g, or t
  misc_feature (648)..(648): n is a, c, g, or t
  misc_feature (755)..(755): n is a, c, g, or t
  misc_feature (760)..(760): n is a, c, g, or t
  misc_feature (766)..(766): n is a, c, g, or t
  misc_feature (833)..(833): n is a, c, g, or t
  misc_feature (874)..(874): n is a, c, g, or t
  misc_feature (915)..(915): n is a, c, g, or t
  misc_feature (969)..(969): n is a, c, g, or t
  misc_feature (977)..(977): n is a, c, g, or t
  misc_feature (984)..(984): n is a, c, g, or t
  misc_feature (1051)..(1051): n is a, c, g, or t
  misc_feature (1100)..(1100): n is a, c, g, or t
  misc_feature (1120)..(1120): n is a, c, g, or t
  misc_feature (1143)..(1143): n is a, c, g, or t
  misc_feature (1149)..(1149): n is a, c, g, or t
  misc_feature (1155)..(1155): n is a, c, g, or t
  misc_feature (1222)..(1222): n is a, c, g, or t
  misc_feature (1269)..(1269): n is a, c, g, or t
  misc_feature (1280)..(1280): n is a, c, g, or t
  misc_feature (1303)..(1303): n is a, c, g, or t
  misc_feature (1306)..(1306): n is a, c, g, or t
  misc_feature (1359)..(1359): n is a, c, g, or t
  misc_feature (1445)..(1445): n is a, c, g, or t
  misc_feature (1454)..(1454): n is a, c, g, or t
  misc_feature (1485)..(1485): n is a, c, g, or t
  misc_feature (1490)..(1490): n is a, c, g, or t
  misc_feature (1493)..(1494): n is a, c, g, or t
  misc_feature (1506)..(1506): n is a, c, g, or t
  misc_feature (1511)..(1511): n is a, c, g, or t
  misc_feature (1513)..(1513): n is a, c, g, or t
  misc_feature (1516)..(1516): n is a, c, g, or t
  misc_feature (1525)..(1525): n is a, c, g, or t
  misc_feature (1529)..(1529): n is a, c, g, or t
  misc_feature (1532)..(1533): n is a, c, g, or t
  misc_feature (1543)..(1543): n is a, c, g, or t
  misc_feature (1545)..(1545): n is a, c, g, or t
  misc_feature (1547)..(1547): n is a, c, g, or t
  misc_feature (1583)..(1583): n is a, c, g, or t
  misc_feature (1587)..(1587): n is a, c, g, or t
  misc_feature (1591)..(1591): n is a, c, g, or t
  misc_feature (1593)..(1593): n is a, c, g, or t
  misc_feature (1603)..(1603): n is a, c, g, or t
  misc_feature (1605)..(1605): n is a, c, g, or t
  misc_feature (1608)..(1608): n is a, c, g, or t
  misc_feature (1610)..(1610): n is a, c, g, or t
  misc_feature (1612)..(1612): n is a, c, g, or t
  misc_feature (1615)..(1615): n is a, c, g, or t
  misc_feature (1636)..(1636): n is a, c, g, or t
  Probeset Number=SeqID_12573
nctgtagcncgacancaccgtagagatacgacggctgttgcgtacagtgctagcttcactacgagagacgagaatnggagagtgagtagcnacatgacgagacatcacggtgcttgccgtgctcatcagcgaccgctagctacatcagcactgtcnacacgatacacgtctatagcntatgctacgagnacgtcangaatagctangcgagatgngnangngtcagtcatcgcgtagnaagacgatcgacgagtcatgacatgatactatgcgtcacatagatgtctagtgatgtgtatagatgtcgtatctacgagtcacgtacgcagcgngaacgcgatgactgagctatcaantcgacgtgacacgagagacgcgatcgagtacagagtattacgtatagggtacgactgtcgcgtcgtaggaacanctaacatactctagcactcactacgcatgagagtcatngcagtgagtgagtatgtggngaggatgtagaggatcagtcgatcactcgtgcacagcggagtgcggatgangtgcgnggtggntnttgtctactttactcatctcgtctctgataccccgtcctatcaacgtgcagtatcttcactctacgtggatcagatgtggatagtgatactcatngagtatgatcatcaactctgtatctgatggtagcgctggaagagtggagtcgagagatggagcgctatgtcgagtagtcgaatgatcgtcgatacacatcgacaccnacagntccctncttatatagacgagcgatgcaatgagctcgctctcgattggtatataacatggaatgtcggaccacngtaacacagagtacacatgtacagacgtcaggcacgcacangcactggatcgttagttgtgtcagatgagacgcagacgtancacaccgacgacatagtcgagacgagtactcattttcatgcagaacatcataancagatacnacagtgncacaatgacagcataggaatacaagcgtcgacaggcgtcacatatgtgcacagacagtatcatcatnatcagctgtacgagtgacacgatgggcgagaggcggcgctgacgtgtgncattgcggacgcatgtcgcnagtagatgcgtcgtgatgtgagngatgangatagnatccatcatttacgacgcatcactatctgtcgtcatactcatctgtgatcctaattcgtagtgtgancaggatagtagaacgactcatagacgacagacgaagcgtctatacanatacatctgcntatatattagagatgtcgtgtantanagtcgcagcgaccgtcgcgacgcgacgacagtacgcgcgtcagtgtcgacagnacgaacacacagtcgcagacgcgcgttggttgagtgtgtggctagtgcatgcatctctctcgtgacgtggatcagcagacgccgtngtgctcctnagtatgcatagctgtatccgtattagagagntatanctnntcaggtccgcgngccgncnggnagcgacccngcgntcnncgtgatgtgntnantctattacgtaatcgtgctctatataccacctcgcncgcnctcntncttgttcgtncnacnantnacncccaccacaaacatcccaaan

SEQ ID NO: 2795 - DNA, 618 bp, Glycine max
  misc_feature (601)..(618): n is a, c, g, or t
  Peptide Sequence Number=SeqID_6402
  Probeset Number=SeqID_12574
ttttttttttttttttttaaatagtttgaaagacatagtttcttctttagaaagaagctattctcttcttattgatataattagcccagatataaaacgggaaacgaactttgtcataaatgaaatgaattcaaataacaacaaacaataaacgaagcaagtaaaatattaacgatgaatcaatacaaaaatcctatgacaattcctatatctcaaatatataaaaaaacgtccaattttcagtttcaacatctccaatattcttaatccatgccatatttgtttttatatttatggaagacaaaatcaggtttgttggtctgattacgttcagcaaggttcagttttcttccttctttcatcttttgattagcttttaaaaatttcgtcttgttccactcattcttgaatgcatttattctactcactggatcactcttctttgcgatcgtcttgaagttcttttctgaataattaaacaccttcttcccaatcattggctctcttatcggttttgatatatcggcttaaatgtcactggttttctatcctcagtttcataagcatcaggatgagcggcagtttgaggtctattttggtnnnnnnnnnnnnnnnnnn

SEQ ID NO: 2796 - DNA, 1730 bp, Glycine max
  misc_feature (24)..(24): n is a, c, g, or t
  misc_feature (1730)..(1730): n is a, c, g, or t
  Peptide Sequence Number=SeqID_6403
  Probeset Number=SeqID_12575
aaaaataatggtcttctctttccntattggaacatgggccttctgaggttggcacgtagaagagcaacgcataaggtatctatcaactggatcccgtgtccttcaaatgggaacttctaaaccacatgtctcgatagacctatccacacaacctttgttataaaaaccaaaacgtgtcacggtttccctttgcccgaaaatttcagcctaatcagcaaaatagatagagcattgcctaggacccccccccatgcttcatccttctgtctctcatcccatgtgaaggttcaatggtcactaagctagttcagccaccaatgacagattcccatgtgagtcctctcatttatagaaccatgaatgtcatgaaactccaaaattttgtcccagctagaaatcattcaagaataaacacctcaagatttggtgagagaccattatggtttagacccattacaaatcattaaagttgcagaacacaattctggctcaggcttagctgagcttgaaacacttgctcagaagaaaagagagctttcccaggcggtggaaggtacacactctccagttattttcatctcccttttattattatgattgaaaagagtaatatgattgaaaaagggttgcaaaaaaacatgttttgaaggaatcaataggggaatttttggaaaaccctatacctagaaaacgtgacttgaaactggagggtagctgacagaatgtcctaatcctctccatgcccgactctagaactggggctggtggccgggtgctggaggcttgtttacagtacgatctctattttgggatcaaacaggaccatatttggcctcagatacttcatctcattggatgatttttttcagacgattgacatatccaagagcttagcagttactgtgataaagttcagtgcaatgggattgtgtgtgttgtctgcacagcttactgttgaagcctctttcaggattgcttcctcaacagttaaaactcccttcttgtttggtcgcttatttctctgtaaagcattaatatgtaagaggccctgccaaggccccagcgagttgatcgcagtgtctgattgccggcaggtttttatgataataataacccgtaccctctgtccttccactttaatgggcaaagtttagaagtactcgactcattttttatccatacagatgtttttgttttgataattttgttggccaagattcatttagttattatgttagaaatttcttcttatacaaattattatgggcagaaataagcaagttatgttgcttaagagaagcaattaattactgatcactgttgtattcctactctcacaagtaactatgagaattggatggcacgacaaaagcaatatctttgtactggaaagatgtgatgattataataacatgtagcctctttccttcagcttacaaaaaaaaaaaaaaaaaataatatttatttatttttattcataagttttagtttttcaaagacagagactaatgtcttttggggggggggccgggtccccaattaccccttatcgggtgtgttttgtcccccttctgtcggcagccgtttaacaacgtgggaactggaaaaaccttggggttcccaaatttaatggctttgaagaaaatccccttttccccagttgggttaataggaaaagggcccgcccggatcgcctttccaaaaatttgcccaccctgaatggaaaatgn

SEQ ID NO: 2797 - DNA, 1447 bp, Glycine max
  misc_feature (11)..(14): n is a, c, g, or t
  misc_feature (219)..(219): n is a, c, g, or t
  misc_feature (290)..(290): n is a, c, g, or t
  misc_feature (292)..(292): n is a, c, g, or t
  misc_feature (388)..(388): n is a, c, g, or t
  misc_feature (420)..(420): n is a, c, g, or t
  misc_feature (716)..(716): n is a, c, g, or t
  misc_feature (886)..(886): n is a, c, g, or t
  misc_feature (901)..(901): n is a, c, g, or t
  misc_feature (906)..(906): n is a, c, g, or t
  misc_feature (916)..(916): n is a, c, g, or t
  misc_feature (927)..(927): n is a, c, g, or t
  misc_feature (938)..(938): n is a, c, g, or t
  misc_feature (1005)..(1006): n is a, c, g, or t
  misc_feature (1010)..(1010): n is a, c, g, or t
  misc_feature (1266)..(1266): n is a, c, g, or t
  misc_feature (1273)..(1273): n is a, c, g, or t
  misc_feature (1297)..(1297): n is a, c, g, or t
  misc_feature (1380)..(1380): n is a, c, g, or t
  Peptide Sequence Number=SeqID_6404
  Probeset Number=SeqID_12576
ttttattattnnnnatttgtctcttctttcctcatatctatacactattcatatacttcacttctccactcccacccccgcctactcctcatcaaattatataacaacaacgatatataccacatatctagcactcccatcctccttctcatatctcctctcctctccatcgcctcctataaatctcttcccatgctcaacaattcactgcctctcccntacaccctaactattatctcatgtgacgaaccacataaactaatcacatcttcactacatatcaagctacncncttcactctctaccatcatcatttgctctctcttctcttctgcttacttccctcttctctcacctctccttgtatatctatatatacgcgctcganccatcataatacaataactcatactccgtctntaatacacctcaaccacgagcaacaataatacaccactcaactcacaccaaccctcactccacctaccccttcctctctcccacaccactccagcacactactactctcctcttccctcccatccactgcctctctccctcccccgtacctcactcctcttcctcctcattcttcttcatatcctctcccactctttaccttctacctcctctctctctctgctatactctttctctctcactctttatccatcaacaacaacatactatatcatcttcagccctctcctctacantcagcaatatattatataattataatattatatatataagtatatatatagaataattaagatatatattatatatacattatacaacactctaataaaaaaccgactcaacccacatatcaccgctcctacacactattattataatatcaatatatatatttttggancacactgattaatanatganaaataataanaaaaattaagncatacacatancatacttactatcctccatattcatcacacctccccaacacaccacctcctcacacatcatccccanntatntcataataaaatatcaacattcccatcacacacctacacctcacagtctacaaccctcgcttacttcatcctcactctctcttctatctgttcttacatatcaactctctctattctaaaccccctactctatctctccttacatctatctctaccgcacattcttctcacgctattcaacactcacgcaccccgacaaatatctattctcatcactattaccatagactcagctatatactctactaatctcttncataatnctcatcacaccacttgctactatncactcacatatataacactattactacttaattcagactagaattatcacacaccatactctattacacaatatctactcctncccgtccatctcatacataatcatcatatcatctcccatcacttcgattccacccactcatccacag

SEQ ID NO: 2798 - DNA, 1855 bp, Glycine max
  misc_feature (36)..(36): n is a, c, g, or t
  misc_feature (82)..(82): n is a, c, g, or t
  misc_feature (97)..(97): n is a, c, g, or t
  misc_feature (136)..(136): n is a, c, g, or t
  misc_feature (154)..(154): n is a, c, g, or t
  misc_feature (158)..(158): n is a, c, g, or t
  misc_feature (174)..(174): n is a, c, g, or t
  misc_feature (207)..(207): n is a, c, g, or t
  misc_feature (233)..(233): n is a, c, g, or t
  misc_feature (344)..(344): n is a, c, g, or t
  misc_feature (349)..(349): n is a, c, g, or t
  misc_feature (397)..(397): n is a, c, g, or t
  misc_feature (475)..(475): n is a, c, g, or t
  misc_feature (479)..(479): n is a, c, g, or t
  misc_feature (544)..(544): n is a, c, g, or t
  misc_feature (602)..(602): n is a, c, g, or t
  misc_feature (611)..(611): n is a, c, g, or t
  misc_feature (616)..(616): n is a, c, g, or t
  misc_feature (627)..(627): n is a, c, g, or t
  misc_feature (789)..(789): n is a, c, g, or t
  misc_feature (984)..(984): n is a, c, g, or t
  misc_feature (1046)..(1046): n is a, c, g, or t
  misc_feature (1198)..(1198): n is a, c, g, or t
  Probeset Number=SeqID_12577
cgcagtagcccacagtttcatacagtagtgaccganttcgatggacactggtaccgagcgacgtacgatcctctctcatgcnccatacactccgacntcgaatctcttgcttgtcacgcactgtctgcggcagtangtctcttgctgagcatcncgancgtatcatatgctgtncgcgacagtgaatcacactgatatccgtacgcnccgcgtgcgtgcgcgtcgctgcgctngggatacatatcagcgctcacaacatcaccatcgcctctcagatcctcctacacgccatcgctcacgcgctcacgcgagcgctcgtgcccactcaccgcagtgcgcatagncgcangactgcatagatatatctgaggctcgtatgtcgcgcgctcatcctatnctttggtcagtgtacatgctgccacagcgtgctgtgtccagctcgtagtattgaacaagtcacccgacgaccgtcgcncacncgtgctgtcgtctactcgcggatggatatagtcctcgcggtgcagcatggagcgtgatacattcncggcgtgtcatacatctacctccagttgtgttgacgatgcagagcttacatacgacgngacgcgctnagagngatgcgtccangtgtcttggtcgacgggtcagcgatccgcgcgtcacacacgatgtcgtggcgcatactctcgaactgatgttctctcggcgtatatagatcgactcgtcggtcgcactaataatctgatattgcttgcgtcgcgtatcttatgtgcaactcgacgctacagntatccgcgtcgcacagtgttaggtacgatacctatgatgatccgcgccagtcgatccgtgcagacatcgtatcaccacataggagcaactacaggtagtggtcagtgtggtcacgctaacctcatactactatcgcctgcccgctctgtcgtcgtagcctcactcgtgctatcgtgttgtggcgacggtcgagtnctcgaagacgtctgcgctcaatgctagcgcatccagcgtgatgcgctcgtcatatgtcagtnaccgtccatacgctcatcacaacaacacgactcgccgtcatatcgtccgcgcatcagatgatcaacgagtgaggtgacatctcgctttgtcacgcaccgtatcccgacctactcgcgcacacatacgcatgcgcgcccgtgtcactctcgcngtgtggacagttcgactataacatatcactcgactatatacacattccgccgacacgcctacattcttcgccgtcgcacttgtcgtaggcctatattgagcagatcgtctactctatatgtactattcacgtccgcgcgctgcatgtcgctgcccagcatgcagtcactcccgcgcgtacatagatagagcatgtgggcccgcgaggttatatctgacaacagtgcacagcgatgcatcgtctttactacagcctcataaacgtaagtatactacattcgagtatatacgtgtgtatgtgatcaatatgccatgtctcatctcatccaactgtctatcgattatgcgtcggcgcgataaaacagagtcgcgggcgctgcgagtgagggtcgccgtgcctccccgtctctccatgtactcctcgcagcaacggcgatcttcggtttgtgtagtgtgcacaacatcgcgttctctgtggctctcgtcccccgctctctctttctgcggagaaataatacctgcccgcaccacctgctgctccgcgtcacgttcactctcgccacactctgttactacgtatacaacacattccgttgatagatgatacatgctatcatctaatacccatctacataaaaccagcgtgcgccccacctcc

SEQ ID NO: 2799 - DNA, 1864 bp, Glycine max
  misc_feature (18)..(18): n is a, c, g, or t
  misc_feature (236)..(236): n is a, c, g, or t
  misc_feature (382)..(382): n is a, c, g, or t
  misc_feature (455)..(455): n is a, c, g, or t
  misc_feature (535)..(535): n is a, c, g, or t
  misc_feature (545)..(545): n is a, c, g, or t
  misc_feature (551)..(551): n is a, c, g, or t
  misc_feature (592)..(592): n is a, c, g, or t
  misc_feature (759)..(759): n is a, c, g, or t
  misc_feature (762)..(762): n is a, c, g, or t
  misc_feature (812)..(812): n is a, c, g, or t
  misc_feature (857)..(857): n is a, c, g, or t
  misc_feature (865)..(865): n is a, c, g, or t
  misc_feature (1081)..(1081): n is a, c, g, or t
  misc_feature (1088)..(1088): n is a, c, g, or t
  misc_feature (1149)..(1149): n is a, c, g, or t
  misc_feature (1171)..(1171): n is a, c, g, or t
  misc_feature (1373)..(1373): n is a, c, g, or t
  misc_feature (1398)..(1398): n is a, c, g, or t
  misc_feature (1445)..(1445): n is a, c, g, or t
  misc_feature (1455)..(1455): n is a, c, g, or t
  misc_feature (1551)..(1551): n is a, c, g, or t
  misc_feature (1605)..(1605): n is a, c, g, or t
  misc_feature (1636)..(1636): n is a, c, g, or t
  misc_feature (1638)..(1638): n is a, c, g, or t
  misc_feature (1642)..(1642): n is a, c, g, or t
  misc_feature (1672)..(1672): n is a, c, g, or t
  misc_feature (1779)..(1779): n is a, c, g, or t
  misc_feature (1805)..(1805): n is a, c, g, or t
  misc_feature (1807)..(1807): n is a, c, g, or t
  misc_feature (1809)..(1809): n is a, c, g, or t
  Peptide Sequence Number=SeqID_6405
  Probeset Number=SeqID_12578
aatgaataatatcatatnaatattataagagatatatagtgatttacctcgagtaacggagcgaacacgcccagtgaacgcgcactcatgcactaaaccaaggagctactatacactaccctcgcctcactcgactatactcgacccctaccacggaccgagaatcaacggataagacacgaacacgcaagtgtagatataggtctgcgctgtgttcgcatagtaacaggaggatngctctgagaagagagcacatagagagtcgggagcgaggtgtgctcgtctcgcgcgacgcccgcgagtcgtgtcggcgtctggcccgcgtggccctcgtgcggacaaacagactgcagcgccgcgcgctaacgcctgctaccgtgcncggacacgtctagatctcacctccttgcatgcactacacacataatgcgcctgtgtcgcgcgtgccgcgctangttgcgcgtctcacgcgatcatcgattacccgactcccgcgaagcacgactatggtaagctggtcgcgtgggagtgcagncactgcgctntgtggngtcggctcggtgcggcgtgtacttcgtgctgtccggtacancgtcgctgtcgtgtcaacgtgcgtcgtctgatgtgatgttggtcggcagcgcacatggaggtgtgacaggagagagtcaggtatggcgcgcgcggcgagtcggcgatctcatatcagtcacatcaatatgtgaacgaagagcgagtcgcatgatagaggaggcgcgntcnctgaacggcgtcgcaaccgcggtggagtccgagagacgcgctctctctanatcatatacttatgattgacgcgcactgctcacagcgttgatccngagtcatncgtactcgcgttcgtgtgaagtatcacgcaccatgatgcgatgtgccgacacatcgagattctgtcacgacggtggcgtggcgtgtcagctagcccgtagcccgttacagacgtctagcgctggagtatatagcgacaccgcgtagccgaacagtgatgagacgcacgcagacacgctcgttactatcgcagatgctgttactagctatcacgtgntcgtggngtgttactctatagatatggaatgatatgagcgtgagcgatgtacgacgaggcgcgcagtngatttctcttagtatgatactngctattgtgcgtgatcacacctacacaccgtgcgctcgtctgcgacgcgatgttctgccgcgcgcgactgcccgatagtgtgtatcatgtcgtgcgtcgacacgtggtgagagcgccagcaccagtgagctgcacagtgtggtatcgacgctccatatgcggccccactacctcgcattcacatcacgcgataatcgacacntgtgctagtgatctcaccaatacgnacatgtgatcgacagcgtacgtgatattgacactaatcgatatcgtngtacggtctngtcgatatgctagagtgtgtatgtagtagtatcactatcagacgtactgcgctcttctacctcacacttgccactgcggttagatatacgatatantatacctgtgcacggcagtatgctgcgagcgagcgtgctcgactatcgcgtcgnataggccgtgcgtgatgagatgcgatgtagncnagtncacgcgggtctgcacgtttcaccagccganctccactacactcatatcactagcgtcagtgttcgtcgacgtgcgcccagcacgctgcagacgactactgagcactgagcaccgtaacacgtcaatcatagatgcangcgctcgtgcgatgcgctggttagtnantntccattctataaaatcaaattgatgacacagcgacagacatgttcaaccatgata

SEQ ID NO: 2800 - DNA, 836 bp, Glycine max
  misc_feature (1)..(111): n is a, c, g, or t
  misc_feature (606)..(606): n is a, c, g, or t
  misc_feature (650)..(650): n is a, c, g, or t
  misc_feature (658)..(658): n is a, c, g, or t
  misc_feature (724)..(724): n is a, c, g, or t
  misc_feature (740)..(740): n is a, c, g, or t
  misc_feature (769)..(769): n is a, c, g, or t
  misc_feature (774)..(774): n is a, c, g, or t
  misc_feature (788)..(788): n is a, c, g, or t
  Probeset Number=SeqID_12579
nnnnnnnnnnnnnnnnnnnnnnnnnnnnnnnnnnnnnnnnnnnnnnnnnnnnnnnnnnnnnnnnnnnnnnnnnnnnnnnnnnnnnnnnnnnnnnnnnnnnnnnnnnnnnnntctagattgcctttcttaaatcaaggagaggatttgtccgcatagcaatggagaagggaaaacccctggttccagttttctgctttggtcagatctccgatacccttgaaacatccaatgcatgtggtagtgggtagaccaattgagctcgagaaaactcccgagccaactcctgaggaggcttgccagaatacatagccagtttgttgaagcacttcaagatctatttgaacgacacaaagctcgagctggatatccaaaccttgagttgagaattgtttgatatggtcgtaacttcgacccatagtttcatgggggtaattacacttatctcctctcaggtcaggctttatttgggagtcttgaagatggagtggagtgattggttcatgattaattggatttgaatggggcgaggtaaaccaatactgttgcttgactgctgaaggagctatgtctgacgcctcatatcttaccttgccgtttcactatggnactggatgacattgcattgggaaaactctctcattttttcctanttccggcngtaaatattgtttctctttatgatgttcccaacatctggcgcattcctttgcttttaagacatcanatggcttcccaaccantgcttaaagtgctggacctttctggtgtngcttntgagcccattttanaggagtggccttgccgagcctgacccttgggtttgctttctgcccccc

SEQ ID NO: 2801 - DNA, 745 bp, Glycine max
  Peptide Sequence Number=SeqID_6406
  Probeset Number=SeqID_12580
ggagtcatatcattatttattatttaattaatatatttaaaaaattcccgttaccattattttattaactacttcctcgttgtcaccctaaactgtgttgaggactgttccctcaaattcgaatccctcattcgcctctccaatgacaagatcgagactgccgccgtcgtgctcctccactcctttgcctacctcccccatgtcacccatcgctgcctccgcccttaccacctcctcatcctttgccttgggtcttctgactacgcctcgtccacgtcgacacctcgggcaccgaggagatcacggacactgtcatggcgctcttcttcggcctcctccgccgcacgaacctcctcaacccctcctccatctgtggcgacctcaccttcgtcctctcgccggacaacgacaccatcgacgaggccttggagtaagaaggttgggtcgctacagtatttgtggagtttcacgtgtttcgcgtggttgatggaggagaggatgagaatctcattgcagaaggatttggtggagaacgcggcamtamacggtgtggtgagggagagggtggttgcgtcgcgaaaaataggcttgtggagcggtggttgcggcggctcttggcgtcagcgaaggaggagggtgaggaagaaggagagagggagacgagggagaagggaaagaacttccttacgtgagaagggaaagacctgagtctatttatcacgtcttattacttaaatcatagaat

SEQ ID NO: 2802 - DNA, 1878 bp, Glycine max
  misc_feature (24)..(24): n is a, c, g, or t
  misc_feature (31)..(31): n is a, c, g, or t
  misc_feature (39)..(39): n is a, c, g, or t
  misc_feature (42)..(42): n is a, c, g, or t
  misc_feature (66)..(66): n is a, c, g, or t
  misc_feature (79)..(79): n is a, c, g, or t
  misc_feature (85)..(85): n is a, c, g, or t
  misc_feature (131)..(131): n is a, c, g, or t
  misc_feature (133)..(133): n is a, c, g, or t
  misc_feature (144)..(144): n is a, c, g, or t
  misc_feature (159)..(159): n is a, c, g, or t
  misc_feature (166)..(166): n is a, c, g, or t
  misc_feature (182)..(182): n is a, c, g, or t
  misc_feature (207)..(207): n is a, c, g, or t
  misc_feature (212)..(212): n is a, c, g, or t
  misc_feature (226)..(226): n is a, c, g, or t
  misc_feature (293)..(293): n is a, c, g, or t
  misc_feature (331)..(331): n is a, c, g, or t
  misc_feature (342)..(342): n is a, c, g, or t
  misc_feature (355)..(355): n is a, c, g, or t
  misc_feature (377)..(377): n is a, c, g, or t
  misc_feature (379)..(379): n is a, c, g, or t
  misc_feature (383)..(383): n is a, c, g, or t
  misc_feature (390)..(390): n is a, c, g, or t
  misc_feature (448)..(448): n is a, c, g, or t
  misc_feature (470)..(470): n is a, c, g, or t
  misc_feature (529)..(529): n is a, c, g, or t
  misc_feature (552)..(552): n is a, c, g, or t
  misc_feature (583)..(583): n is a, c, g, or t
  misc_feature (585)..(585): n is a, c, g, or t
  misc_feature (596)..(596): n is a, c, g, or t
  misc_feature (609)..(609): n is a, c, g, or t
  misc_feature (616)..(616): n is a, c, g, or t
  misc_feature (671)..(671): n is a, c, g, or t
  misc_feature (734)..(734): n is a, c, g, or t
  misc_feature (736)..(736): n is a, c, g, or t
  misc_feature (780)..(780): n is a, c, g, or t
  misc_feature (862)..(862): n is a, c, g, or t
  misc_feature (866)..(866): n is a, c, g, or t
  misc_feature (947)..(947): n is a, c, g, or t
  misc_feature (1051)..(1051): n is a, c, g, or t
  misc_feature (1114)..(1114): n is a, c, g, or t
  misc_feature (1240)..(1240): n is a, c, g, or t
  misc_feature (1471)..(1471): n is a, c, g, or t
  misc_feature (1529)..(1530): n is a, c, g, or t
  misc_feature (1588)..(1588): n is a, c, g, or t
  misc_feature (1648)..(1648): n is a, c, g, or t
  misc_feature (1667)..(1667): n is a, c, g, or t
  misc_feature (1702)..(1702): n is a, c, g, or t
  misc_feature (1719)..(1719): n is a, c, g, or t
  misc_feature (1745)..(1745): n is a, c, g, or t
  misc_feature (1752)..(1752): n is a, c, g, or t
  misc_feature (1766)..(1766): n is a, c, g, or t
  misc_feature (1780)..(1781): n is a, c, g, or t
  misc_feature (1790)..(1790): n is a, c, g, or t
  misc_feature (1811)..(1811): n is a, c, g, or t
  misc_feature (1821)..(1821): n is a, c, g, or t
  misc_feature (1830)..(1830): n is a, c, g, or t
  misc_feature (1834)..(1834): n is a, c, g, or t
  misc_feature (1836)..(1836): n is a, c, g, or t
  misc_feature (1838)..(1838): n is a, c, g, or t
  misc_feature (1860)..(1866): n is a, c, g, or t
  misc_feature (1868)..(1868): n is a, c, g, or t
  Peptide Sequence Number=SeqID_6407
  Probeset Number=SeqID_12581
tgtcaagcgccgtcgcttatcatntctcgcntagcactnatnctactcgacgacaccaggagatgncgatcagcagcancatctnaagtcaatcatgtgactacagtgcacggctgcatcagttgtcacantngcgtacccacnacatcagtgcaatcncatcctnctgcagtcgtaccgtngcggcagcgcatcgtcgcacgcatnacagnagctgatgctctcngcgcgaccgagtgacatagtcagcagccgacatgcacgtcacgcgcgcgtcgccactgcatcagcgnccgataagaatgccacatagtctcgatctcgtcgagcnatctcgtctcngcgtcagtactcntctgcggcatgtagacgcagtnangatnttaaatnagctgctacactcccatgtgagcgcgtggaggtgtcactgtctatagatacccatgcngacatcacacacacaactacanactctggtcagaacgacacagattctcacgtcatctagtcgctgcgcgcagtggtgtanatcgatgtggtgtagcagtctcncacacagtcaggcgctgcgtgttactcactntngtatgtcatcntccatctcacgtntatcggntagtacaggacagtattacgtagcagtactcatagatatcacacagtgacgcgangcgctgcagtgatgagcgtgagtgccactgacgacatagaacacacaacacattatcgacacngngccacactagataggtgtcgcgcacgtcgtcatgctggccgccntcttcgctacatagacgacatctcactgtcgtccgctagtactagccatcactcgacgtgcatcttcgcgcgtcggcacgtngcanctctctgccacagctcgccgcgtacatctgctcgcttcatgctcacatgtcatcacatgtcataccgcatcaactcaattnaactatcggtgtctatatcacagatacacgtccgtcgagaacttatctagttgatatgagtataacggttatagacttatagactcgattgctcagtgtactgngtaggacgtgtgttcggtgtgtgtctcgctactttcgcactctcacgcgcgtctgccccagcnccgcgacgcggcgttctctacatcgccatcgccatctaggacaaccaacacgcagcacaccgcgacgcgcacagcctactacacctcactatgtggcagggtcgaactgtatcaagcctcatcatnaccgtgcctatgtagatcgcgctgcgactatgacgcgtgcgcgagcagagtacatagcaagatgcaaacaaatcaaagcgagctacaaaaattcgagtctatctgctacaactccagcccacgcacacaccctctactcatcccgcgcacacgcgcgcggcacaccagtcgcatataacaataaccaatatgtggcagatcggtaggcggcggtcacacaagcaaatcgancacccatcacgcatctgccgcgcgcacagaagcagcacagcaggcagcttttagcccnntcctagttcaacccaaggcggcacgacagtgtcttagtaatgatatggaagtatatanagatacacatatacgaatacaacagaatatcgccgcgtctcatcgttttattgtatgggntgttcgacccacctgctcnacctctaccggactcggactggtgcgggggcggcnggggagagcaagggagngggagaggacgtctcgccacattatnaaagtanccactctacataantagtcgctctcgtnncatccacanccgcacactacgcgggtcggngcgtgtcgtnttagacggngagnangnacgaaccaccaccacacacaannnnnnncncccaaaacca

SEQ ID NO: 2803 - DNA, 1453 bp, Glycine max
  misc_feature (1)..(1): n is a, c, g, or t
  misc_feature (13)..(18): n is a, c, g, or t
  misc_feature (20)..(20): n is a, c, g, or t
  misc_feature (23)..(23): n is a, c, g, or t
  misc_feature (26)..(27): n is a, c, g, or t
  misc_feature (29)..(30): n is a, c, g, or t
  misc_feature (918)..(918): n is a, c, g, or t
  misc_feature (1032)..(1032): n is a, c, g, or t
  misc_feature (1067)..(1067): n is a, c, g, or t
  misc_feature (1090)..(1090): n is a, c, g, or t
  misc_feature (1424)..(1424): n is a, c, g, or t
  misc_feature (1453)..(1453): n is a, c, g, or t
  Probeset Number=SeqID_12582
nttttttcccctnnnnnngnaanaanntnnattcacatgataatctcatcaatagctatcaagcaccttctttacactcctctctcacagaggggagaaaagaaagagaaacctcacagctattcatgacaccattacaaatgattcatacactcaattattgcgtcactcaatatgataagggaattgtacctttcctctacgtacctcatacacatgtattcaactgtcgttgttggcttatatcttacaatttcctatattagagcgaattgtagtactgtttgtaaattatacgatcgtggtttatctcggtcatgcgtccttgtttacttctcgcttgtccactctcgtattactcgtgtgcggatgcatattcatactacttctgtttaagacatcgtcacttttttcattcttctttcagcttttgcatatctacgaaggcgagcatcacaactgagtctatcaaacataggaatgcacattaaatctcatatgatctccatccacccgacaactatctctacacctctacatcctatttatttcccgatgtggacaacaattgcaacccaatacctaagtaaacccacttgccaatacacatatttaacattcgtgatacacacaaataatataacacttctatactaactctcttctcattctaatatgtgtgagcgctcctctccatgacctaaacgatcatcgaacaccttatctgctcattaagcattgttctctcttacctttctctcctcttctctctccatacactcgctcctcattgctcgcctcacactctctgcgcacacacatgacaactcatctatattacatgtcatactataaactactattgtgatcgtctctatataatatcatgtagtgtcttcatctacttcaataactctntatcttcgtcgcttatccttcctgatctctctgaatcaatacgaagtgtcacgcgtcataatagatagcgcctctcatgaagattcatcggttcggctaaattgtatgattaantattcacatttctctagaaagactcacgatgcttnactccccatctccactcataatnatgacgatcatatcacaccaccacccctccctatctatccttcttctgtgatgtactctcacaaatattttgttgtcttatatgattctaaatttatagatacaaattcgtatagtatcactctttcgtatttatatattcctcatatatttattctcttcatatctattatataactcatcctcgatgctcatccaccacatctatctcccgcgctctctgccacctgcaacataagataatattagtaatgtgctggcgctgatgctaacacgcaaagactcgcatgtcttgatagctcctctgtctccgtgctcatcatcctacccactgnttgtatcatctctctaccttcgattgccn

SEQ ID NO: 2804 - DNA, 1651 bp, Glycine max
  misc_feature (33)..(33): n is a, c, g, or t
  misc_feature (147)..(147): n is a, c, g, or t
  misc_feature (161)..(161): n is a, c, g, or t
  misc_feature (171)..(171): n is a, c, g, or t
  misc_feature (174)..(174): n is a, c, g, or t
  misc_feature (247)..(247): n is a, c, g, or t
  misc_feature (260)..(260): n is a, c, g, or t
  misc_feature (294)..(294): n is a, c, g, or t
  misc_feature (342)..(342): n is a, c, g, or t
  misc_feature (455)..(455): n is a, c, g, or t
  misc_feature (589)..(589): n is a, c, g, or t
  misc_feature (620)..(620): n is a, c, g, or t
  misc_feature (966)..(966): n is a, c, g, or t
  misc_feature (1385)..(1385): n is a, c, g, or t
  misc_feature (1628)..(1628): n is a, c, g, or t
  misc_feature (1631)..(1631): n is a, c, g, or t
  Peptide Sequence Number=SeqID_6408
  Probeset Number=SeqID_12583
agcaagatgagatagtctgtgatcagtatgatnagtactgcatgaaaagtgatgtagtagtagagaacgcgctgattatacgggagattgacgtcgcgatgcatagtgggtgcagagttgtatccgctactagatcacagtagagangtcggcgtaatgancgctgagaangangcggaatgagtcgcgagcgacgacagggagttacgatagccaagtagtgatcgatgaggcatgtagatgaagnatggtgtgagtanagaggcgatggtcatgatgtgtgcgcgcagacantgaagatatagacgtcggtacgaatgaatagcagtgcagagtcagtanacatcaccagattgtagagagtgtgatgtggtagtatgtgagtagtgagtgtgtgagcgtaggcgatatgacattctagcgagatagaacgtgatggtggatgtcgtgcgatntctcgatgtgagtgctactgcgtgtaacgtcgatcgcgtgcggcgtagtgctgtatcgcgtgcgctctgattcagtagacatcgaagcatgtatgatgtcgaacgatatagttgatgtgtagcgagatagcagntgatcgtcgttgagtgtgacgatgagtgtgnctctcgctgtggtgctgcagtatggattgagcgtgcgtactttagatagatgtagatggtagaggggtggagagtgagtcatggtagagagtgtggttgaagaattatgagaggggtacgacgcatatggagtgggattcgagtgaatcgaggtgcacgatgagtattagatgggtgtgaacgtgatgggtcttaatgcagcacatagggtatgatgtgtgaattgtgttcatatgaggtaggcggtgtaataggcgaggtggatgagtgtatgtgtcgaggacgatagaggaacatgtgcgctactagcggtgcgtgaataatcagcagagcagtgaggagaganacgaggatgtgagaggtgttgccgcgatgcgtgggtgttccgaatgtgggtagcgtgcgcctgacatggagaagaagggataggaagatcacagcgacgacagagaaatatgtgctggagaagatgtaggtgagtaagaagaggactaggtagaagcataaggactgtgcctacgtggaggtaggatacgtgaagaacgtagattcactatagtgcgcgcatctagatggtgatctctatcacgcttataatgagagagagagtagtcgccggtggcgatggtgaagatgtacacggaagggaatactagcgtgctagcgcggagagtgggtacgaggtgatatgtatgctgatgagaagacgagaagtgtggagaagaggcggagtagtgcaggtataaggtcgatgtgttgcgctgnagatgaggtgattgggtcgctcactatggagagtattgtgctacgcagtcgtgtgatatgataagtggggcataagtttacataacgcactacaaaccgcgacaaacagatataagacagtcttggtagcggatagcgcgtggcgacgcttgcgatgcgggcgaggccgactgtgacgcacatatgtcgatgaggtacagagttgatagttcgtgtagtcaggtgtgagtgagggtggggtanttntagctgggggagggcgcaca

SEQ ID NO: 2805 - DNA, 774 bp, Glycine max
  Probeset Number=SeqID_12584
cttgatatattttctttcttcgtggctttgcgttttgcttggtcgtcgaggcgagggtcagccaggcactgatagttatgagttcccctgcggctgttacagtcatctgggactttcagtatgcttggatccctgagggctacgatcttcgttcccttaagaccagcattaaatctgccctcaaacgatgcaatcctgatttcttcatagaggggaaattgattgcagttggacatgccattggagatagacatcaagccatcactatgctccctgatgacttcgaactctcacctgtccaaccagataacgctcgtactccagacccagaagatcaaactgctttggagttggtcctgaagctctctatgaaagtattacacaacagggctaacattttggtcatttctggaaaccatgatgtgatgggtgcgattaacagatggacacaaaggggtatatttattatgttagccctacctgaaagctcggacccaagcttctaccactgtgccaacgtgacttggcttttgtcttccgaagatcctgagagagttgctgctaccatggttaatggaggtggaccgatccctcctgtaccccgtattagaggatgagcgtaataaaatagtggtagatataacaagaactcctagtaatatcatctgttttagtttcagactctcttatgcttgcgctgttttagtttcagactctctttagctgctttttgtgttggaatatgacttttgagtaatattgtagtattaagct

SEQ ID NO: 2806 - DNA, 1655 bp, Glycine max
  misc_feature (95)..(95): n is a, c, g, or t
  misc_feature (117)..(117): n is a, c, g, or t
  misc_feature (121)..(121): n is a, c, g, or t
  misc_feature (231)..(232): n is a, c, g, or t
  misc_feature (309)..(309): n is a, c, g, or t
  misc_feature (313)..(313): n is a, c, g, or t
  misc_feature (315)..(315): n is a, c, g, or t
  misc_feature (317)..(317): n is a, c, g, or t
  misc_feature (347)..(347): n is a, c, g, or t
  misc_feature (426)..(426): n is a, c, g, or t
  misc_feature (442)..(442): n is a, c, g, or t
  misc_feature (444)..(444): n is a, c, g, or t
  misc_feature (450)..(450): n is a, c, g, or t
  misc_feature (461)..(461): n is a, c, g, or t
  misc_feature (648)..(648): n is a, c, g, or t
  misc_feature (650)..(650): n is a, c, g, or t
  misc_feature (719)..(719): n is a, c, g, or t
  misc_feature (758)..(758): n is a, c, g, or t
  misc_feature (762)..(762): n is a, c, g, or t
  misc_feature (833)..(833): n is a, c, g, or t
  misc_feature (998)..(998): n is a, c, g, or t
  misc_feature (1107)..(1107): n is a, c, g, or t
  misc_feature (1125)..(1125): n is a, c, g, or t
  misc_feature (1187)..(1187): n is a, c, g, or t
  misc_feature (1368)..(1368): n is a, c, g, or t
  misc_feature (1477)..(1477): n is a, c, g, or t
  misc_feature (1480)..(1480): n is a, c, g, or t
  misc_feature (1492)..(1492): n is a, c, g, or t
  misc_feature (1495)..(1496): n is a, c, g, or t
  misc_feature (1584)..(1584): n is a, c, g, or t
  misc_feature (1589)..(1589): n is a, c, g, or t
  misc_feature (1603)..(1603): n is a, c, g, or t
  misc_feature (1612)..(1615): n is a, c, g, or t
  misc_feature (1620)..(1620): n is a, c, g, or t
  misc_feature (1626)..(1627): n is a, c, g, or t
  misc_feature (1631)..(1631): n is a, c, g, or t
  Peptide Sequence Number=SeqID_6409
  Probeset Number=SeqID_12585
ccttgatcactacagcatcgtgctgagacatagtccgtgacactgcaaacgaaacgctggtgcgcaaatgctacatgtctcatatcgacactacnaatcacgcactgattcatagtnttcngcggcgtagctatgtatgtactcagctgtagctactcgtaactcttacgtcgatacacgtgacactcaacacatattataaatcatacagctatgtgatcattagtcatnnatcggatcacgagtcatgtagtgtctcagattctcgagatctcaccaatactattcgtactgtaggtcgtgtggtantcancntnatcggtgtgcgtgtaatgagcagtctctcntacatcgtgtgtgcctgcaccaaacgcgtcgccgctcacatcttgtcagctattaatgcgtgcgcacgatacctatacntgcgcactctagtcancnattatnacggtacaccncagcatactgtctcgccgctgaggtactcctgtctagcgcgctctgtcgctccgcatcaacgtgcgtcattttcgtcgcagtctgtgccgcgcgccgcgtatctatgtgcgactatctcacatgcagtacaccgttctgcgtctcctgatgggcgtgtgtgggcatgcacaccacgcgctaccgatncnccagcatgatcgtaacatagagagacgatagggcgagtactcctaggtagatacaattattcgtcggtnagccaagagactataccaacgccgccgcatgcatcatgngtanagtgagcacgacgcgatgtgatgtcgaggtatcgagacgcgtgatatgatccagacatacatcatatacantatacagcagcccgccgatgctgccgacagcccacaggacgttcgtgcgcttcatcgcacatgccaccacatgcgtactcgtacgcgacgccgctttagcatgcgatacatcgtcaaccgaggatcgcgatgcgcagagagaagacagatataccatcatgaagnccactcgtgaatatctatgaatagtgacttgcaaaattcagttacatacaccattccatgcctcatcacatcaccgattatatcgtgagacgcacactcggtcacgagntctgtgtgtgtgcgtcgncatcattgttgcgcgtcatcgtctgtctagacagacactgataggtaaatgacagatgcacnaaatcgtcgcgactgacgttgatcgtgagaggtgatgatgctcctatccctattctcagcaacacagtatatacgcgctcgtcgagggtggttatgagtgcgtataatttgtagatagataataacatcgcgacagagagaggttcatgttagattatcgttgcgtggtagatgatagagngacgctgtatactacgtcgacggcaggtagctaaagactcatcacacaatatatacatagatacgcgacatgcgcgcgtcgtggtccgcgctcgcccgccctccgcgcngcncctctcactctncgnncgttaaaatcagcgcaaccttccatcgctcattgaatgcgtgggtggcgtgctgtcatcaggctactccaccacttacgcagtcgctncacanccgggtgccagtancagtgactnnnntaganagaggnnagangccgtggggggggcagcaacacaa

SEQ ID NO: 2807 - DNA, 295 bp, Glycine max
  Probeset Number=SeqID_12586
ggcggctgcttctgccactccacccttcttgtcccatacttctcgtggaagatctgcgacggcaagcaccacagggcgaccgtactcatggagcgcgacatggtctttgatccaatgacacactaggtatacgctacccgcgttggcaaggagggacacgagatctccgagctggctgaagagacccgcatgtacaccctgatccactccatcgtacagcagctcggaggatggcccatgtacctcgtagggaacgtgaccggccacaacaaccacgaccgccagatcgacggta

SEQ ID NO: 2808 - DNA, 2146 bp, Glycine max
  misc_feature (1)..(2): n is a, c, g, or t
  misc_feature (6)..(6): n is a, c, g, or t
  misc_feature (12)..(12): n is a, c, g, or t
  misc_feature (46)..(46): n is a, c, g, or t
  misc_feature (63)..(63): n is a, c, g, or t
  misc_feature (66)..(66): n is a, c, g, or t
  misc_feature (72)..(72): n is a, c, g, or t
  misc_feature (84)..(84): n is a, c, g, or t
  misc_feature (88)..(88): n is a, c, g, or t
  misc_feature (91)..(92): n is a, c, g, or t
  misc_feature (98)..(99): n is a, c, g, or t
  misc_feature (103)..(103): n is a, c, g, or t
  misc_feature (106)..(106): n is a, c, g, or t
  misc_feature (150)..(151): n is a, c, g, or t
  misc_feature (154)..(155): n is a, c, g, or t
  misc_feature (171)..(171): n is a, c, g, or t
  misc_feature (174)..(174): n is a, c, g, or t
  misc_feature (182)..(182): n is a, c, g, or t
  misc_feature (187)..(188): n is a, c, g, or t
  misc_feature (199)..(199): n is a, c, g, or t
  misc_feature (213)..(213): n is a, c, g, or t
  misc_feature (247)..(247): n is a, c, g, or t
  misc_feature (261)..(261): n is a, c, g, or t
  misc_feature (270)..(270): n is a, c, g, or t
  misc_feature (296)..(296): n is a, c, g, or t
  misc_feature (303)..(303): n is a, c, g, or t
  misc_feature (336)..(336): n is a, c, g, or t
  misc_feature (364)..(364): n is a, c, g, or t
  misc_feature (382)..(382): n is a, c, g, or t
  misc_feature (400)..(400): n is a, c, g, or t
  misc_feature (411)..(411): n is a, c, g, or t
  misc_feature (436)..(436): n is a, c, g, or t
  misc_feature (446)..(446): n is a, c, g, or t
  misc_feature (494)..(495): n is a, c, g, or t
  misc_feature (497)..(497): n is a, c, g, or t
  misc_feature (558)..(558): n is a, c, g, or t
  misc_feature (628)..(628): n is a, c, g, or t
  misc_feature (667)..(667): n is a, c, g, or t
  misc_feature (680)..(680): n is a, c, g, or t
  misc_feature (793)..(793): n is a, c, g, or t
  misc_feature (865)..(865): n is a, c, g, or t
  misc_feature (892)..(892): n is a, c, g, or t
  misc_feature (897)..(897): n is a, c, g, or t
  misc_feature (904)..(904): n is a, c, g, or t
  misc_feature (957)..(957): n is a, c, g, or t
  misc_feature (969)..(969): n is a, c, g, or t
  misc_feature (1082)..(1082): n is a, c, g, or t
  misc_feature (1167)..(1167): n is a, c, g, or t
  misc_feature (1325)..(1325): n is a, c, g, or t
  misc_feature (1384)..(1384): n is a, c, g, or t
  misc_feature (1416)..(1416): n is a, c, g, or t
  misc_feature (1514)..(1514): n is a, c, g, or t
  misc_feature (1584)..(1584): n is a, c, g, or t
  misc_feature (1644)..(1644): n is a, c, g, or t
  misc_feature (1667)..(1667): n is a, c, g, or t
  misc_feature (1676)..(1676): n is a, c, g, or t
  misc_feature (1771)..(1771): n is a, c, g, or t
  misc_feature (1817)..(1817): n is a, c, g, or t
  misc_feature (1819)..(1819): n is a, c, g, or t
  misc_feature (1903)..(1904): n is a, c, g, or t
  misc_feature (1921)..(1921): n is a, c, g, or t
  misc_feature (1940)..(1940): n is a, c, g, or t
  misc_feature (1970)..(1970): n is a, c, g, or t
  misc_feature (1993)..(1993): n is a, c, g, or t
  misc_feature (1998)..(1998): n is a, c, g, or t
  misc_feature (2016)..(2016): n is a, c, g, or t
  misc_feature (2041)..(2046): n is a, c, g, or t
  misc_feature (2061)..(2061): n is a, c, g, or t
  misc_feature (2063)..(2063): n is a, c, g, or t
  misc_feature (2067)..(2067): n is a, c, g, or t
  misc_feature (2072)..(2072): n is a, c, g, or t
  misc_feature (2077)..(2077): n is a, c, g, or t
  misc_feature (2089)..(2089): n is a, c, g, or t
  misc_feature (2112)..(2112): n is a, c, g, or t
  misc_feature (2114)..(2115): n is a, c, g, or t
  misc_feature (2117)..(2117): n is a, c, g, or t
  misc_feature (2127)..(2127): n is a, c, g, or t
  misc_feature (2129)..(2129): n is a, c, g, or t
  misc_feature (2133)..(2138): n is a, c, g, or t
  Peptide Sequence Number=SeqID_6410
  Probeset Number=SeqID_12587
nntctnccgcangccatcctccgtcctcggttctgcgccgccttcntgtgctccggtacggtnctngcgctnatagctgttatngcanctnnatgatnnattnatncgacgatctcattgctgcatcagctgctgtattcctcctatgtnngtnnctatgcatgttggatncgngcacgggntagcnntgatgatcatnatttgcctgacagnaccagctgtacgtcgtgatctgctattagatgangctcttcatgcagncatgctcgntgtctcagcgcgacgttcatcgcagncatacgnctatcatgtctccagtctgcgtccttttcgagnctatgatgttcgatgactactgtaaacntcacttgactcagtactntccttcgtcgtgatgatntgctgtctagntctggtcggtgatacgatcacagcntgagtgctgncgacgtccgcaggagagtctcgtagcacgtcatattgcgctcctgacnnanaccgctgggtgctgcgacaaagtgcataataggtctgtgatgcgtgtcatatcctctgtcngctaatcacatctagtatatatcatcaccacgagagtagtatgtagtcatatagtgtaatgtcattcatngacgatatgtcatattatcatatcactatacgtcaccangtctgcgcagganttgtgctatgtctacgttcgatcgtcgtctgcttgctcgtatctaatatcacgcttgcgtgtctccgctgtgtgatcgtgctcaatgtcgtgtgatatatgctgtagggacgntgaggatacggtgcagcgctggcgagtcggtgcgctcgctgtgcgtctcatgagacgctgtgtgtcatgttngtcgtgacaggcagactacatcgcgcnctctncactatnacgactacatctgcacgtacggccgtgttagatttcgtgtacgtgtcctactnttcagttcggancctcgttctcagaccggccgtctgttacgtgtacgagtgacgtgtcgcggttgtgcggctcaataccactcgccgatgcgctctcgtacgcagatctaacacgcggttacttntatctatctctacgtcatagtacacacgacgccgccgacgcgagcagtcatcgctacgcagatactgaggtacgagaggtacatngtgcgtgtgctggtggccgtcacatggtgtcaccatgtgctgcgcgagagatactaggacgttgcctgtcgacacggcgccaagcgcgtgtgtactatatctgcgcgctgacgcgaccattgcgacgccgctgcgagtctgtccgtgtgcgcgactgnacctgtacctatgttgattgtatggagtgtatgatgcaagatggattaggtgagtgcgntgtggggcgtgatatgatagtcgagatcatgnggtagcatatagtatggcgtgtgtgactctcgtactatgcaagatttcgtagatgcctatgtgataggtgtgtcgtgttcttctcttgtcattctgcncttgccgctcctgcctgtattactgcacagcgagaccagctcctatcccatcatctctcacactaacganacatcagtcgtacactcgacccgacgcgcacacactccagcgccacgacccacccacacnccgcgtctcgctcttgcgtctantcttacacngtatacactactacagtgatgttttatagacactgtgggtcgtcgtcgacgctgtcggatctatctcgcgcgcatatagagagagaggcggacgnagagagagaccgacgtattgagagaaagaagagacacgagacagangntgcgcagacacctactccagtggctgctctgtgtacacgagtaggtatatagagacatatagacagacatatcactatcaatgnnaacacgaccgcatccancccccacactaagcccgcnacaggctcgatcaccgcacacctccccgtngtcctccgacgcagcgcctttanacaanctccactcgctctcgcgngcgcgggcggcccggaggagcgagnnnnnntatttaatttaatananttantgtgnattantgctggatcatntacacacacctataatcaccccncnnanccccccaccncncccnnnnnngtgtgggg

SEQ ID NO: 2809 - DNA, 1509 bp, Glycine max
  misc_feature (21)..(22): n is a, c, g, or t
  misc_feature (26)..(28): n is a, c, g, or t
  misc_feature (30)..(30): n is a, c, g, or t
  misc_feature (32)..(41): n is a, c, g, or t
  misc_feature (46)..(46): n is a, c, g, or t
  misc_feature (48)..(48): n is a, c, g, or t
  misc_feature (50)..(50): n is a, c, g, or t
  misc_feature (54)..(84): n is a, c, g, or t
  misc_feature (86)..(86): n is a, c, g, or t
  misc_feature (88)..(88): n is a, c, g, or t
  misc_feature (90)..(90): n is a, c, g, or t
  misc_feature (92)..(92): n is a, c, g, or t
  misc_feature (131)..(131): n is a, c, g, or t
  misc_feature (171)..(172): n is a, c, g, or t
  misc_feature (174)..(174): n is a, c, g, or t
  misc_feature (212)..(212): n is a, c, g, or t
  misc_feature (215)..(215): n is a, c, g, or t
  misc_feature (219)..(219): n is a, c, g, or t
  misc_feature (221)..(224): n is a, c, g, or t
  misc_feature (376)..(376): n is a, c, g, or t
  misc_feature (499)..(499): n is a, c, g, or t
  misc_feature (722)..(722): n is a, c, g, or t
  misc_feature (729)..(729): n is a, c, g, or t
  misc_feature (741)..(741): n is a, c, g, or t
  misc_feature (777)..(777): n is a, c, g, or t
  misc_feature (813)..(813): n is a, c, g, or t
  misc_feature (919)..(919): n is a, c, g, or t
  misc_feature (928)..(928): n is a, c, g, or t
  misc_feature (1054)..(1054): n is a, c, g, or t
  misc_feature (1084)..(1084): n is a, c, g, or t
  misc_feature (1163)..(1163): n is a, c, g, or t
  misc_feature (1194)..(1194): n is a, c, g, or t
  misc_feature (1259)..(1259): n is a, c, g, or t
  misc_feature (1281)..(1281): n is a, c, g, or t
  misc_feature (1330)..(1330): n is a, c, g, or t
  misc_feature (1356)..(1356): n is a, c, g, or t
  misc_feature (1380)..(1380): n is a, c, g, or t
  misc_feature (1453)..(1453): n is a, c, g, or t
  misc_feature (1464)..(1464): n is a, c, g, or t
  misc_feature (1502)..(1502): n is a, c, g, or t
  misc_feature (1509)..(1509): n is a, c, g, or t
  Peptide Sequence Number=SeqID_6411
  Probeset Number=SeqID_12588
ggggggcccgccccccccccnncccnnncncnnnnnnnnnnccccngngncagnnnnnnnnnnnnnnnnnnnnnnnnnnnnnnncncncncnccgaccgaagagattcattacgaggagagtgaccacccntctatgagagacgacatataatttaatcgcacgcctcaannanccccacacactggtagtagtactaaagatgagcacacnctncagncnnnnttgtggtgtgcgctgtgttatgcgatgtgactgtcgctggtctgtgtagcacgtagctcgtgtgtcgtcgcacttgatgcgatgtctcgtgtagatgtgtggtactgtagtatgtgatttgatagtcgttgtatagatgtgtgagtgatgtntgtgatgggtcgacagatgatatacctaattagtattctgaactccatctatgagattagtatgtctctatgtcttctgatttatgtatgtgtctctagtaatgaagagtagtgtgtacttcntatcgtagatgataatactatatgttagggtaatatgcttgtgtgtgcgctggtgtggcatgtatgaggtccatggtgtgcgtcgttgtgtggttgtgtgatggggattgtagtgaggtgtagatgactggtatatgttctacgagatctattactgattatgagtatataatcgcttgtggtgctgtgtgcttgtgttcgcgtacttctcttcgctgctcgngtggtcncgtcgtgtgtcntatgttctgtattgtcggtatactatatataatgcntgtcatcagcttcgttgtagagtagtataatatcgnatgtgatgtgcctcatacacattgataaagtcgtagctatatgtactgtggtagtgagttgtgtttgttatttgtgatgtgtgtgtcgtgcgcctcccgctccgcncaccgcacnggatgtgcgctgagagtaatatcacacgtagcagctagtgttgtgtgtgtgtgcctcttgccttgtccttctacttactctatatctctgacactcactcatcgcgtatagacagtgatgtatcgnactactgactgtctcgtgtacacgtcgcanacgcgctactcatgagagtagaatcacatgacgacgaggactgtactctcttcgtctccatatatatacgtagtggtgncatgtattcacgatttctcattgtggatacntcatacaatatgctgtgtagcgacgcgccgcgcgtcacgctcgagcggcatgcgaacgcggtgtnaatatgagtgtgtagatgtagnagtacgaacgcgtcgctctgcggttggtgtatatgtgcgtgtaactgcnactactagtgtgtatatatcatcgcntcgctgacgtctctcgcgaagcgnagtgctgagtgcgcagtgcagtgaggactggatgtacaacagctcgacctgcggcccgacgcaacgtgtgacntccatcggacncgctatctgtacgcaggtgacgtgacgtgtctgactanagtaacn

SEQ ID NO: 2810 - DNA, 1443 bp, Glycine max
  misc_feature (15)..(15): n is a, c, g, or t
  misc_feature (19)..(30): n is a, c, g, or t
  misc_feature (32)..(36): n is a, c, g, or t
  misc_feature (39)..(41): n is a, c, g, or t
  misc_feature (44)..(44): n is a, c, g, or t
  misc_feature (46)..(49): n is a, c, g, or t
  misc_feature (54)..(54): n is a, c, g, or t
  misc_feature (57)..(57): n is a, c, g, or t
  misc_feature (78)..(78): n is a, c, g, or t
  misc_feature (116)..(116): n is a, c, g, or t
  misc_feature (130)..(130): n is a, c, g, or t
  misc_feature (251)..(251): n is a, c, g, or t
  misc_feature (445)..(445): n is a, c, g, or t
  misc_feature (552)..(552): n is a, c, g, or t
  misc_feature (562)..(562): n is a, c, g, or t
  misc_feature (1170)..(1170): n is a, c, g, or t
  misc_feature (1177)..(1177): n is a, c, g, or t
  misc_feature (1184)..(1184): n is a, c, g, or t
  misc_feature (1318)..(1318): n is a, c, g, or t
  misc_feature (1346)..(1346): n is a, c, g, or t
  misc_feature (1366)..(1366): n is a, c, g, or t
  misc_feature (1386)..(1386): n is a, c, g, or t
  misc_feature (1419)..(1419): n is a, c, g, or t
  misc_feature (1434)..(1434): n is a, c, g, or t
  misc_feature (1443)..(1443): n is a, c, g, or t
  Probeset Number=SeqID_12589
gtgtccccccccccncccnnnnnnnnnnnncnnnnnctnnntcntnnnnccgcnccnccccccgcgcgcccccccacnacgaccgctcgcgcacgtcgaccgcagcggcgctgggngcggaccgccatgntagagaagataagatgaagatgccgcgccgggagacctgcgaagagaaatatgctatatattcttatgctatttatcatctctacacgcctgcgcctttactatttattagtagcactctntgagagcgataagctccatctcttgtatcgcgactccctctcctccctcgaacatctatcgccatgtctattcctcctcgacgctagtagagagcctgccatatgcatattttttattacgacatacttcacactcctatctctccactcgccctctatatcccttcttcacccctatctgcctctactttccntcttgcctgtcatttctctgttgttgctatcattcactcgcattcacaagtaagtgcacaccttcgtcttccctaccgcgcgcgtgtgtgttctcacacgaccacgngtgtcttgtntatatgtttctgtaatcagtgtctgtccattagcgttgcgagatactctacgattaatagaccaccctcccagtacagaagacccactgccgcttcccttacctcaaagcaggccgtgcgcagacgtagtcttcgtgttatgtgatgtgagatgtgtaaacgactctctaacgtatagatacctgaccatatataacgtttatgcgtggtgcagcctgtctggatcacgctacctataacgcattacacgaaaaagtagcacgccgaccacgaatcctacaattcttcaaatattcaacacacacatatccatcatccacatcgcacttgcagcctacacactatatttacacatttacctctcggatgcccacgtccggagtatctgtcacacttgtcttcgtagcgactagtactgctcgcggagcatcagtccacacataaacgtgacgagagctcatcaccactgtcacaaccatacaaaccaacatatcactacatcatcgaccacatatactcagcagcggcggcgacggctgtctctctctcactctctcagatattaactcgtcgacggcagtgagcgtcatgtcgatcaccgttatatnctgcgancggtatnatccctggctcgcagctctctctccgcactcatagtcgcacgctagctcgagatctatctacacacacggtctcattgtgatatacaccgggatagaataactatagacaactacacatcacgtagctacaccnacgccgacgcaacgcgcgtctatacctnacacgctctcgtgctacgcngcgcgcacacctactgcgtnaccgcgtatgtgatgacgagtactgacattgtnaatgtgactatacantgcgcgcgn

SEQ ID NO: 2811 - DNA, 1355 bp, Glycine max
  misc_feature (16)..(16): n is a, c, g, or t
  misc_feature (29)..(29): n is a, c, g, or t
  misc_feature (65)..(65): n is a, c, g, or t
  misc_feature (70)..(70): n is a, c, g, or t
  misc_feature (78)..(79): n is a, c, g, or t
  misc_feature (498)..(498): n is a, c, g, or t
  misc_feature (957)..(957): n is a, c, g, or t
  misc_feature (1001)..(1001): n is a, c, g, or t
  misc_feature (1124)..(1124): n is a, c, g, or t
  misc_feature (1295)..(1295): n is a, c, g, or t
  misc_feature (1355)..(1355): n is a, c, g, or t
  Peptide Sequence Number=SeqID_6412
  Probeset Number=SeqID_12590
gtggtatgtggccctnttttgtttttttntaattctatgagatttgtaagtagtatatttatccnattangttattcnnccctcccgggtagggatggtgtcgctcccccgccagcgcgcggggagggttatactatatataacacagagaagccaaccccgccgcggaggtgtgaatgtaatgtacgggagagcggatgtaccctcatagacagagtagattatgccgtgagacaacgaacgagcacccgcgtcacaccgcataacctcaggcagcgagacagtatgtgtttagccagcaagaatcactcctccaccactccgtgcccccgcctcggccgaaagagtgaagctagtcgcggccgcgcactcaccggaatgcgacaatcaggaactatcttgattagctctcgagacgactaggggacgtgacgccaccgcgcggtcgtctcagagctgggatcacaaaataaataatattcggtctactgcgacagntcaactcccacgctagtgcagaaagaccttagcatcacgtcccgaattactgtttcacagcacactctgtaggggtgacaagcgaacacacctcggggagagggcgcggcacgccctcccggcgctcaggccctccatctcacactctgagtaggcccgacgaggcgcccatactcgtggacatgctactcgagtctgggtgtcatctggacacctgaagcttactctgctcagcagataactagggataaactatcaacgccccacttgaggcgcctggcctcgctcgaacggaaaccacagagccacttccacgggccaacaacagcgtggcgtggctcctcctgggatctaatctaccagtcgatgtgccttcacgttcaactcgatacatctgtatctctcggcgtcactaatcgtatcaaacatcgtaactagcatctcatagcttgtactacncccagcagcgacagcacgctaccacgactttgctgttaaagacngatatcgctagcgcaggtgcccactcgcgccttcgtattgcacaacacacaggcgcggctcgcaaattagaaacggctcgatcacaatacaatagacgatagagacaagactccgaggcattntggagtcaatagtcatgcagcatatctcatcccaccacctagcacataaccgcacgagacgacactatcacactctcacagtacagagatcgtcagattacaaatcgcgcgccagtcgactatacgtttgctcgagatctgcacgacatcccgacacctacgctcatgccngttgtagcgcgcttcgtcagaccacgatgtacatacgctagacttactgcgagagagacn

SEQ ID NO: 2812 - DNA, 615 bp, Glycine max
  misc_feature (615)..(615): n is a, c, g, or t
  Probeset Number=SeqID_12591
tcagctacgtaggccccccccccagttcttacttttgaatttcttgtttttgtttaactcgtttaaataccccaatctttgaaaatgcatattaaattaggtttagtctcagctctagctgccgcatcaactgcctcagctttcagcttaaaccaaaatactggtatccaaggccaaggtatgacccaagccaatgagtacgcaatcagaaacattgacgaaatctgtgtctcaaccagaccagtccaaatgtgtgaacaagactacgttgtcaaatcattcaaaaacgaaaaagtcaacttccactgtgtctcaagaaactcactagaaggtcaaagactaaaacaacaagttgaaaatgaccaagttatcagcgaaatgcacggtaaacaaactcacattcaaggtcgtgtccaagtaccaaccagatgtgttgaaaaatcacaagttagtggtcaagaagcaagaagacgtcaacaacaacaacaacacggtcaacgtgtacaattgatcgaaaacgaccaagaagatttcgaacaagaaggtaactgggaccaagaagaagaccaactaaccaacgaagaacaatacagccaatacagaaaaaaccgtttn

SEQ ID NO: 2813 - DNA, 1485 bp, Glycine max
  misc_feature (8)..(8): n is a, c, g, or t
  misc_feature (85)..(85): n is a, c, g, or t
  misc_feature (99)..(99): n is a, c, g, or t
  misc_feature (116)..(116): n is a, c, g, or t
  misc_feature (137)..(137): n is a, c, g, or t
  misc_feature (216)..(216): n is a, c, g, or t
  misc_feature (236)..(236): n is a, c, g, or t
  misc_feature (489)..(489): n is a, c, g, or t
  misc_feature (1407)..(1407): n is a, c, g, or t
  misc_feature (1409)..(1409): n is a, c, g, or t
  misc_feature (1420)..(1420): n is a, c, g, or t
  misc_feature (1423)..(1423): n is a, c, g, or t
  misc_feature (1425)..(1427): n is a, c, g, or t
  misc_feature (1430)..(1433): n is a, c, g, or t
  misc_feature (1440)..(1440): n is a, c, g, or t
  misc_feature (1450)..(1485): n is a, c, g, or t
  Peptide Sequence Number=SeqID_6413
  Probeset Number=SeqID_12592
catcatgnattctctgatcatagattactcctctttaccgctgatgtgaccttatatgttctattggcgagcagtaatgactatngcatatgtgtatanaattgccagtcgtgcgnactgtgtctatcgttatcgtntttcacatctatttatactcttaagttatgtcgctcgtctaacctaccctcatactagaagtactcttctatcactcangcaagttatgtatctctaangtcccttcgttacaacagatatatcgtggtgtatatagagcgatacaccccccatactctaccgtccgaagtctacttcatattcgttcgtacctctcactatctttctatgtcaatcatactcatctctattgtatatatacttctatactatcgccattattctatcgatctcatcttcatcctgtagtcactctttctatatttcgttctgttttcatatattcattactcaattcttataatacattcntctcgcttctctatgcgtcagattatctttttcatacagtttccttctttcctctactctcttatcaccatgtctctcctttctccgttgccgcgttgtacgagcctgtcgcgatgggcactcctctccttcttacccctcttttctatatgcgctcccctgctctactttattcctagttatatatattctcgaatatattcttagtgcaatcagatcttccttcttttatttatactctttcatcctccttctcctaatctattaatattcttcatttctcctacgtccctattcgctctttgcatgttgatatccttaattgtccgtcctcgttctcgcttttgtgatttaaatttttctctcccacaatatgtagccctttcttgcatttattgcagacattttcttattctcggcatattcgtgggtcgtccttgcttagtcagagagattctaatgttttttccaggtgccttattttgtgccgcaattcgcactgttactccttgtaacatgtaacatctgtttcatgtcgatattctatcttttgtttttttatacctctatttccacgatcccatacttttttctgccaactaggtacatgatatatatgactctttctcctcgtctacctgttccgttcttcctttttctccccttatcgtgtgttttttttttttctatcccttcttttattctttttccttcttatatatcaccttctttttttacccatgccctttctttctttctgcgtggaaaaacaaatacaccacgttggtcaatattacaaaaatacatcatttttactagaattacctcatttctcagggaaaaaaataatttttatattattatctctcgttttgatatttcttatttcgttcttgtgtccgcccgcgattcctatangntttaaaaatgnaangnnnaannnnctttaanaaaaaaaaannnnnnnnnnnnnnnnnnnnnnnnnnnnnnnnnnnn

SEQ ID NO: 2814 - DNA, 1664 bp, Glycine max
  misc_feature (19)..(19): n is a, c, g, or t
  misc_feature (35)..(35): n is a, c, g, or t
  misc_feature (46)..(46): n is a, c, g, or t
  misc_feature (86)..(91): n is a, c, g, or t
  misc_feature (93)..(95): n is a, c, g, or t
  misc_feature (174)..(174): n is a, c, g, or t
  misc_feature (436)..(436): n is a, c, g, or t
  misc_feature (497)..(497): n is a, c, g, or t
  misc_feature (524)..(524): n is a, c, g, or t
  misc_feature (720)..(720): n is a, c, g, or t
  misc_feature (722)..(723): n is a, c, g, or t
  misc_feature (760)..(760): n is a, c, g, or t
  misc_feature (776)..(776): n is a, c, g, or t
  misc_feature (823)..(823): n is a, c, g, or t
  misc_feature (842)..(842): n is a, c, g, or t
  misc_feature (849)..(849): n is a, c, g, or t
  misc_feature (853)..(853): n is a, c, g, or t
  misc_feature (892)..(892): n is a, c, g, or t
  misc_feature (941)..(941): n is a, c, g, or t
  misc_feature (947)..(947): n is a, c, g, or t
  misc_feature (968)..(968): n is a, c, g, or t
  misc_feature (1054)..(1054): n is a, c, g, or t
  misc_feature (1058)..(1058): n is a, c, g, or t
  misc_feature (1080)..(1080): n is a, c, g, or t
  misc_feature (1083)..(1083): n is a, c, g, or t
  misc_feature (1124)..(1124): n is a, c, g, or t
  misc_feature (1172)..(1172): n is a, c, g, or t
  misc_feature (1187)..(1189): n is a, c, g, or t
  misc_feature (1193)..(1193): n is a, c, g, or t
  misc_feature (1202)..(1202): n is a, c, g, or t
  misc_feature (1219)..(1219): n is a, c, g, or t
  misc_feature (1288)..(1288): n is a, c, g, or t
  misc_feature (1395)..(1395): n is a, c, g, or t
  misc_feature (1411)..(1411): n is a, c, g, or t
  misc_feature (1440)..(1440): n is a, c, g, or t
  misc_feature (1442)..(1442): n is a, c, g, or t
  misc_feature (1461)..(1461): n is a, c, g, or t
  misc_feature (1471)..(1471): n is a, c, g, or t
  misc_feature (1492)..(1492): n is a, c, g, or t
  misc_feature (1501)..(1501): n is a, c, g, or t
  misc_feature (1503)..(1504): n is a, c, g, or t
  misc_feature (1506)..(1506): n is a, c, g, or t
  misc_feature (1508)..(1509): n is a, c, g, or t
  misc_feature (1516)..(1516): n is a, c, g, or t
  misc_feature (1530)..(1531): n is a, c, g, or t
  misc_feature (1534)..(1534): n is a, c, g, or t
  misc_feature (1595)..(1595): n is a, c, g, or t
  misc_feature (1664)..(1664): n is a, c, g, or t
  Probeset Number=SeqID_12593
ccgcggccgctccgcccanccaccacgcagtgcgngagcttaattnctatattgactaatagttagtggtgtgatggcccacaaannnnnntnnncccccccccggggcgccgaacgggggtgtctgtatggggtggtgcataatgctagctgggcaccgctcctcttgggatntgggtggagggtgagcagaggggggctacatgccttactgggttgtggcttgcctgtgcgcgctggcgcgtgaagtgtaaaggagtgtctacgttggaccttctgtgtgtgatgttgcacgcgctgccgcatgccgcgcggtcctggtatctggtttgttccttcttctcgtgtgtgtcgacctgggcggcagcgaagtctcaacaactgaggcgaggcacggacgggggcacggccgcgggagagagcccgcgcggcgccngcgggacatatatcatgtgctgagatgacagggctcgtgtggtgtggggcggcgccgcaanccctggcggcctgactccgtactatgngcacgagtcaccagaagacgaggtgtggccgccacgctctctgactcattatattatacattctctcggcgcgctgtctacctcatgatccatttgcagattagtgagcgcccttccaagaatccacctcgagaggactatctccccaaattctgaaatattattacattattgtataagagagagaagacacaanannaaggagatacggaagtagatgactgatgggtgtgcanaggagagtgtaggganaggatcataggatattattctaaatacctcaagtagagtagtgatanctcaccatcgacatcgtgncctatgntccngtgtagatatgtgatcgtttggagtggtatggccatgtncgcacaagtacggaagaggagcgtcggcgacatatgccaggataggtgngatganagtgtcatcgcacacatcacncactgctcgagacagggcgcactgatggcagaggtgtggctgtggtgatgggtcggcgcgtgcgtgatatgatgaacccaggaganaggngagtgctcgctgcccccctccngtntgacacccgatgtcattatgtctagagtcgtggcgcgtccngtgtctttgacgaaactctcactactagcgctgctgtcgcgactctcnctctgattttgatannnaaanaaaaataantgcaggagttggtgagngcatgattgaacgtgtgtgatggtggcgcgttgctctgtgctcccctagtgttaccgactcctcatgtnctctctactctctcctatggtcttgcgacgtgtgtctctatatggatgatattagatatatagatatacatgcacacacgttcgtcgtctccgctgtggagtgtgtncactgatgccgcgctnatcgctctgcgtatatcatggctgtatananagatgacgaatcgaagtgncgtgactgtnatgttgatgggtagtggtgangtacacccnannanannaataaangataaacatatatnnaanatgatgtgtatctgttgtgtgtgtgtttgtttgtgtagactactcgaggtgtcccgaccancaccacacacaccctgctgtgtagatggcgtcgtgtgcacatactcacaatagtgaggcgcgcgcccgn

SEQ ID NO: 2815 - DNA, 417 bp, Glycine max
  misc_feature (17)..(18): n is a, c, g, or t
  misc_feature (29)..(30): n is a, c, g, or t
  misc_feature (253)..(253): n is a, c, g, or t
  misc_feature (269)..(271): n is a, c, g, or t
  misc_feature (327)..(327): n is a, c, g, or t
  Peptide Sequence Number=SeqID_6414
  Probeset Number=SeqID_12594
ccgggctgccggacacnnggggggggggnnctcccacccaaagggttggcccccacgggggcggctgagacgaacgaagaaggtggtaggcattcaccctcctctgcagggcccacgcccttcctgggacgggttgtgttcttcaacttccaaagggagaacgtggcaaagcaagtgcctgagcagaacggcctcacacatcttgaggctggtgatacacgtgccaaggagtatgtcagcctcctcaactccnatgaccctggtggatnnncacatgttgatgtcttggcttggggctccattggccatgttgttgcttactacatnttggccaccactagcaatggctatgaccctgcattctttggctgatttaatttcatcatcatgttgttccaactgcgtttcttgcttact

SEQ ID NO: 2816 - DNA, 705 bp, Glycine max
  misc_feature (549)..(549): n is a, c, g, or t
  Peptide Sequence Number=SeqID_6415
  Probeset Number=SeqID_12595
tttctggagcaccaaaaaacatgtttttgttgggggggggggggggccccctccccccccccccctcctcgtgtgggggagagaaaagggtttttttcttttcttttttgggggagaaagggtgccccccccggtgggggtttttaagggtttttgggatatccgggttttttctctttttttgggggggcccccttgtgggggggattatcacggggttttgggtctttggggccccgcattgggagggaggggggcccggtggcccccccggggggggggttttaaggtattttgggtttaagcccccaaaaggggggctcgggggaaaaacggggctttggccgttttcggttaaaagatttttaattcccccgggggaaccttgggccccccctgggttggcccatcttttcccagggggggctgcccaggccgcctcgggaggggatgggggagatgatgaccttgagggtcgaggaaccccagcgacagcgccttcttggaaatagtttattggcatcggccgcgtggccgtgtgtggtgtanccgcaacccatgagttcaacgaccatggtcggctccggagaagaacggtgaaaggtgggtgcgcccttgtgcttttgcttgtggcgttgtgcgactttgagatttgaggtggaaatggatggacggaggccgaggggttttataaatcggaaaact

SEQ ID NO: 2817 - DNA, 1396 bp, Glycine max
  misc_feature (12)..(12): n is a, c, g, or t
  misc_feature (16)..(18): n is a, c, g, or t
  misc_feature (205)..(205): n is a, c, g, or t
  misc_feature (207)..(207): n is a, c, g, or t
  misc_feature (215)..(215): n is a, c, g, or t
  misc_feature (331)..(331): n is a, c, g, or t
  misc_feature (1045)..(1045): n is a, c, g, or t
  misc_feature (1328)..(1328): n is a, c, g, or t
  misc_feature (1344)..(1344): n is a, c, g, or t
  Probeset Number=SeqID_12596
gtttttttgttngttnnnttttttttttactacttcacatcaaaataaatatatatgtatagataatttattttattttaaacccccgccccccctccccccccccacaactaaccgtgtctcccaccgataaggggggcgtaaaccacataccataaataagatgtagacaccccacggggtcactgcagggagggcgaatagngnagaataantgacgcccacaaagccaatacctaccatcagaattatttagtattcttaatcacaaccagctggaataagtgagtacatacatgatatattataacaaatatataataattaaacnctatgacatgaacaaaaaaacgcccgcggctcgctctcaccacgaaacacacatgttcccatagccataccgttcttccgtcatttcctccaaccaccacacatctctcttgtatttcaatcaacctgcaccaattaagagaagtaggccacatccaccatgcgagtccgcaggtcgtcgcccgtcgatgtgcgcatcccactagtgcacgaaccagccttatcgtaatatactctctcattacatacatacatatatagtaaactataaataacacacgaaaacaaatattcttagcgacaccacacatactcatggtacgaaggagacgatcaagagatataaagctagtactatgattgaacagatgttgcagaccgtagctcagcactaacattattgtatatatcattataaattcttacaacaatcacacacataataaagatatattatcaacaagagatgacaatacaaatatcttccacacttgtgcttattcttcatattctagtgtacttttattgctcccgctgatccacctctatactctccgtacgccgatactagacaacactgcaaactatatctcgctccacccgcgttacctgctccagaccttatatattcgttactctgcgttgcagtgagatatatgatacctcctaacactcacctcatccactctgctactccgcttaatcttagcttgtnttgtaatctctctgccccgacacctccactaatatggtctatcatattagagcactaatcactcgtactcgctatagcaacatctagtgactattatcatactacatacaagcacaatctataccataaccatacaaccacaacgaacagatcatataaatcgcacaactccactcctacatcataccccaattgtaattcaagcatatatatcatatgagtctaaatgtaatcgagagcatatgtattcgtattcagtatctccctatatactaggcagctnttgtcttgcaatcatnactatatcatctctctcacacaactagatctaacactttattcgctatcctt

SEQ ID NO: 2818 - DNA, 760 bp, Glycine max
  misc_feature (330)..(330): n is a, c, g, or t
  misc_feature (383)..(383): n is a, c, g, or t
  misc_feature (402)..(402): n is a, c, g, or t
  misc_feature (406)..(406): n is a, c, g, or t
  misc_feature (447)..(447): n is a, c, g, or t
  misc_feature (449)..(449): n is a, c, g, or t
  misc_feature (476)..(476): n is a, c, g, or t
  misc_feature (488)..(488): n is a, c, g, or t
  misc_feature (491)..(491): n is a, c, g, or t
  misc_feature (519)..(520): n is a, c, g, or t
  misc_feature (539)..(539): n is a, c, g, or t
  misc_feature (553)..(553): n is a, c, g, or t
  misc_feature (564)..(564): n is a, c, g, or t
  misc_feature (569)..(569): n is a, c, g, or t
  misc_feature (578)..(578): n is a, c, g, or t
  misc_feature (580)..(582): n is a, c, g, or t
  misc_feature (587)..(587): n is a, c, g, or t
  misc_feature (589)..(589): n is a, c, g, or t
  misc_feature (597)..(597): n is a, c, g, or t
  misc_feature (610)..(610): n is a, c, g, or t
  misc_feature (617)..(617): n is a, c, g, or t
  misc_feature (626)..(626): n is a, c, g, or t
  misc_feature (631)..(631): n is a, c, g, or t
  misc_feature (635)..(635): n is a, c, g, or t
  misc_feature (638)..(638): n is a, c, g, or t
  misc_feature (652)..(652): n is a, c, g, or t
  misc_feature (655)..(655): n is a, c, g, or t
  misc_feature (657)..(657): n is a, c, g, or t
  misc_feature (664)..(664): n is a, c, g, or t
  misc_feature (675)..(675): n is a, c, g, or t
  misc_feature (678)..(678): n is a, c, g, or t
  misc_feature (681)..(682): n is a, c, g, or t
  misc_feature (693)..(693): n is a, c, g, or t
  misc_feature (700)..(700): n is a, c, g, or t
  misc_feature (710)..(710): n is a, c, g, or t
  misc_feature (715)..(716): n is a, c, g, or t
  misc_feature (720)..(720): n is a, c, g, or t
  misc_feature (722)..(722): n is a, c, g, or t
  misc_feature (728)..(729): n is a, c, g, or t
  misc_feature (746)..(760): n is a, c, g, or t
  Peptide Sequence Number=SeqID_6416
  Probeset Number=SeqID_12597
aactagaaagatgttcattgaggaagttatggagctagtagagcttaattcaataagagaagcgcttgttggattgccaggagagaatggactttcaaccgagcagcgcaagaggcttacaattgctgttgaactagtagccaacccatcaataatattcatggatgagccaacctctggccttgatgctagagcagctgcaattgtaatgagaaccgtgaggaataccgtgaacacgggacgaactgtggtttgcaccatccaccagccaagtattgatatatttgatgcctttgatgagctgttacttttgaagttgggaggggagcnaatatatgctggtccattaggccaccactgttccgatctgattcagtactttngaggctattcaaggagttnctangatcaaagaaggtttaatcctgctcctggatgttggaagtncnttcagcaggccagaagcatctttatgncaactttcacantgngtacagaactcaaactataccggagatnnatcaattgtcatagacctnatttcctcctgagntcaaggattcnctttntatcgattncnnntttgngnccttgaanttgctttggaacnccttttntctggaaanctttntcgnggntactctttcaagcnaananttttttngatttttgganttnctnnaagaaaaacantttctanttggtatgtncgttnntttntnaaatgnntggggcctttttttaannnnnnnnnnnnnnn

SEQ ID NO: 2819 - DNA, 1407 bp, Glycine max
  misc_feature (53)..(53): n is a, c, g, or t
  misc_feature (64)..(64): n is a, c, g, or t
  misc_feature (154)..(154): n is a, c, g, or t
  misc_feature (240)..(240): n is a, c, g, or t
  misc_feature (269)..(269): n is a, c, g, or t
  misc_feature (952)..(952): n is a, c, g, or t
  misc_feature (1058)..(1058): n is a, c, g, or t
  misc_feature (1060)..(1060): n is a, c, g, or t
  misc_feature (1122)..(1122): n is a, c, g, or t
  misc_feature (1150)..(1150): n is a, c, g, or t
  misc_feature (1277)..(1277): n is a, c, g, or t
  misc_feature (1335)..(1335): n is a, c, g, or t
  misc_feature (1407)..(1407): n is a, c, g, or t
  Peptide Sequence Number=SeqID_6417
  Probeset Number=SeqID_12598
tgttttgtggttgtgttggtggctttgtgttgtttacaggaccccgccccggncaggggagctncggacagcgcgcgccgccaatcggtggggggtgtgctgccacacacttattattaagacgcaccgaagaaggaggagagagggacggccntgcgatcaggaggcaggaatagcgtaagggcccaccccccccccctcgtgtatgttgtgtctggcgagtaaggcctggtttctttngtttctatcgcaccccactattgagtgtntgttgttgataaattggtcgagtgggggagggttgtagctgttgttgctttgtctgtactactaacaacaagtaaattctatggtgctggaagttgatgatttcgctaggatgagatgaggtggatgtgagacagacactagcggaagcaacagctattgctagtttagtttatttcagacgatgtagagttggatattaggaatgagctcctggtgtggtggttcgttatgtgtctaactctatataacacaatatagtcatttctaacaacatactaagcaaattagatagagatgtaatgaaagaggttggagtagatgaagagtgggattggagttaatagtgcaggcacccgacataacccaagaaatgaatgcaaggccgcgctgtttcaggatagcgcagagggagatcaaatgagactagcggtatgccacagtgagaatagtagccggaaatctccatatgtgacctatcagctctcgagcctgatatagagaatatctatatcgtgctctgcgtactcctatgtacgatgtgtgggatgctctctctatgtgtgggatgccgcgagtgtgtagagtagggtgcggtgcgacctgtggaggagcttgctgagcaaaacgagcgatgagagaagagtatacacaacggctgcgataatcagggagagtacttgtnataccttcatggtgtcagtacatgcatcgataatatatatattgagtagatacacgctgcggcagtagtatcgagcgagcgtatccgctgcgagagattcgtgtgncntgcgcgctcgactctatgtacattcttcattatcgtgaagctgcgcacgtatgactgtgtangctagatcttgagtttatgtttatatcntgtgcacactgacaatgtcagagtagtgtgggtcgcgctgttgtaaggacgactatttctatgtactatagtatgtcacgactgtatagagtatcatgaccaatatctcctttatacactacattangtactcgtacatatataatctcgacgctcccacatactgtgcatttgttgtcatgaanacgctgagcgcatctttcacatttcagatctgagtgcgagagagaatagtgtataacagacactcacagcan

SEQ ID NO: 2820 - DNA, 1479 bp, Glycine max
  misc_feature (42)..(42): n is a, c, g, or t
  misc_feature (60)..(60): n is a, c, g, or t
  misc_feature (63)..(63): n is a, c, g, or t
  misc_feature (67)..(67): n is a, c, g, or t
  misc_feature (73)..(73): n is a, c, g, or t
  misc_feature (77)..(77): n is a, c, g, or t
  misc_feature (145)..(145): n is a, c, g, or t
  misc_feature (187)..(187): n is a, c, g, or t
  misc_feature (189)..(189): n is a, c, g, or t
  misc_feature (266)..(266): n is a, c, g, or t
  misc_feature (447)..(447): n is a, c, g, or t
  misc_feature (590)..(590): n is a, c, g, or t
  misc_feature (681)..(681): n is a, c, g, or t
  misc_feature (860)..(860): n is a, c, g, or t
  misc_feature (1091)..(1091): n is a, c, g, or t
  misc_feature (1141)..(1141): n is a, c, g, or t
  misc_feature (1192)..(1192): n is a, c, g, or t
  misc_feature (1240)..(1240): n is a, c, g, or t
  misc_feature (1252)..(1252): n is a, c, g, or t
  misc_feature (1287)..(1287): n is a, c, g, or t
  misc_feature (1294)..(1294): n is a, c, g, or t
  misc_feature (1329)..(1329): n is a, c, g, or t
  misc_feature (1382)..(1382): n is a, c, g, or t
  misc_feature (1384)..(1385): n is a, c, g, or t
  misc_feature (1390)..(1390): n is a, c, g, or t
  misc_feature (1426)..(1426): n is a, c, g, or t
  misc_feature (1430)..(1430): n is a, c, g, or t
  misc_feature (1443)..(1444): n is a, c, g, or t
  misc_feature (1446)..(1446): n is a, c, g, or t
  misc_feature (1450)..(1450): n is a, c, g, or t
  misc_feature (1455)..(1460): n is a, c, g, or t
  Probeset Number=SeqID_12599
cgtgtgcgtgtgcgggtgcgtgcgctgcgtatagggctcgantctgaagtgagagagctnccnatcngtagancggncgggagctgtgccagatgtcactagtagtagacagcatacacacagatgagagagagggatgagaganatgagacacaggagagcgcgagcgagatgagagcatgcgtgngnaggatgacgagtatagagacaattatcatgactgtagcttctgtgtcgtgcgacagtatagcgcgcgcgcgtcctanacaatgtgagtggaggaagtgtgcaggctcggtgatacggcgcgagtgcgacgtgtgggtcgagcggcgacgacccacgtagagggtctacgtcccgctcatggacagatacgagtcgagggggggcgtgggcgccatccacacgcgacgccctgtgcgggcgggtggcgcgtgctgttcntcctcagcgatattcatacctagtgtcgtataacgacagaggtaatatgattgcatgacggggtagggggagagaagataccacagtatgatgagtacgggtagcgcgcgagtgtagtttgtactgccacgtctcagcttcgnagagcagtggggcggacagaatatcgtgcgagtgatgtgacactctagatactcgattctctggtggagcgagccgatacagaacactatntacgggcagcaccggaatggcttatgcactacactcgaggtgtgcgtagtcagacgaggagccacgcgtgagtcgtgtactgggacagtcccgagctccacgcgctgacagagaagtgacgagcggcacgcctccccacccgcgggcccgtccgcgcttcgggagcggccgcgcgcacnggggctcacaccgctgccaaggcggtgtgcggaggcgggaccgggacggccgacgcggcacgtactacctcccttcgtgcggcccctgccaccatcttcttctctcctcgctgttccagccagcctgcttcgcctgtttgctcggatctctccgcacaggctcgggctgcgcccggagaggcatcacttatgtggccgtgcgtctacatagagaatgaacttgtttaacanaatatatattataatcgcagctgcgtaaatacacagtcacacgctgtgtnggctgactgcgacttccggcgggctgctggcgcgtgcggcgactcggcgcncgcactgtaggctatatcgtgcgcactcatgctaccctctcgtgtctncggggctgtcgnggcgcgtatggagggagacctcgtagagaggaganagatgangcatatctctatgttggtctcgcaccgtacgctgnggcagagagagggaggacgcgccgtgttacatgactaatgataggtgggtagngnngggtnggcgggggggggggggtaaaaggacagagaaatagngagnaaacccacaccanngnaccnagcannnnnncgggcgccacccacataac

SEQ ID NO: 2821 - DNA, 510 bp, Glycine max
  misc_feature (3)..(4): n is a, c, g, or t
  misc_feature (12)..(13): n is a, c, g, or t
  misc_feature (34)..(35): n is a, c, g, or t
  misc_feature (84)..(84): n is a, c, g, or t
  Peptide Sequence Number=SeqID_6418
  Probeset Number=SeqID_12600
gcnntggtacgnncctgcagggtacccccggtcnncggaatgtctcacgggtgcgaaccttactgtcgtccgctttaaatcctntgctgaatattgtagcaatgggcctatactagggtgtgtgttgttagctgtcgcctgtgaacatcacgtagaaacaattgccaaagaatgaatgtccaatctgatggctaaactcataactgatctgctatctcggtattggagaatcaccacacgctaccgccaccacttgatagttaatgaaggggctcttgataagtcgctacttgagcatgaagtatggctggtgataacagcaatttattgtgcgtttgcgcgttgtattgttggtaaggaatgatgcaacttttgaaatgggtaaattctttaggtggtactcctaagcagcactcaaaagaaacatgggatgaaattgaaaagtttttaacaactcctgctggaagatcagcactaatgggtacacagtgcaagtatgaagcatgtatt

SEQ ID NO: 2822 - DNA, 222 bp, Glycine max
  Peptide Sequence Number=SeqID_6419
  Probeset Number=SeqID_12601
ttaaggtatgagtgctctcggggaagcagatttgacccaaaacccacgtgccaataaataagtttctcaagaaatccgcgcagcgtaagatctttagttagaagttttttacgccaaaaatctttttttaagcaaaggtatttgtgagaggtcgtgtaacaagataagcctcatgaaagcctcatactccgtaaggaggttctacagtatgaacctgttctt

SEQ ID NO: 2823 - DNA, 219 bp, Glycine max
  Probeset Number=SeqID_12602
ttttggctatttgagaatttaggatgccgggtcaaccccctatataaacagaaaccgtctttacttattttgggacccaaacctgaattatctttaaccatgtggacaaaggagaaattgcaaatggcaacggaaatggtgaaaggtgacgcacttttcaataaagtgtcccgaggaaggctaagggaggatgtggcaagaaaatatttctagcagggg

SEQ ID NO: 2824 - DNA, 1948 bp, Glycine max
  misc_feature (1)..(1): n is a, c, g, or t
  misc_feature (3)..(3): n is a, c, g, or t
  misc_feature (18)..(18): n is a, c, g, or t
  misc_feature (106)..(106): n is a, c, g, or t
  misc_feature (127)..(127): n is a, c, g, or t
  misc_feature (142)..(142): n is a, c, g, or t
  misc_feature (154)..(155): n is a, c, g, or t
  misc_feature (172)..(172): n is a, c, g, or t
  misc_feature (222)..(222): n is a, c, g, or t
  misc_feature (254)..(254): n is a, c, g, or t
  misc_feature (263)..(263): n is a, c, g, or t
  misc_feature (265)..(265): n is a, c, g, or t
  misc_feature (267)..(269): n is a, c, g, or t
  misc_feature (271)..(271): n is a, c, g, or t
  misc_feature (276)..(277): n is a, c, g, or t
  misc_feature (285)..(285): n is a, c, g, or t
  misc_feature (323)..(323): n is a, c, g, or t
  misc_feature (366)..(366): n is a, c, g, or t
  misc_feature (433)..(433): n is a, c, g, or t
  misc_feature (499)..(499): n is a, c, g, or t
  misc_feature (511)..(511): n is a, c, g, or t
  misc_feature (601)..(601): n is a, c, g, or t
  misc_feature (700)..(700): n is a, c, g, or t
  misc_feature (758)..(758): n is a, c, g, or t
  misc_feature (803)..(803): n is a, c, g, or t
  misc_feature (812)..(812): n is a, c, g, or t
  misc_feature (834)..(834): n is a, c, g, or t
  misc_feature (947)..(947): n is a, c, g, or t
  misc_feature (1045)..(1045): n is a, c, g, or t
  misc_feature (1069)..(1069): n is a, c, g, or t
  misc_feature (1130)..(1130): n is a, c, g, or t
  misc_feature (1186)..(1186): n is a, c, g, or t
  misc_feature (1221)..(1221): n is a, c, g, or t
  misc_feature (1231)..(1231): n is a, c, g, or t
  misc_feature (1233)..(1233): n is a, c, g, or t
  misc_feature (1281)..(1281): n is a, c, g, or t
  misc_feature (1291)..(1291): n is a, c, g, or t
  misc_feature (1307)..(1307): n is a, c, g, or t
  misc_feature (1324)..(1324): n is a, c, g, or t
  misc_feature (1419)..(1419): n is a, c, g, or t
  misc_feature (1595)..(1595): n is a, c, g, or t
  misc_feature (1630)..(1630): n is a, c, g, or t
  misc_feature (1659)..(1659): n is a, c, g, or t
  misc_feature (1700)..(1700): n is a, c, g, or t
  misc_feature (1718)..(1718): n is a, c, g, or t
  misc_feature (1764)..(1764): n is a, c, g, or t
  Peptide Sequence Number=SeqID_6420
  Probeset Number=SeqID_12603
ntnatcgatccgctacgngatcgcacgcgccgagctatacgatatctggacgtcatagtgcgcgcgcgatcgcatgtcgtatggagatattggctaatatgattgncctgatactgtcttgttgcgntgacgtacgcgacgnaactatacaggnngcgttgcgggacgcagncgctgatagtagaacgcatataatcattatatatagaactctgatacacntgtcatcacccggcccagagtgagggaagcantctgtgtgngngnnntngatannaaatttancggacgagccgacacaattcatactcgagagatcatgntcatatcactctcgacaccacacatacgcgatgaatatgtcgntcagatgtcgtgccggcgcggcgctcgtatcatcacgaagagtatagatgtgcatcggacgacgcanttatcacggtctgtaagtgctacatgacgttcatatcagtcttaggatgcacggtagcagagcgtnagcgcgcgtacngatattcacgctgttctaacagatatgatccatagctctctatagaatatcgacgcgcgtatcgctggaacacattagcagtgtgctgcnaatatcaatcgaacgccacactgcgcgccgttcgactactacacacgtatcgatctgtatagatagttgcaacactcaatcgtcgacgctcatcgtgtntctgctactatcgcacgcatatatatatcctcgacgcgtcgacgcgcctgagtggcangggataaatattcctgtgtgtcgttgtgctcagagcgcacgagtntagtataanatcataacgcgtcggtcgaggnatgctacgccacgccgcgttatcatagaggagcagagtttagctgcgacgtagattcgacatacggcgctgtcaccatcgcgaatactcttatgtctatgtatgtgtcgcgcnggtcgtagtgcgtcgcgagtacgacaagcacttgtgacggatatatcttgagtatgtgtgtgatcgtgtctgagagatgtacagacgactgtgtcgcntaaccctcatacgatgttgacgantagatgagcatcgcgatactataattaatttatcacgatagacgtgaatgtgcgttccatnacgtcgagagagactcgcacagcgccgtaatagtatagatataatataatgcgtgncggcgtctacgaccgcagtgtatatgaggacgagngtacgtatantnacacaatgtgcggcggtgtcgagatcggcagctaatagtccggtgatnaatatatatntttatatattatagcngcgtgcgtagggcgcgncgtgggtcggggtgtggagtgtaatacagagccacgcagaacactagtctaataccgcgcggaggtcgacgtactgtacattaaatatatgggangtatgcgtcgtctgcgtgtgcgttaggagcgcgcgcttctgtactgtcatacatccacgcgcgtaacgcagacactgatcgcgcgacgaggcgtacgcgagacggtctcattcaacctatatcaagatatgtagagctcggtagtgcgtccattatcagcagagctgcagccgcgngctcacatagtatatctatatgtagcggctcactnattagtgatgcgagcgcgagcttgtaagnaggcgtacgagtcggccgcggattgtatatacttcacacgngcgacagacctcaccgcncctggacacgtaagtgatggagacgggagagtgggaggtacgtatngatgaggagagaaagtagctaatcgagacgacgggaagggagccaacaccgatctactacgccgacacatgagagacgcgtatacaagaggctggggtatcaagtgagcagcggccgatccgaccgcggcggccgcagtagttcacggagagaatcaggcgacgatatatattaagacacagca

SEQ ID NO: 2825 - DNA, 448 bp, Glycine max
  Probeset Number=SeqID_12604
gcacgaggttctatttaattatggatttctctctctctctctccttttgcaaacataaaggaaatccaattctgctgtgtcttccatttctacccatgtaatgctgtacaagtttatttgctattctaagtgggcagttaaatgtttacttcatagctgccttttccctcgattgaccacgttttgtatgctgacgtagtgacgttctttttctttttctttctttttttgctgcagtggattttgaggagttggatgtgtccttgggttcgggacaataatggagtaatgtatttatgtaacccttgaaattgtgaggccatgatgatatagagtttaatcatatttccttttgcatttgtaatataaatgtgtttgggctagttgtgaaacgatagacatttcaatagtcaattatagatatactcaattattgttataattgatt

SEQ ID NO: 2826 - DNA, 517 bp, Glycine max
  Peptide Sequence Number=SeqID_6421
  Probeset Number=SeqID_12605
ggcggcgcagaaccaagacaacggcaaggactaccatgagccggcgccggcgccgctggttgaccccacggagtttacgtcatggtcgttttactgagcagggatagcagagtatgtggccacttttctgtttctctacttcactgtcttaaccgttatgggattcgtcggggctaagtctaagtgtagtaccgttgggattcaatgaatcgcttgggccttcagtggcatgatcttcgccctcatttactgcaccgctggcatcttacggggacacattaacccggcggcgacatttgtgctgtttatgacgacgaagtagtcgtagcccagagcgatgttctacatcgtgatgcgatgcttgggtgctatttgtggcgctggcgtggtgaatggttacgaggggatagcagtatacagtgcgttgaatggagtagccacttagatgatcctggatacaccagcggtagatgacttagggctgagattgatggcacagttcatgctagcgaacacc

SEQ ID NO: 2827 - DNA, 1411 bp, Glycine max
  misc_feature (784)..(784): n is a, c, g, or t
  misc_feature (1229)..(1229): n is a, c, g, or t
  misc_feature (1319)..(1319): n is a, c, g, or t
  misc_feature (1385)..(1385): n is a, c, g, or t
  misc_feature (1387)..(1387): n is a, c, g, or t
  Peptide Sequence Number=SeqID_6422
  Probeset Number=SeqID_12606
cgaggccaataaagaatcgctcattcatggaagttgtggaactcgcgcgtactcatgggtatatatccggaacgcccaacagcaaggatgtagacaacacacccctcccgcgccaggaggtagagccatgcgaaggctccccctcatcccttaagagtagagagattgaaaaagatggacatcgtcaatatgttgatactaatcattatcggctgagcacgcacacggtgacactctatgcaagctccaagaagctagtttatcgcaacatatgctacaggaagggacggaagccccgcccctccgaacagctctgagatgagacgagacgtgtatccgtattctccctggggcgaacctcacttgtgagcaggccgattaaagcactggccccacggcgtatacccagtcgagaattaggagcattataccaggaccagcgcgatatcgcagcgaaggcaaaagtcacccaatagcaagtgtcatcacgcttagattatatactcacaacagccacaccttggtaaatattaatataacactcattctgtccttgtaggatttcgcgcgtatgtctatatcgctattttcgaggtaagccggcagttcgctggtaaccgatatatacccggtgtggatatatctagcaatcggtgtgctctctgagagttgtggaccgtggtcgccagttatagtggtcttttttctgtagtcagccagggcgtatctatctatctcctcactactcgttttaataattcgtcgtagtcacacatcctcgcgnatctgtgacatagtttgtctcccatatgattatctcactcactccgcaattccccacactacaccgagtatagtctctcagtgtagtcctcggatctcgagtgttgattgtgctgattcttactcggcgcgggtttgctataattaaaggatctcgattataatatggcccagaggtctatagcccagcgagcctcagttatcaccctacattcatgctcatacgctcgccgatcgtcagcgtatgtagttattactatcaataccacacagccggacacacgcattagcacactaagcgattgctccagatccatcaacaaccggagcttcgtgatattgaaagcgcttcggcaaccgccggtctcctcatgtaatagtgtgcgccatagcaaggaccacattaaagacatcttctctctcgtccgtccgtctcttctatcttncatcgtgtacgcgtgctctacgaacacgccacttctcttactcgctctagtcaatagctggtcacatcgtcctcctatatgattccgcgncgcgcgcacattctaaatatctaatcgcgttttcgctacacagatcttaattaaccgcgcacacgncncgccacgcctaatatattataacg

SEQ ID NO: 2828 - DNA, 750 bp, Glycine max
  misc_feature (60)..(60): n is a, c, g, or t
  misc_feature (63)..(63): n is a, c, g, or t
  misc_feature (119)..(119): n is a, c, g, or t
  misc_feature (235)..(235): n is a, c, g, or t
  misc_feature (750)..(750): n is a, c, g, or t
  Probeset Number=SeqID_12607
tcccccacactgctggtagatggcaaatcaagaaattcagaaaggcccaatgccccatcntcnaaagactcattggctctatcatgttccacggaagaaacactggtaagaagaacctngccatcagaatcgtcaagcacgctttcgaaatcatccacatcatgactggcaagaaccccatccaagtcttcatcgaagccgtccaaaacggtggtgccagagaaggctctaccanaatcggtactggtggtgtcgtcagaagacaagccgtcgacgtttccccccttaagagagctaacctctccatctacttcatgaccgtcggtgccagaaaggccgctttcaagagcatgaagtccatcgctgaatgcttggctgatgaaatcatgaactgcgccaagaactcccccaactccactgccatcagaaagagagatgataccgaaagcgtgcttgacgattctgatggcgaggttcttcttaccagtgtttcttccgtggaacatgatagagccaatgagtctttcgacgatggggcattgggccbytctgaatttcttgatttgcctcttctgtgtaggggatggagttttttggattcttatatacttgcagatgtactcgggctttattgattctgatagcagacattttccctccatttttcatccatggttctcgagtgtttgaaccccccttccttttgtgctttgaattaaagattcgtgttttataaaaaaaaaaaaaaan

SEQ ID NO: 2829 - DNA, 1513 bp, Glycine max
  misc_feature (100)..(100): n is a, c, g, or t
  misc_feature (102)..(102): n is a, c, g, or t
  misc_feature (106)..(106): n is a, c, g, or t
  misc_feature (132)..(132): n is a, c, g, or t
  misc_feature (209)..(209): n is a, c, g, or t
  misc_feature (563)..(563): n is a, c, g, or t
  misc_feature (576)..(576): n is a, c, g, or t
  misc_feature (820)..(820): n is a, c, g, or t
  misc_feature (881)..(881): n is a, c, g, or t
  misc_feature (890)..(890): n is a, c, g, or t
  misc_feature (1296)..(1296): n is a, c, g, or t
  misc_feature (1319)..(1319): n is a, c, g, or t
  misc_feature (1477)..(1477): n is a, c, g, or t
  misc_feature (1513)..(1513): n is a, c, g, or t
  Peptide Sequence Number=SeqID_6423
  Probeset Number=SeqID_12608
ttaagttgtatgtaaatggattatgatttaatttttctctcttcatcttatcactttttatgttatattgtgtagactgtaatttattagactaccgcangncccncgcgccaccgcacgaagggacgcccnagttgcacgctaacgcatcgcgcatctcctacagactctgggaaagggccggcgccgagccgcaacccggcggtgantcacaagagagtttgtgcactcttctgttgctgtttcgccgcggtgccgggtgcgtgctgtggctcgtcggtcgctctgctacgctccatgctctatggcctctcccgtcacatacaacataaatggacacccgcacacggtgcgacgaggaaaagtaagaaaaaggaaccgacacaaaataacataatgtagtgccttatgcgtgccctcgcttatgtatatacctatatcgccaatatatgatgtttttctatacgttatactgtgagatagagcttgatgtaggaaggagagaattacatcgcgcggtcggtcatcctcgagtcgacacctgcaagggatcgaggcccggngcggtcggtcccngcgcacctagccttccgccgcctctgcaccaccactactcactgagagtacaatagattgatgtaatagaatactacatgatcaagcggatgaatcgagcgcggactatctacacaatagtgacgagtgctaggacgtgtcttcacgccccctcctcaattgatcgtataattcacgcgatatgcgaacttgcatccacgcattacacgtatcctagttattcacttatagtaaatattcacanacaccataccctgatgatgaactcgtcctcgtcaccttacaactttgtcgtggtattaganacgagtggnagagtaggtaagatcaccacacatagcgtaatatgtgcacagatgatcgtaagatgtgtaagatatagcaacgtcgtctcacgctccaccctgcgcaaggaacgaagagtgaatgtcgagtgtgatgacggcgcaatactatcacgtgagatgtactgcacctacccattcccaatgtacggaatacatacaggagatcatatcaccccagacctcgaccgccacactatacacactagcacatacatataacgtattatatgtgtatatatataccacacgacctcacactctactcctctccctatgtcacactcatgccctcatactctttatgacacatacatgtcacaccctctgctcacatgtagcacgcgcagatgttatacaatcgaccgcgttatancgaatattgtgtatactatgatntgcgatattgtgcgcgccactacatgctaacgatacgcgtgctccacacacgatcacgaagaacacacacccgcgcagctctatatcacagagatacagtaggataaagagatagcaagatggatcgctagtatccatgcgacgtatattaagtaganatatgctctgctatttgtatatctcctactccttan

SEQ ID NO: 2830 - DNA, 1391 bp, Glycine max
  misc_feature (1245)..(1245): n is a, c, g, or t
  misc_feature (1250)..(1250): n is a, c, g, or t
  misc_feature (1265)..(1265): n is a, c, g, or t
  Probeset Number=SeqID_12609
ttaatgatcgcccacttatcgagacgaacggacccatcccttatctcgcgactttgtcgcccatactctcttatattaggcatgtaccttattggaaccaagaccggttcgcggcgcgcgatgtcgtcgcgggcgcggtataaagtagccgtgactaatgacgctgctatcatcccatgccatgtaatgtccgcgcctgcgacaggggcactcaacacacattgcgcgtcggcgctgtgcgctcgccgcccctcgtcgcccctcattaaatccacagctcttatccgcccgcactacacaacgacactgcactgtcacgtgacgttcgattttcccacacggggctgtctacaccggcgcacgctctgattaattgtatcttattttatttacctcccagctctgactgcctcagtgctggccctaccccgcctctcgccgtatatagtgaatactctcgatgcgcgcccccgtcgcctatgtgacatcctctacacgccccgcacgcagaaatacgtaagggagcgacctcagcatcaggcgtcgcgtgagcccctatggctcataatacaccccacccatgtccccctactagtaccaacccagcaacaccaaacatgctagattcccaccctacatcttatatatatttatccgctcatcgcgccgacagcgtcttatatgattccacccgctccgcaccccatgtgcgcggcgccgctgatatttagctcccgctatagccgccacaacagtgatacccacacctaatggaatgatatcgcgttcacgcatatatccctctctatttctctgtattctgtcgtatctgagacatgcttcgcgatgtaccgaaccaacacacaaacatacacactcactctaccctatatataacgttggcccatatgcaacattgaatcatccattcaaacgctcgctgacgttttcccgcaacactattgcctcttgtcttctttcactactcaccattaatgattgacttggattctccctgcactcatatataacacgatactcagcgggtcgacaacacacaacaacactatctaatgtccccacatcatcacgattatggcgcgcccgcgatgtattgccgcgccctgtctctcactcaatacaactattatatatctcgcggcgcactcgactattgatatattatacgcgcccgcaacaataatcgtgagctcatatgattatcgataatacacatcacattgnctgcnctcctccaccttaantatatcgtgtgctatggaattattatctggtataattgaacagtgtaattgtcactgagatgagtgtgaggcagatcttttgtatcgctatacgactctatgtatacagcgactatccgactacga

SEQ ID NO: 2831 - DNA, 624 bp, Glycine max
  Peptide Sequence Number=SeqID_6424
  Probeset Number=SeqID_12610
ttttcttacgggtggttgcggccaccaccgccagccgttattgatgggggggaactaacccccggtccacaaagttccgcccccacctttttgggagatggctctccccacccgagaggcgagattatcttcgtagtaggaaggtgcaccctaaggtatcgtagcgggcagcgcgcatgcttgcgcttgaggttcttcatgcaggagaggttcatctccccgatcttgatgttcttgttggcccggttccagtgtgtggcggggtgcgcagtcgatcacctcttttctttccatgttccagtagcacgcgggctcccccaccacgctcggcgagcagttctcgcactcgcccacgaggaggaggcagttcgcgaagtgcatggcctgcgttttccaggactatggccccgtccggtacgtcgcgtaccccgccaccgtcgccatgagcgcggtgctctgcaagagcccggcggcgagctccacggccgccatgggaggatggatcgatggatccagatgcagcttagctacctagtgggggaagcaaagtgtagcagttaacgacaggggtcagcgcggaacgatggtttttcgattaggacgttctaggtaatggtctcgtgc

SEQ ID NO: 2832 - DNA, 1352 bp, Glycine max
  misc_feature (1)..(1): n is a, c, g, or t
  misc_feature (15)..(15): n is a, c, g, or t
  misc_feature (25)..(26): n is a, c, g, or t
  misc_feature (65)..(65): n is a, c, g, or t
  misc_feature (102)..(102): n is a, c, g, or t
  misc_feature (156)..(156): n is a, c, g, or t
  misc_feature (702)..(702): n is a, c, g, or t
  misc_feature (1062)..(1062): n is a, c, g, or t
  misc_feature (1241)..(1241): n is a, c, g, or t
  misc_feature (1264)..(1264): n is a, c, g, or t
  Probeset Number=SeqID_12611
nggtttttttttttngtttgctttnntttgtgttctcactggttgctgttcgccgggggtgcctnctacccccaccccctcatcaattgctaggccgatctnactgccactcctagaccgacggctcgcgcgcgtcgcaccataagcgaaacaccnaccacagaccgtcgtgaggtgttatatgggatgtgcagacttatgttgtacggctcgggccgaccgcttcactactagatgtcgcggggttgtgggtaataagtatgagtggctgtgatatgtatgaaggggtgggaatttttttatttgtggtaacactgagaatatgtacattatgtccttgcctctcgtgtcttgtctgccggagtgagcggtggctgaagtctcacctatcgacatattaattgcacatgtatgtataatgtatagggaagatcgccatcaggtgcgcggcacgagggcgtggcgggatcgtgcctctgtctccttctagtgaggagagttagttggcgttgccctcggccctcgacggagggcggaggcttcctgtgaggactaccccgctctcatattcttctgacttatctgcgtatctctctctttgctgctcttgtgcgcgtcgtagggtgcggcgggggggtggcgatgagctgtggtaggttgtggttttttgtgatggtagtgaaatgaaaatagttgagtganaataatctaacacaaattaaacttattagcgccggatggctatatatatgcagtgggttgtttggaatcaaacctccatcctatcctcccatacgtcgaggcgtcggtcgcaagataatggatatggctgagtgacgacggaatactttgggctggtgatgagtactatcgatgaccatggtggtaatagatactccggcgcgccctctctgtatatacttgcctgactggctcagatgcgcgcgcgtgggtgtgtgacatatcgctacatccacctccctactcctcacgtcattggcctaggcgcgctcgggcgtgaagacgcccgtggcgtctgtgccgacgagagtcgccggcgcngacgtattcggtggtggtacgccggagcaggaatagagtgtacacgataaaagattaatctatcgataattacgagctagtgcaatatacgcagtcatactatcagtatgtgcattagatgatgtgcttgtgtagttgcgctgatgtactctaatcgcgtaggtctgtgggtgcggcangttcgtgacactgcacgtgcgantcggcagcttctctcgtcgcgctgaccgtgtatgagcgtgtctccttgagcgttctctcatgctgctgacgccgcgtccggtcgatag

SEQ ID NO: 2833 - DNA, 228 bp, Glycine max
  Peptide Sequence Number=SeqID_6425
  Probeset Number=SeqID_12612
tgtgttgtagtgtaacaatgttctttccctttccatttttttactagaatggttctgtttagtccccctggggcctgttgtacctctttagtctgtcaaactgttggtcaagccaaatgtcgagggttgttgtgggatgaaatttcccctgttgattggatgccaaaatgtgcattcagagcaatgagatttctatggactgcttataattcaaaaaaaaaaaaaaaa

SEQ ID NO: 2834 - DNA, 1467 bp, Glycine max
  misc_feature (1)..(1): n is a, c, g, or t
  misc_feature (25)..(25): n is a, c, g, or t
  misc_feature (36)..(36): n is a, c, g, or t
  misc_feature (41)..(41): n is a, c, g, or t
  misc_feature (45)..(45): n is a, c, g, or t
  misc_feature (67)..(67): n is a, c, g, or t
  misc_feature (537)..(537): n is a, c, g, or t
  misc_feature (685)..(685): n is a, c, g, or t
  misc_feature (698)..(698): n is a, c, g, or t
  misc_feature (890)..(890): n is a, c, g, or t
  misc_feature (1183)..(1183): n is a, c, g, or t
  misc_feature (1340)..(1340): n is a, c, g, or t
  misc_feature (1404)..(1404): n is a, c, g, or t
  misc_feature (1467)..(1467): n is a, c, g, or t
  Probeset Number=SeqID_12613
ngggttgttttgtttgtgttgtttnctgtttcctcncttanctcncccgccatgcgcgagggggaanaaatgagcgctcgaactacagcttgaaatatgtgggggacgcccccctctcccccgtgctaaacttaatgagtaatcattggaatatgggtacgaacaaatgatcatcaacatgtgtgtattataatgatagtatgtagaataaatgataaagaacaaggaattgtcgcgcatggtggagatatgattattctatctctgtgtgaaggtatcagatcgactgatggttagtgtgcctccggtgcttcctcaccaccatggcgcttgaccccgtgcgctcatgtgagcccggctcgcgctcaccagccgcgcaattatgagtgttatgggaggttatatgggaagcgagataatggggttgctcagctgcttcttatatctcccgctgctaatactgccgtggttatgggcagctagctagatactctctgatggaatgatgtatgctgatgtgtgagagacgagatacancgagtgcggatgatgagtgatgcacatctactacctccttgtatggtcatatcccatgtctagttgcggcttcatcatctatcattttaaggtgataatatatatataactaacacacaccacataaataatctaaccagcgtgctgnttgatacgacatncacgctcaatgggatggtatagttttgtatgtgccacacacgatcctagtgtatgaagatatatatgtgtgtgaacagctagcagacgagagacgtagtgcgagacgacatgacacactatcgacgggcatgggcacagacgctgtgtctgatacctcgcaaacatatgatgagtggtgcgttgcccgctanacaatccacagtgatgtatatgctctcaacgctgcgtgagagtaatcatgtcaatatatccctccctctctgcatgtagcagtagtatcgcacatatgtattatatagcactagatggacgtttgtcacaatgcatgttgctgatgcagcttgaagctacaatgtatagatgagatatgtcggatggcagcgcccgcacgcgctggtcagtgaaagattgatctcgtcatcatgattgagtcgaccacacgagatgtagagatgcacgccccgtagctctctgtggagatgtntgtattagagacacctcatctaccagattgatatgcaagatcagatataagacagactgatagtagattatctcactacgcggtgcggcatgcagacgagagtgcacacagctaccgtgctatgcctgctagtgtagagcgaccgatctccgcgcancactgctgctgtgagagctgtgtgcgcacagccgcgctactacttgatcacagtagctgaaganatgtgacactcactgcgcggacgctcattcactgcagaatcggtacgcagggcgctgcgtgcn

SEQ ID NO: 2835 - DNA, 1355 bp, Glycine max
  misc_feature (15)..(15): n is a, c, g, or t
  misc_feature (34)..(34): n is a, c, g, or t
  misc_feature (49)..(49): n is a, c, g, or t
  misc_feature (78)..(78): n is a, c, g, or t
  misc_feature (84)..(84): n is a, c, g, or t
  misc_feature (257)..(257): n is a, c, g, or t
  misc_feature (341)..(341): n is a, c, g, or t
  misc_feature (370)..(370): n is a, c, g, or t
  misc_feature (395)..(395): n is a, c, g, or t
  misc_feature (705)..(705): n is a, c, g, or t
  misc_feature (816)..(816): n is a, c, g, or t
  misc_feature (865)..(865): n is a, c, g, or t
  misc_feature (946)..(947): n is a, c, g, or t
  misc_feature (1189)..(1189): n is a, c, g, or t
  misc_feature (1261)..(1261): n is a, c, g, or t
  Peptide Sequence Number=SeqID_6426
  Probeset Number=SeqID_12614
ggggggggtcccccncgcctccgcgccgcgccgnggcggcgcggagggncgcgttgaggaggggaggagtgtttgttnttatanaggggcccgagtgtcgatataagcgcggggcgcgcgccccttccgcgtcgcaagaatatccgtagcgataacccctctcgcccaccacgagagagtggtagacagaggggtacatatagtgagtaaaatatctgcgtctacatcatctgcgtctaactaacaatggtgtcacnacaccatcccgtgtggaccatcgggatggtaagacctccaacacagcattcacattcatattacaacagacctgtgcaatcatntacgaggacatacatacggtcgcacactnttacaacatgtacgatacacatagnggtagatacttctctgtgtattgtggacatgaccctaagagaaaagcggcgtggtacaccaggtggacttacctactgtgcgattcaccactatggggctgtgtatataaaatggggggataataaaaacttggtcatactcctaactcgtgcgtcggtggaggacattcaacgatcctttacactctgacacatgctgcacaacactcgagaggggcacatacgcctcgtcgtccacaataattagtgggtgggcataccctataatcatggtgcatgaagtaatgtgggtatctggtgtggtatgatncgtgggaggcgcccaccaaaaccaccagtggtggccactaccaacggtgtagagcgagtctcaatattgcgtggggggggcgacctataaacgcgtgtctccacaacagcnctgagcatcatccacacaatctgtgtggggcgggatgggctgggtgtgngcagcatcttccacatacgagaatataggtgtggtcctcgacagacctacgggtggtgtgcgccggtcgatccacatcaanngcgggagggcagacaaaatgcctgttcatcgctggatatagaaaggtgtgcgtgtgctacaactactctcgcgcggcgcggcaagcgacacattcgaaacgctggtgtggggcgcatggataattctacttcacgcatgttgattatacacatctgtcgcgagcgccgtctccacatctgcggtgtgcgggctgagagtgcggacacacacacacctcgcgaaacgcataacacacaagctncatgtggaagggcacaccaataaggagggtgctgaggcgcatacaaagacaagcggcgcccgaagagaaacnccccgctcataatacagagcgcacttcttgcgcggagagcaaagcgcgtgagaggacgccctctctaaacaattagaacaagcgctcacgttgt

SEQ ID NO: 2836 - DNA, 1469 bp, Glycine max
  misc_feature (1)..(1): n is a, c, g, or t
  misc_feature (11)..(11): n is a, c, g, or t
  misc_feature (21)..(21): n is a, c, g, or t
  misc_feature (63)..(63): n is a, c, g, or t
  misc_feature (121)..(121): n is a, c, g, or t
  misc_feature (267)..(267): n is a, c, g, or t
  misc_feature (302)..(302): n is a, c, g, or t
  misc_feature (560)..(560): n is a, c, g, or t
  misc_feature (687)..(687): n is a, c, g, or t
  misc_feature (785)..(785): n is a, c, g, or t
  misc_feature (849)..(849): n is a, c, g, or t
  misc_feature (909)..(909): n is a, c, g, or t
  misc_feature (987)..(987): n is a, c, g, or t
  misc_feature (1134)..(1134): n is a, c, g, or t
  misc_feature (1355)..(1355): n is a, c, g, or t
  misc_feature (1378)..(1378): n is a, c, g, or t
  misc_feature (1382)..(1383): n is a, c, g, or t
  misc_feature (1386)..(1387): n is a, c, g, or t
  misc_feature (1389)..(1389): n is a, c, g, or t
  misc_feature (1392)..(1392): n is a, c, g, or t
  misc_feature (1396)..(1396): n is a, c, g, or t
  misc_feature (1425)..(1425): n is a, c, g, or t
  misc_feature (1428)..(1428): n is a, c, g, or t
  misc_feature (1431)..(1432): n is a, c, g, or t
  misc_feature (1434)..(1437): n is a, c, g, or t
  misc_feature (1445)..(1447): n is a, c, g, or t
  misc_feature (1452)..(1452): n is a, c, g, or t
  Probeset Number=SeqID_12615
nagcgagtacngtagacacgngcacgagggttgtctgggttcgtggatacggcgtggcgagtntgtgtgtgatgcacggcgtcgttgtgtcgctcgcgctcagcgacgcgtgagtatgtanctcgtagtcgcacgggccgtcggcttggtgcgataagagatagcaaatagtgcggctgacagctcacgcagctagatagatcacatagaggtgtgagtcgacatcagagcgtggagctagtcatgaagccgtgagctgaggcgcancgcgcgacggcgctagcgtactgcgccgtgcgcgngagctcgacactacggtgcgtagctcagccggtgatgcagatagcgtactggataatatacatagctcacatcgaagagcgccgctgccagtctattcacgtgcaggggagtagtgaggtgggcccgcgaccagctacgatgctgcgcgctgcgcgactaacagtatactcgccgcggaatgctatagctgcgccccgcgtgcagagatagggtgatgtacctcataccgtacgtggtgactgatttacaatacactntatacacgcggaccggtacggaccgctcacgcaccgactgtggtagggcgcgacagtagtgcgcgggcttggcaacggcgagcggtctcccggagtgcgattatacgtacagttgtggcgtcatganccgatacagcatgagcacaacatgtgcgagcgtacttgaagcggacgatgttgcggaccgatcgatacgctagcactcgtcacagatatgatgtagtnactggagacgggatacgattatcattctggtagatattatttgtgcggtcgcttcaccgcgccngggtgcgtgcggtgttgccgtgggcgcgcctcggcgagattaggagagaggtgtacaggnagagtggtttatactgagtagtctctgctctgtgagccccacgagcatgcatcacctgtgtatctttaacactgtagngtctcacgctagagtattaaagcgataatcagtctgtgcctctcagcgactgatatagactcgggtgagcgctcgctgcgcagtgttcatccgtcgcacgaacatacggcgcgaccacgaagatttctgcttcgagtgtcacgacangagccactgagcatgtgcatatccgctctgtgcgctaacaatagatactacgcaaccgctcccactgccgtcgcgggaggtgctgtatgtacatgatgtctgtcacatccttatcacactctctccttccgcgcagaagaagagaaagcagaaggtgcacaaacgacctttatctcgtatcaacacgctcggcgccgtgcgagtgtgagcgtcgctcctancgtacaccgctatatgttgtatncttnnttnncnctnggtnggggtgagggaggaacaccgcgacgcgcnccncannannnncggcgccnnncgcgncggggcccaccacccac

SEQ ID NO: 2837 - DNA, 993 bp, Glycine max
  misc_feature (768)..(768): n is a, c, g, or t
  misc_feature (777)..(993): n is a, c, g, or t
  Peptide Sequence Number=SeqID_6427
  Probeset Number=SeqID_12616
ctttctgttcttgttgggctgctaatgctatccgcgtccggctcgttgcagcactcaaactccttcattgcagctacactcaacaccgtgtttagatggaagcctaagttttgcggcaactttggaaaatacttcaaaagtgcgttcaagtctcacaaaacggtgcattggaacacgtgtcaatggattaaaacggtaaaacgaacacacccttgttacttggacgtggaaattcacgttcgcgctcctttttatcttggcattgcgtttgtgtgtgtgtgcaatatcacacaacccaaccttattcgttcttctgttgttctgaggcgagccatgacggacggtcatctcttcaacaacatcaccctcggtggccgtggaggcaccaatccagggcagataaaaatatatcctggaggaattgtatggaagagacagggtggtggtaaattaattgaagttgataaatctgacataatgggggtgacatggatgaaggtaccaaggagtaaccaacttggtgttcaaatcaaagatgggttgtactacaagttcacgggatttcgtgaccaggatgttgtaactttgaccaattttttccaaaacacctgtggaatatcagtagaagagaagcaacttctgttagcggacgtaattggggagaagttgatctaaatggaatatgctgcttcacggttggtcaaaccagcttttgaagtgctttaccaaatgtctctcaaccgcacttcaagggaaaattgatgtgtncttgaagtnnnnnnnnnnnnnnnnnnnnnnnnnnnnnnnnnnnnnnnnnnnnnnnnnnnnnnnnnnnnnnnnnnnnnnnnnnnnnnnnnnnnnnnnnnnnnnnnnnnnnnnnnnnnnnnnnnnnnnnnnnnnnnnnnnnnnnnnnnnnnnnnnnnnnnnnnnnnnnnnnnnnnnnnnnnnnnnnnnnnnnnnnnnnnnnnnnnnnnnnnnnnnnnnnnnnnnnnn

SEQ ID NO: 2838 - DNA, 300 bp, Glycine max
  Peptide Sequence Number=SeqID_6428
  Probeset Number=SeqID_12617
ctgcagaatcctctactccctcactttctctctcctctcccatggcctcgctctctctctcctcgccctcgcctccttatccctcgatatctccttcgattcttccaattatcggttaattaaattccttttcaggccaggtgcttcttctggaattctgctcggcgctgtcactctcccttctctttttctctccaaattggtccaactgtcgcgggaattctcactcgctcaacttcatcttgaagagattcaatatctgacattgcaatactgggccacatctgccagcgcctgcag

SEQ ID NO: 2839 - DNA, 794 bp, Glycine max
  misc_feature (708)..(708): n is a, c, g, or t
  misc_feature (735)..(735): n is a, c, g, or t
  Peptide Sequence Number=SeqID_6429
  Probeset Number=SeqID_12618
cccacgcgtccgggcaggcgagtgacgctgtgaatccagaccgacttagagagaacgaaacacagcagtgcgtatcaacacactacaatggagcgtttggccaggtcagctcgaacgtggcgttggcattggcgttcattttcctctttccaaaccctagcttctcgctcctcaactccttcttcctttcccaaattttcgtcttcttggtctacctcttcctctggttcgagtttcagagttttgcgatcagtcggttcgttggtttcagttgttttagcttgtataattgggacgagattcgaggaagctgcatacccaatttgcgatgcagctgttgaaacccgaactgagatgaacgtgcgagagttacagaaggaatgtctggaagagatattaaatatgtttgtcagctagccgaacgatcgtgggcgtcataaataattcgagggcaagttcctaaataaggtgataaagcaccgcttccacctttgcaagaatattgataatgcgccacgagtcgacaggaggcgctgcatagtgctgccgcaaacaggaagttcgcaggctctttccggcgcatgaaaaggattatatgcgactaacacctcttttttttttttgtttattcacgcaagccaataagagctttagaaaatttaatacactgtctgcacactactaattgcagatgtataagatctatgnatactcatatttcattctctcattggntcagataaagctgaaattgaatcattagcaggggacttgagtcctgaagagctgagctt

SEQ ID NO: 2840 - DNA, 2035 bp, Glycine max
  misc_feature (1)..(1): n is a, c, g, or t
  misc_feature (12)..(12): n is a, c, g, or t
  misc_feature (16)..(17): n is a, c, g, or t
  misc_feature (21)..(21): n is a, c, g, or t
  misc_feature (24)..(24): n is a, c, g, or t
  misc_feature (26)..(26): n is a, c, g, or t
  misc_feature (30)..(35): n is a, c, g, or t
  misc_feature (38)..(39): n is a, c, g, or t
  misc_feature (60)..(60): n is a, c, g, or t
  misc_feature (63)..(64): n is a, c, g, or t
  misc_feature (74)..(74): n is a, c, g, or t
  misc_feature (80)..(80): n is a, c, g, or t
  misc_feature (83)..(85): n is a, c, g, or t
  misc_feature (93)..(93): n is a, c, g, or t
  misc_feature (108)..(109): n is a, c, g, or t
  misc_feature (132)..(132): n is a, c, g, or t
  misc_feature (207)..(207): n is a, c, g, or t
  misc_feature (241)..(241): n is a, c, g, or t
  misc_feature (257)..(257): n is a, c, g, or t
  misc_feature (381)..(381): n is a, c, g, or t
  misc_feature (383)..(383): n is a, c, g, or t
  misc_feature (612)..(612): n is a, c, g, or t
  misc_feature (671)..(671): n is a, c, g, or t
  misc_feature (866)..(866): n is a, c, g, or t
  misc_feature (934)..(934): n is a, c, g, or t
  misc_feature (1009)..(1009): n is a, c, g, or t
  misc_feature (1130)..(1130): n is a, c, g, or t
  misc_feature (1132)..(1132): n is a, c, g, or t
  misc_feature (1158)..(1158): n is a, c, g, or t
  misc_feature (1195)..(1195): n is a, c, g, or t
  misc_feature (1249)..(1249): n is a, c, g, or t
  misc_feature (1271)..(1271): n is a, c, g, or t
  misc_feature (1281)..(1281): n is a, c, g, or t
  misc_feature (1358)..(1358): n is a, c, g, or t
  misc_feature (1400)..(1400): n is a, c, g, or t
  misc_feature (1412)..(1412): n is a, c, g, or t
  misc_feature (1431)..(1431): n is a, c, g, or t
  misc_feature (1532)..(1532): n is a, c, g, or t
  misc_feature (1534)..(1534): n is a, c, g, or t
  misc_feature (1549)..(1549): n is a, c, g, or t
  misc_feature (1567)..(1567): n is a, c, g, or t
  misc_feature (1575)..(1575): n is a, c, g, or t
  misc_feature (1614)..(1614): n is a, c, g, or t
  misc_feature (1623)..(1623): n is a, c, g, or t
  misc_feature (1662)..(1662): n is a, c, g, or t
  misc_feature (1665)..(1665): n is a, c, g, or t
  misc_feature (1676)..(1676): n is a, c, g, or t
  misc_feature (1703)..(1703): n is a, c, g, or t
  misc_feature (1715)..(1715): n is a, c, g, or t
  misc_feature (1731)..(1731): n is a, c, g, or t
  misc_feature (1787)..(1787): n is a, c, g, or t
  misc_feature (1798)..(1798): n is a, c, g, or t
  misc_feature (1816)..(1816): n is a, c, g, or t
  misc_feature (1820)..(1820): n is a, c, g, or t
  misc_feature (1822)..(1822): n is a, c, g, or t
  misc_feature (1829)..(1829): n is a, c, g, or t
  misc_feature (1839)..(1839): n is a, c, g, or t
  misc_feature (1857)..(1857): n is a, c, g, or t
  misc_feature (1859)..(1859): n is a, c, g, or t
  misc_feature (1873)..(1873): n is a, c, g, or t
  misc_feature (1898)..(1898): n is a, c, g, or t
  misc_feature (1902)..(1902): n is a, c, g, or t
  misc_feature (1907)..(1907): n is a, c, g, or t
  misc_feature (1920)..(1920): n is a, c, g, or t
  misc_feature (1935)..(1935): n is a, c, g, or t
  misc_feature (1950)..(1950): n is a, c, g, or t
  misc_feature (1958)..(1958): n is a, c, g, or t
  misc_feature (1961)..(1961): n is a, c, g, or t
  misc_feature (1967)..(1967): n is a, c, g, or t
  misc_feature (1970)..(1970): n is a, c, g, or t
  misc_feature (2004)..(2004): n is a, c, g, or t
  misc_feature (2008)..(2008): n is a, c, g, or t
  misc_feature (2022)..(2022): n is a, c, g, or t
  misc_feature (2025)..(2025): n is a, c, g, or t
  misc_feature (2035)..(2035): n is a, c, g, or t
  Peptide Sequence Number=SeqID_6430
  Probeset Number=SeqID_12619
naattttttttntttnntttnttntntttnnnnnnccnncacgcgactttccatcactantanntccctcgacnacgatntcnnnttattctnttgtatcccttccanncccacacgcgcgagcgccccctnaacctactctcatttatactcttctcgtacattccgactcatctttatgtgctctctctttgactctcctcctcnttatgttacctatatccaagagttttccacttcnttctttggagtcgctnccacagcgcgcgctgtgttatgtgacgtactccacgcacgcgccacatgtgcgcagcgtcacggcgcagacgcgagagagagagcgtcgagcggtgacgcgagcggcgcatagcggcgtgacgnangagcgtaggagactggcgcgacgcagcgtctgcgtcccgcggcacgcgtcggagactcacgatcgctctcggctagagtcgctagtagacggctcctgattgccgctggactctcagtagtatgaagagtatgtaatagtgtggacgcatgcgatatgtgtgatgttgtgtcgtgtatggatatgagagtgaggtgagatgacagcgaggcgatgtggatggttgttgnttactgtcgtggtggtgtgtgcaggttgggtagtgcggcgaatgtgcgagacgagtggntcggcgggcgatgagtggctgggagtgtcaagtgtcgtggaggtcgtgcatgcgcgatacgcgtagcgagatatggtcgtgtgacagcgatcgcgctccgtcgcacgacactgcagtcttcagatcggcatgtgagagactggtgctgatatgagtgatgagctgcgagtgtgtgcattcgccgcgcgacgtaanacctcgactagcagctctgccgcgagtcgagtatgtgtcctagctatatattgcggtcagatgtgcgncgagggtatggactgacagacggcttgtgcgcgttgctgtactacgatcataactgtgcacacgcgctgtgctgncgtgacgccggtcgctctgtcgccacgtatgcaaccgatatgtcgtctcgcgtatcacttatccaaccgtgagtcgctagaggcgatgacggttgagtacgcgcagatcggagagtagtgntngcgagcagtatcgcatgcacgatcgnttctcacctgtacgcgcgctcccgtgagcggcgacgncatgtagcgacgtgccgcgcgcgtatgtacgatacggtgcaacagactcgtgancatacgcgctggcagctcgacngcacgtcagntgtctttagctcagtactcggtggtatcacatatatcgtcgagtactatgtatgcggaacgatgtcgtggggctatnatgcgtcgagacgcgtgcacgagatgtgtatcacgacgacgntactacatcgangcgacgcaagcagacggangctaatgtcatatcgatcacgtatgatacactgctcgacctgtcgcctgcgcgcgacagtagttaagcgcagctctgagactgcgcgctcagcgtcactgnancgctacgacgcgtcncactgtacgcgcatatangctgtgantggctgtcgcgctcgctgcacgcgatcgtccgggctgcnacgcacgcntccacgtatgcttgtctacgtacacacactcttcgtgantgnatctatgctanattcgactagagcgcgcacactgcacnacgctcgtatgncagttatcctatgcgngactcgatagtgctagtagcgcccgagcacgtatgacgagacgacgtacgtgctgntgagatgttantcggtgcgatgagtcgancgcnanctcgtcncgcgtgtcgntcgttgctacgtagcgancnacgtggacggatcngagtgaaatcagctgggtctgggtngcgngtagnacgtgcgaggcgnagtcgtcgacgcagnctgatgcgccctgtnacgatgtncgncagcangtnatcgtatcagatgtagactcgcagcagcacagcnagcnctgtacgctgacgncgngcggtagtgn

SEQ ID NO: 2841 - DNA, 1908 bp, Glycine max
  misc_feature (1)..(1): n is a, c, g, or t
  misc_feature (23)..(23): n is a, c, g, or t
  misc_feature (63)..(63): n is a, c, g, or t
  misc_feature (144)..(144): n is a, c, g, or t
  misc_feature (192)..(192): n is a, c, g, or t
  misc_feature (198)..(198): n is a, c, g, or t
  misc_feature (211)..(211): n is a, c, g, or t
  misc_feature (220)..(220): n is a, c, g, or t
  misc_feature (228)..(228): n is a, c, g, or t
  misc_feature (247)..(247): n is a, c, g, or t
  misc_feature (351)..(351): n is a, c, g, or t
  misc_feature (358)..(358): n is a, c, g, or t
  misc_feature (383)..(383): n is a, c, g, or t
  misc_feature (393)..(393): n is a, c, g, or t
  misc_feature (403)..(403): n is a, c, g, or t
  misc_feature (435)..(435): n is a, c, g, or t
  misc_feature (440)..(440): n is a, c, g, or t
  misc_feature (577)..(577): n is a, c, g, or t
  misc_feature (594)..(594): n is a, c, g, or t
  misc_feature (597)..(597): n is a, c, g, or t
  misc_feature (601)..(601): n is a, c, g, or t
  misc_feature (665)..(665): n is a, c, g, or t
  misc_feature (827)..(827): n is a, c, g, or t
  misc_feature (854)..(854): n is a, c, g, or t
  misc_feature (899)..(899): n is a, c, g, or t
  misc_feature (901)..(901): n is a, c, g, or t
  misc_feature (975)..(975): n is a, c, g, or t
  misc_feature (1077)..(1077): n is a, c, g, or t
  misc_feature (1174)..(1174): n is a, c, g, or t
  misc_feature (1389)..(1389): n is a, c, g, or t
  misc_feature (1408)..(1408): n is a, c, g, or t
  misc_feature (1419)..(1419): n is a, c, g, or t
  misc_feature (1467)..(1467): n is a, c, g, or t
  misc_feature (1619)..(1619): n is a, c, g, or t
  misc_feature (1624)..(1624): n is a, c, g, or t
  misc_feature (1626)..(1627): n is a, c, g, or t
  misc_feature (1630)..(1630): n is a, c, g, or t
  misc_feature (1634)..(1634): n is a, c, g, or t
  misc_feature (1647)..(1647): n is a, c, g, or t
  misc_feature (1650)..(1650): n is a, c, g, or t
  misc_feature (1657)..(1657): n is a, c, g, or t
  misc_feature (1660)..(1662): n is a, c, g, or t
  misc_feature (1667)..(1667): n is a, c, g, or t
  misc_feature (1676)..(1676): n is a, c, g, or t
  misc_feature (1678)..(1679): n is a, c, g, or t
  misc_feature (1687)..(1687): n is a, c, g, or t
  misc_feature (1697)..(1699): n is a, c, g, or t
  misc_feature (1702)..(1702): n is a, c, g, or t
  misc_feature (1707)..(1707): n is a, c, g, or t
  misc_feature (1709)..(1709): n is a, c, g, or t
  misc_feature (1722)..(1722): n is a, c, g, or t
  misc_feature (1724)..(1731): n is a, c, g, or t
  misc_feature (1733)..(1736): n is a, c, g, or t
  misc_feature (1738)..(1739): n is a, c, g, or t
  misc_feature (1741)..(1742): n is a, c, g, or t
  misc_feature (1744)..(1746): n is a, c, g, or t
  misc_feature (1748)..(1749): n is a, c, g, or t
  misc_feature (1755)..(1756): n is a, c, g, or t
  misc_feature (1760)..(1763): n is a, c, g, or t
  misc_feature (1770)..(1773): n is a, c, g, or t
  misc_feature (1775)..(1778): n is a, c, g, or t
  misc_feature (1780)..(1780): n is a, c, g, or t
  misc_feature (1782)..(1782): n is a, c, g, or t
  misc_feature (1787)..(1788): n is a, c, g, or t
  misc_feature (1808)..(1808): n is a, c, g, or t
  misc_feature (1811)..(1811): n is a, c, g, or t
  misc_feature (1813)..(1813): n is a, c, g, or t
  misc_feature (1815)..(1815): n is a, c, g, or t
  misc_feature (1842)..(1843): n is a, c, g, or t
  misc_feature (1845)..(1846): n is a, c, g, or t
  misc_feature (1857)..(1857): n is a, c, g, or t
  misc_feature (1859)..(1859): n is a, c, g, or t
  misc_feature (1862)..(1863): n is a, c, g, or t
  misc_feature (1865)..(1865): n is a, c, g, or t
  misc_feature (1867)..(1868): n is a, c, g, or t
  misc_feature (1875)..(1875): n is a, c, g, or t
  misc_feature (1877)..(1879): n is a, c, g, or t
  misc_feature (1883)..(1884): n is a, c, g, or t
  misc_feature (1889)..(1889): n is a, c, g, or t
  misc_feature (1903)..(1903): n is a, c, g, or t
  Probeset Number=SeqID_12620
ntgtcgagaactactgctgtagnccgtctgacatgagagcgaatgcgacgcagcagtatggtngctcgcggtcgaggacgcgatcgatagctgctgaacgacgatctctgcggttgtatctgctagtgagacggcgtgatatgntatgtccagctctgcatgctgctattatatgttcatcttatctaactntcagcncactctgcatcgntgtttatgntcttctgntacctacgaagacgagtangcgatgtagcgccgcgaggtgtgagaggcgtggtcgccgccagccgtagtgagtcgatgcagtgtagaagatagagcgcgacagacgatcgagacatagacacngtcagcngggccaatgcacatgcactacatgnctgctatggngatgagcgantacgacaccagatgcgcgagagaggcacgcgnatggncgttcgtcagatagatatgtaagtatatatgcgacaagaggagcattagtatgatatcacagtcataattatcactatacagacatgtagatattgtcatatatcaattataatctcactgtaacatagcgagtatnctcacatcactacactngantgcntggtcgtatgtgttgtatgcatccgtctccatcatcttccacgcactatcacaatgctacgagnagctagaccgaattcacactcgcgagcccgagcgtgaggagaggaggagaggaaggaagagccgaacagcagaacggcgcgccgccactgtgatttgcgctgcagcctttgtcaagtgatacacatagcccgcagcgttcatccatgtctcacatccgtganagcagcgcgcgtacgtcgcgcgagcantcgcggcgcgcatcactcacgcggagtcgtgcctatggcgcgagnancggtggcctcgttatatggagagtaatagtctagtgtgttcacacagctagtcagcttcgctcatctagacatncacacgaaccacgaatactatgctctacgtataataaagttaaatagagatataagatacgaaattcgatgatacaagaatatgattatagcaatatcgaangtcactatagtaatacgtgagatagtgttatgtgagatttatgatattgtgtgcctgcttgctcttctccatcttcctatcgtgtctcctgtcgatntgtgtgtgtcattagttgtcgttgctgcgtcgcatgtcgattctctcatatctattctctattagtctatacatcgacaagcattactcttccacactcaaccataataatagtaggagatagaagacgtaggcaatagctcggagtagtgatgtactacgtgaacattatgacaatacgctgagttcgtctcgtcgctgtgatgtcatgtttcnggagtgttgtttgtccgtnttgtcttagtngttatcttgagcgtctgtgcattcattgtcattcgtaggtctagttgngagtgacactcagtgcagacagcccatcgccattaaacagagcgctctgatactgtgtacgtgagtggcacgtgacgtgtatactcgactactctgcctaccgcgctctctgtcgtatcttatacgatgtacagtctataccacaatattgnagatnannatncganctcaagccaactntanatgcaanagnnngaacntagaacgtnanncacaacanaacactagtnnnaancacancntcgacaccgacgnannnnnnnntnnnngnntnngnnncnntaaccnnaaannnnacccgannnnannnnanancaccnncacacaacatacacacacancancncncccacaccaccccacacacaccaccannannacacccacacnanacnncncnnccccccncnnnccanncaacncaacaccccccccnaaaaa

SEQ ID NO: 2842 - DNA, 403 bp, Glycine max
  Peptide Sequence Number=SeqID_6431
  Probeset Number=SeqID_12621
ctcatggcagagcgttcgaaggttcccaaatttggaaactgggaacacgaagaggatgttccttacacacgcttactttgaaaatgccaatagagctcgagctcccggcggcagtgtagtgaacccgaccgacccggaatattactcggattcacagtctcaagctcctcctcctcctcctccacctctttcaaaaaccaaacctgaggaagttgaaccgcttagaagatcgcgtgaaaggttgagaacccccgaagagagcgagttgaagcagattggtgatgctggtggttcatcaaaagaagctgataataaaagacaaggaagggcttctcaaaacaatggtaatgacaagtcaccgttgcataaaaattcatatgatggcattggaagatcaaagccc

SEQ ID NO: 2843 - DNA, 864 bp, Glycine max
  misc_feature (1)..(1): n is a, c, g, or t
  misc_feature (830)..(830): n is a, c, g, or t
  misc_feature (846)..(864): n is a, c, g, or t
  Peptide Sequence Number=SeqID_6432
  Probeset Number=SeqID_12622
nctagcccccttcggaggtgtgtttccccccctttttccccaaacccaggggataaatttttctcaaggccattaacgccctttgcttttgggtcaccaaggccgttttaaaggccccgtgtggccatttttttgcgattgtttccaaggccactcccccttttcggtttgttccggatatgaagcaaggggggtttcattttggttcctcaatttcctttggccttggtgccaagtttttttcttttcgccaaccccgggaactgcacggtgaagttattctcgaaaaattagcttttaaatttgggactggttgcctggagtttccatttggtgcttcccaagccggggaaccggcccttattaattgtggcctggtggcccccggttgaacttcgttcaccggggttaaactttttaaacgttgtggggctgaagttgttgaatttgcctttttccatggtgttcctgatttccaagggccattccggagtttttgaaaacccctttttgtttttggtgaaccccgttaagccgattaaattccagctccaaccgattaattgttctgagatttgaatgttgtttcattcttgacttaccttccaaaagggccctttgtttgaagaaccccggcccttatgttgtccctaagtttttggcttatggagaattttgtttcttgccacttccaaatttcctacccgggaaaatgttccccctttcattccttttataccttggaccaggtaaaccacctttatgtggcccaccattagaaccattccagcctttaggcgtggtgttaggggggagggcgaaggagaggnggggaggggaaggggnnnnnnnnnnnnnnnnnnn

SEQ ID NO: 2844 - DNA, 386 bp, Glycine max
  Peptide Sequence Number=SeqID_6433
  Probeset Number=SeqID_12623
tgattagttaacataggaaacatttacttcacaaacacgagcccatccgaagtgtaccaagcataccttgaccagtttagtccatatttcagatctggttctaaaatcacgcgcggaggaattattgcgtgggcaaaacatgcatcccaacattcccttctttccaagcccttagtggccacagggcttgccacaagcagcccaagatggcggacatacagttggtatcaccaccactgctattgccaccactgccagcttcgtcttcgtcactatcctattctgcggaagcagatcaaacccacatgaagcatattattcccccttctggctcccttcaattagggcgcggcattaacaaggttggtgtaaatttccatgtcaac

SEQ ID NO: 2845 - DNA, 1387 bp, Glycine max
  misc_feature (8)..(8): n is a, c, g, or t
  misc_feature (10)..(10): n is a, c, g, or t
  misc_feature (271)..(271): n is a, c, g, or t
  misc_feature (340)..(340): n is a, c, g, or t
  misc_feature (383)..(383): n is a, c, g, or t
  misc_feature (536)..(536): n is a, c, g, or t
  misc_feature (665)..(665): n is a, c, g, or t
  misc_feature (1361)..(1361): n is a, c, g, or t
  Peptide Sequence Number=SeqID_6434
  Probeset Number=SeqID_12624
atattacntnacgcgcggcggttgcagcgtcagagtcaaacgcgctgtataaccatagaattaaattgtagacgcacatacacggtcgcgcgagagaagagtatcgagaggttaacgtctatgttatctcaccgattcgcgtctgcgctagcagtcatagtacagcaatgatatcagaatttgtatactaatgatttgccgagcacgtgtgacgcagcgcacaatcaaaattacgcataacgatgacagtcatattagcaggcgcgaatgnttataacactcgcctctcgcgacacacaaattcatagcctactcaatgatgtcgcgcggtagatatatntacatcgatgacgcaacttcatccgttgtgtattctgtgtacntctcgtcggtacgtggatcacagatgagatcattatatcgcgagatcggacattcacgagggctgccgcgtcgtatatcatacatgtctgtctaattgccatgtccgcgcccgcacagtatgtactaatagccggtcgaatacgtcgccgcgngtgatatatctaccatcgactgcgcgacgatacgagcatgactgacgcaataagatatacttctgtcgcatacagtgtatcgaagtattattagtggcgcagcagagtgtatagtgatcgactacgcantattcgcctatctatcgaccgtacgacgaattaccgcgttctcgcggctcatggtatgccgtaacgcactatcacgcagctacataagaaacgccgaataatacgtatggcacgaacgctactcacaggtatcggattagacgcggcgatacttatgcgctaaatggtatcgtatacatcgacgcgctgcgggagtgggatgggaataagaatgatgagacgctgctcatataccaaagacgtatccacacacacgaccgagctatagattacgttggcgccgaaggcgagtagatgcgagtacactatccctaacttatagcagtgtgttcttaagcgtgaggtcacacatcggatagaaattcacatcgcgcacatggacatacatcgcggaggtctaaataatagaaggtccagatcgctaacaacgatataagcgcattctcacatacaaacagtagacatttagtctaagatgtggccgttgtttcacttacttcctcagaatatacaaatacatagcgccggagcggtgatggggtagggagggatataaccacataccccggtctcacgggtcggtaagatattggatctgttaagtattcgatatatacgtatatcacctctggacccttcaccccttcagaggattagagtcgggacggtcgccaacagcgaactattatatagcantaagtatatattggtgcgtgcgtaac

SEQ ID NO: 2846 - DNA, 633 bp, Glycine max
  misc_feature (576)..(576): n is a, c, g, or t
  misc_feature (601)..(633): n is a, c, g, or t
  Probeset Number=SeqID_12625
tttttctctctgcgtgccctagctttcaagaccgccgcttgtcactaaagaagacgaaaacatggtgcacgtttgctactaccgtaactatggaaaaaccttcaagggcccacgacgtcctttcgagaaggagcgtctcgactccgagctgaagctagtcggcgagtacggtctccgcaacaagcgtgagctctggagagtccagtactctcttagccgcatccgtaacgcggctagagatcttctgactctcgacgagaagaatcccaagaggatcttcgaaggtgaggcccttctccgtaagatgaaccgttacgggcttcttgatgagagccagaacaagctcgattacgtcttggcgttgaccgttgagaattttctcgagcgtcgtcttcagaccattgtgttcaagtctggtatggctaagtctatccatcactcccgtgtcctcatcaggcagaggcatatcagggttgggaagcagttggtgaacattccttcgttcatggtgagacttgactcgcagaagcatattgactttgcgttgaccagtcccttcggtggtggccgtccagnaagagtgaagagaaggaatgagaannnnnnnnnnnnnnnnnnnnnnnnnnnnnnnnn

SEQ ID NO: 2847 - DNA, 370 bp, Glycine max
  Peptide Sequence Number=SeqID_6435
  Probeset Number=SeqID_12626
tggtacaaaaaggtatgatgctcactcaggtggagaacgtgagattcaaaggaccatgttagagttgctgaaccagttagatggttttgattctagaggagatgtaaaagggattctggcaaccaacagaattgaaaggcttgatccagctttgctacggcctggtcgaatttacaggaagatagaattttttttttttgacaccaaaacagggagacgcacgcggcagatattcacatcgaggacgaggttagctgataatgccaacttggaagaattcgctaggactaaagaggagtccgaaggagctgatatagagggaatatgtaatgaaagcggtttaatcgatccacgaaaagccgaacgaagg

SEQ ID NO: 2848 - DNA, 1341 bp, Glycine max
  misc_feature (1)..(1): n is a, c, g, or t
  misc_feature (192)..(192): n is a, c, g, or t
  misc_feature (469)..(469): n is a, c, g, or t
  misc_feature (1133)..(1133): n is a, c, g, or t
  misc_feature (1137)..(1139): n is a, c, g, or t
  misc_feature (1154)..(1154): n is a, c, g, or t
  misc_feature (1242)..(1246): n is a, c, g, or t
  misc_feature (1283)..(1283): n is a, c, g, or t
  misc_feature (1312)..(1313): n is a, c, g, or t
  misc_feature (1315)..(1315): n is a, c, g, or t
  misc_feature (1318)..(1318): n is a, c, g, or t
  Peptide Sequence Number=SeqID_6436
  Probeset Number=SeqID_12627
ngagatggtgcgcttatacgatccctttaatagtgataatagctgttcaccgtgtaagcagagtatacatgatgtattagttagatatgtatcgtattataagagatagtagagtgtgtggtagttgtgatgaatatgagttctgtttttatgtttatattctacttttgcgtaccgagtcgtgagatgacncgggggtcgctgggttgtaggagtgttttaatttgaattgtatcattctcttgtctgacatatcatcagcgacgacaaactaccaccactcatcgccacattaatcatcgatgttaaatttcgtgtggtgcgtggatgtattggcgcggcgcgtcgtaagtgtgtcagacgtgtgcgtgacggacgctggctatgctacaccgagctggtagcatcatatgtgactgctcttatataatatctaataactattataaacacacttctcagctttcantttctgtgcccgcgcgtgtctgagcggatttctctttgtcgtgcggttattcgtgaatcggaatattcaatcctcatattcttaaggctgaccagcctgtgatgctgtagtgacgtattattacactataagcactcgtcgactcatgtatcggtaggagtattgtactatactcactatctgcaccgtcgttagtactcatatgatctatatctgcgtacgctcgttcttcactgatagctgtaagatgtacagcgaggcagtcgagacaggagggagaacagtgaagacgcgaaggcgcgcgatacgatgtcgtagacataacatactagataagcaagaggcgcacaagatccagacgaagagggtaataacacgccatagcgagtcgtcgttactcatacaatcaatcagtttgacattgtcttatatactattaagatattatatttcgttcttttttatagtctttactgttcattcgtgtagtgacgaatatgcgaggctggggcgaggggtcacgcatgagacgtgcgtatcgtgtgaggtggaatcgacacgcaaatggtcgtaaacgggagtaagtgggaccagcgacgcacagccggacggccggacgcgacatatggcgacgtatagctgtcgcagaagcatagtagatgtnaaannntttttatttttgttnttggtgttgaaagaggagtagaaagaaaaaattattagaaattgggagagaatggataatggatgagtttaaaaggatcagatataannnnngggtagagaggatacgagaggagaaaggagagggagngtgaggagagaataaagaaagaaagaagnnanttnataaaattgtattattatattat

SEQ ID NO: 2849 - DNA, 681 bp, Glycine max
  Probeset Number=SeqID_12628
ttcttcaaacaactatgtcgcctgccgctgttaaaccgactcaggctgattcagccaaaaagatcaagaaagatccagccaaaaatgtaatgcgtgatttgcatatccgcaagttgtgcttgaacatttgcgttggtgaatctggtgacagacttacacgagccgctaaggtgttggaacaattgactggacaacagccagttttctcaaaagcacgttacaccgttcgttcattcggtattcgtcgtaatgaaaaaattgccgttcactgcacggttcgcggtgctaaagccgaagaaatcttggaacgtggtcttaaggtccgtgaatacgaattgagacgcgacaacttctcagccagcggtaacttcggtttcggtatccaagaacacatcgatttgggcatcaaatacgatccatcaatcggtatctatggtttggacttctacgttgtattgggccgtccaggcttcaacgtagcccacaaacgcaagaagaccggcaaagttggattccaacaccgacttacaaaggaagatgctatgaaatggttccaacagaaatacgatggtatcatcttgaacagcaaggctaaataaattgcataaaatgaacatacaattttttttaaaacactgttaattttatggaataacaaccgcaaaattaaaaacaagatat

SEQ ID NO: 2850 - DNA, 789 bp, Glycine max
  misc_feature (789)..(789): n is a, c, g, or t
  Peptide Sequence Number=SeqID_6437
  Probeset Number=SeqID_12629
agttagctctatacacacaccttgaaaaccgccatggaactagccggtttaagcttcctcaagctctctttcctcctcagcctcctctccggcggttcagaccttctaaacccaatatccgaaccgagtcttctcgggaaattcccgccgacgtgtaacagaatcgagtgcccaaactacgaggtggttcacgcgggaaacgggtacgagattcgccggtacgatacaacggtctggatttccactgaaccgattcaagacatctctctcaaggatgccacaagaacagctttcttccagttgtttgcgtacatacaagggaagaacgagtatcatcagaaaattgagatgacagctccggtgatcagccaagtctcaccaagcgacggtcctctctgtgaatcttccttcactgtctccttctacgtccccaaaaagaaccagcctgatccagctccagctgagaatctccacatccagaaatggacccctaggcacgtggcggtgagacagttcagcggcttcgtctccgactataacgtcggagaagaagctgcagcgctgtctgctagcctcgaaggtacagcttgggccaatgccatagagaaaagcaaagaagacggtggtgttggggctgattcagcttacacggtggctcagtacaactcgccgttcgagttcattggtcgtgtcaatgagatttggttaccctttcaaatggatgattgattaagtgaaactctttttttttaattatgtaataaataaaaatcagacaagatgttgatn

SEQ ID NO: 2851 - DNA, 1515 bp, Glycine max
  misc_feature (1)..(1): n is a, c, g, or t
  misc_feature (144)..(144): n is a, c, g, or t
  misc_feature (148)..(148): n is a, c, g, or t
  misc_feature (164)..(164): n is a, c, g, or t
  misc_feature (175)..(175): n is a, c, g, or t
  misc_feature (428)..(428): n is a, c, g, or t
  misc_feature (468)..(468): n is a, c, g, or t
  misc_feature (615)..(615): n is a, c, g, or t
  misc_feature (686)..(686): n is a, c, g, or t
  misc_feature (803)..(803): n is a, c, g, or t
  misc_feature (914)..(914): n is a, c, g, or t
  misc_feature (1311)..(1311): n is a, c, g, or t
  misc_feature (1325)..(1325): n is a, c, g, or t
  misc_feature (1333)..(1334): n is a, c, g, or t
  misc_feature (1400)..(1400): n is a, c, g, or t
  misc_feature (1408)..(1408): n is a, c, g, or t
  misc_feature (1431)..(1432): n is a, c, g, or t
  misc_feature (1447)..(1448): n is a, c, g, or t
  misc_feature (1452)..(1453): n is a, c, g, or t
  misc_feature (1468)..(1470): n is a, c, g, or t
  misc_feature (1487)..(1487): n is a, c, g, or t
  misc_feature (1492)..(1492): n is a, c, g, or t
  misc_feature (1498)..(1499): n is a, c, g, or t
  Peptide Sequence Number=SeqID_6438
  Probeset Number=SeqID_12630
ngagcgacgaagaggcatcgcactacgcactactgcggattgctgcgcgctgtgagcgcgagtcgcgtgaggagcgttctacagtatgtgatacgtagtcgaattatcgcttctcattccggtatacactgtccgtttatattncatnctgcgttgctgacgtnattatatactngtagtttgtatattctccatttatctctctattatctttccgtcatattatacgcacggccgcagctgatactctcgagtcgagcgcatcgttaccacgcggcgcgtcgcagaactgcagtgcagtatcgtgagagtggcaattacgatctcttctgtatctatctactggcgcgatagacagatatgcaggattagagaggagagatatcggacgtacgcgcgcactgacatagagtggcgaggatcaggangcgctgtgctgtgcggtttgatgttgaggctgctcgtgcnctctcacatcacgcggtactcgacagacatcgagagtcactgtacgtgctctccgtccacgcacctttccgcgacgctcgtagccggtgtccgtcacatatcgagaatacgaagccacgatccgcagtcacaacgcagcagacgcangaaggagcggcgagatgaagagaggagagtgttgtatgtgagaggtattgtatctatacattttgttgatnttttgaggagtgaggatgttgtatgataatttatgtatgaagcgttgtgagttgtgctgttgatggcatgtaggtttgaagtgtatcatattcatgtctatgtattgctgaggcggnccatgtgttatcgttctctatttttcgtattattgatcatatactatctcatttcctcgatatatagtatttgctgccgtacaatttaaattgtagtctcacgttgtatcntagtattgtgcgtgcgcgatgcatataaagtggtaagcgtcggaacaggaatgttgaggcgaaatcaaccgaggcacttcgacgagatagcggggacagaggagcaagcaaatcactgcccacacaatacgaaagcacacgaccagatgcgcaagacaaatcaataacaaaacaaagttatagcaacgcatcaaacgacaccatcttactttcccttcacgtagccgtagtgtggtgcgtctcgtgtggtgttgtgtttgcgtggcgattgtctatcagattatgccaccgacttagtctgcagcctcacaacataagatagacgcgcactctctgtaccacgtgcccaatagcatatccttctatcacgctatctcttatatcaccggttaatttnttaagaaataaatnattaatcnnggaggggaagttgcggctgaccaggccgacgggggggtcacacaaatacagtaaataacaacgcanacatcatntctttttcacgtctgccgcgccnncatgtagggtttttnntttnnttttttatttttttnnnttattttttttgtgtgnttgtngtgggnntaaagttaaacaaaaa

SEQ ID NO: 2852 - DNA, 740 bp, Glycine max
  misc_feature (2)..(2): n is a, c, g, or t
  misc_feature (4)..(12): n is a, c, g, or t
  misc_feature (14)..(20): n is a, c, g, or t
  misc_feature (25)..(27): n is a, c, g, or t
  misc_feature (32)..(32): n is a, c, g, or t
  misc_feature (504)..(504): n is a, c, g, or t
  misc_feature (543)..(543): n is a, c, g, or t
  misc_feature (549)..(549): n is a, c, g, or t
  misc_feature (557)..(557): n is a, c, g, or t
  misc_feature (572)..(572): n is a, c, g, or t
  misc_feature (584)..(584): n is a, c, g, or t
  misc_feature (609)..(609): n is a, c, g, or t
  misc_feature (617)..(617): n is a, c, g, or t
  misc_feature (620)..(620): n is a, c, g, or t
  misc_feature (625)..(625): n is a, c, g, or t
  misc_feature (642)..(642): n is a, c, g, or t
  misc_feature (647)..(647): n is a, c, g, or t
  misc_feature (653)..(653): n is a, c, g, or t
  misc_feature (661)..(661): n is a, c, g, or t
  misc_feature (668)..(669): n is a, c, g, or t
  misc_feature (671)..(671): n is a, c, g, or t
  misc_feature (673)..(673): n is a, c, g, or t
  misc_feature (679)..(679): n is a, c, g, or t
  misc_feature (687)..(687): n is a, c, g, or t
  misc_feature (696)..(696): n is a, c, g, or t
  misc_feature (701)..(702): n is a, c, g, or t
  misc_feature (706)..(707): n is a, c, g, or t
  misc_feature (714)..(714): n is a, c, g, or t
  misc_feature (719)..(719): n is a, c, g, or t
  misc_feature (724)..(724): n is a, c, g, or t
  misc_feature (726)..(726): n is a, c, g, or t
  misc_feature (731)..(731): n is a, c, g, or t
  misc_feature (734)..(734): n is a, c, g, or t
  misc_feature (736)..(736): n is a, c, g, or t
  misc_feature (739)..(740): n is a, c, g, or t
  Probeset Number=SeqID_12631
gngnnnnnnnnngnnnnnnnagggnnnttaancgaattgggtaccgggccccccctcgagactttggttgaatccaaccaagggaaaataatcaattctttgtccagggatggagtgtcatcaggttatgattggggatataatagcagcctgccgattgttaagactttgaatgcagccaatcatattaaagagacgctgctgcctggtacggttaatacttcctttaacttcccaattggaggaagtactactacttatggagggcagtatgcatttaaccaaacccaggctggacctattactttgacaatgccatcgctgccaagtggcgctaatgtaactgttagttatactctcaccggaccttccggtcaaagcggttacctgtgtaattccggttccggtggcacgagttgcggaacaactccttctactatcacatataataatatgccaaccgggcaatatacgctgaactacacggtaagcacctctttcagnagttttacatttaattactctctctctttcacctatcanggatgnccatagtnatggcatggcagcanagcatactttgncgaatattttgaagaaatctttcgnttatcacnganctgtnatctggcaatatatatntaacngtaacnatcttgtntttttcnngncnacagcnggattcanattcacggnggatnntttnngggaaanggttntaccncncactnggngnatnn

SEQ ID NO: 2853 - DNA, 639 bp, Glycine max
  misc_feature (601)..(639): n is a, c, g, or t
  Peptide Sequence Number=SeqID_6439
  Probeset Number=SeqID_12632
tacggctgcgagaagacgacagaaggggaataacaataaaacccactatttaggtataaaagaaggagagttagtgcacctccgtagggtttggttattagggttttcgctccccggtgcgcagtcgagcccccagaagacgaagcgaaaatgccgtcgcacaagacattcagaatcaagaagaagttggctgaagaagatgaggcagaacaggcccatcccctactggatccgcatgaggaccgagcacaccatccaggtacaacgcgaggcgccgccactgccgtcgcaccaagcttgcattctgaggcgtatgctctgcctaggtccaatttatcccattaaccactgccctattcccttgaggccaaaacaatgcctcgcactttttcctacctcccacttgcctcgaagactataccgcgcaaggaacctattgtagttcatacccatgctgttcgcccactccctcttacagtattttcgcgaccccttgcccataacaataaaccctaggccccctacccccccggtcgctccacacctagtgggacccccgggctgccggaattccacatccacgctttattgataccgctcnnnnnnnnnnnnnnnnnnnnnnnnnnnnnnnnnnnnnnn

SEQ ID NO: 2854 - DNA, 1433 bp, Glycine max
  misc_feature (106)..(106): n is a, c, g, or t
  misc_feature (220)..(220): n is a, c, g, or t
  misc_feature (505)..(505): n is a, c, g, or t
  misc_feature (615)..(615): n is a, c, g, or t
  misc_feature (824)..(824): n is a, c, g, or t
  misc_feature (973)..(973): n is a, c, g, or t
  misc_feature (1303)..(1303): n is a, c, g, or t
  misc_feature (1305)..(1305): n is a, c, g, or t
  misc_feature (1313)..(1313): n is a, c, g, or t
  misc_feature (1320)..(1321): n is a, c, g, or t
  misc_feature (1328)..(1328): n is a, c, g, or t
  misc_feature (1407)..(1407): n is a, c, g, or t
  Peptide Sequence Number=SeqID_6440
  Probeset Number=SeqID_12633
ctcgctctgatcgcagcgctctcatgctcttcggattgatataggttgagacatccgtgtgtctcgtcttcgtcgcatgcagtcgtgtagtgggtgtgtatctatnatgttagatcgcggtggatctctcatactcttgtgtactgttgttatctctctgccagttatctatcgcgttcgtgagcgtctatgtgttatctagttattcgtacgttcatantaggcgtagtgtcgtgtaggatcgtatatgttatctatatacatctatatagcgcgcacgtatcttactcatcctcctcactccgtgtcgaagtcgttgtccatacaagggattgcttgtttatagatgtgtgagtgtgcagatgcgcagtattaccactacatttggtacggcacttcacttatctctgctctctcacactgtctatatgtgtggtgagtgtgtttatcgtgcaattctgtgttctaagataagagtggacggtgtgctgtagataggtggtgnttggtctcttcaacttgtatctaatacgtcatatacattgtatctattacattaggtttctatccagcagatgataggtaactctacttcaccttcttgtgtcgtttctncgtctaggcgagctgctgctttccatctctctctatcttactatgatattgtatatgttctgctcttgtctcatacttgcgcggcatagcattgtgtatttctatcttgtgatgtatatcgggtgtgatctcctcatcttttatttatccgtacgcgatctgtgtagtcactacttttcgtaccgcgtcacgcatcttttctaaagatngtgtcgtcgacttcactgcaatcttcgtggttctatcttccatctcgcgcacccatcacccccacataccatcactcgcgcagaacaagtatccgtgttattatcttatagtgtccgacagtgacggactgatctacacaattacctanctatccctacagccacctgcccgcacccagggatagcgcatgcgccgcgacgtacgcattattttcgctgtcggtgatgtgtcgtggcagcgattggatcgattactgagctaacatatctctcgcacaactcctcacttctaataaaactcattcgcttcatactatctcaaccccacacacacacaccactctaacaacataaatgcatccattagagtgactttattataatatataataataaattctttacgctacgatgctacatacaaacaaatctcttacaaccatctcagattatagccacccacagccaacgtcttcttnantgcgcctnaatattnntttggcnggggggggatctccctctacctctctcttcgcgctccactctcctttttctctttccgctcctctccccgcctcgcccncgagaggcatagaacacagcccaaac

SEQ ID NO: 2855 - DNA, 1545 bp, Glycine max
  misc_feature (922)..(922): n is a, c, g, or t
  misc_feature (1091)..(1091): n is a, c, g, or t
  misc_feature (1162)..(1162): n is a, c, g, or t
  misc_feature (1216)..(1216): n is a, c, g, or t
  misc_feature (1361)..(1361): n is a, c, g, or t
  misc_feature (1436)..(1436): n is a, c, g, or t
  misc_feature (1446)..(1446): n is a, c, g, or t
  misc_feature (1514)..(1514): n is a, c, g, or t
  Probeset Number=SeqID_12634
gccccctcttgcgcccgcatttcttatcagacgagccgggagcaggaagggcggtagcaaaaggggtgtcggcgccccccccctcgcaggcccactaggacaatcaacagagctctcttctccctatatacttcagcaatatgcttaatagcaatactcgacataaacagatccatatctcggttgcatttatgaatgtctctgtccacatgctattgaattattgtctatgatggcctagaatagccacagcgaaattcaagagcccgacgcccgcgtcgcgtggaggctacgagcgttattgcgcgacgctgtggatctatattcaatacaccactcgccaccggaagcttactcacagtaaatatgacgtaagaggaacccccaggacgaagcaaaagtagtaacaactcagtagctacctagagtttctcactttggctcaccctgtgaccgtataagatgtattactcccccactaactccctgcactggctctcacccccagtaactccacccagccccagcctcccgatattctctcaggcatgggctgtaaggtgtggcagacactcgcgcactgtcttcttaccgcccctatattatattatgggaactaaggaccggacatcgacgcctggacgctacgttactactcttcgcttgtcagaactgcatctgttgagcatcattgccccacacatcatgaacgaatctctagttagttgtgtcattccgaccctatcatgatacaattatcccctttataagatataagatagagtaacacctgactcacattgaatccgatccacaccccaccgagatgaaagctgctgaacgcggctctcacctaccttgtattatctcggaaatatagagtaaattattcacacacgcatctgaacggcgcactacaacngacggccacgttagctctgctatataactccgccacattgcaagtatctatcccctactgcgtattggcaggtcgacgtgtctgtatgtgccacagatcacagacaccacgtatgtgtgagaggtatatgagatagatacgcaggtctactcgtgcgcgcgtggcattntactgcgtcgtcacgagctacacgactagcggtcagagacaccatacattcatgaagtactgtatagtacnctggacttcacacatatgctgcgaactgtgctgtatcagaactacgactcatancacgatgcgccacaccacagcgtacacgcctctagggtgcggctcactgagcaaccggtctgatctactccgtgatcgatagtggacgtcgcacacaccgcactcctatcatagttgtacaggactcgatcagcgatagatgtgnagagcatcgtgatatacgactatactgcggtaatggatggtgctctcgatcgcgccgatgagtgacagatagttngatacatacncacactcctctcatacttaattcatgtctatctccatcctgtacgctacatactaatataatcttatntacgtgcaccctctctgctctgcttgtgcta

SEQ ID NO: 2856 - DNA, 345 bp, Glycine max
  Peptide Sequence Number=SeqID_6441
  Probeset Number=SeqID_12635
ttttcccagagaaaagcactctggttcttgacgcactaggcaacattggtcaagtgtatttgcttagtatacttggtattgagctttacatgcgcactattcgtcgaatgtggtagaaaggccataggaagtccactgtgtggattctatgtgcttatgggttagggcaagcctcttcttaggcttttagagccactgagtccaaaggtgatgaccctgtttccatgcgtgtaatcatgggtctgcactgtcaaacagtgcattccctgtccttgcgaggatccatagatgaggacaaactcctcttcaccgatgttggtagaaaagcaatgtctgctgcaggtc

SEQ ID NO: 2857 - DNA, 750 bp, Glycine max
  misc_feature (1)..(39): n is a, c, g, or t
  Peptide Sequence Number=SeqID_6442
  Probeset Number=SeqID_12636
nnnnnnnnnnnnnnnnnnnnnnnnnnnnnnnnnnnnnnncgtagagcatcttaatcgaaaaagatggggcttgtggagtgaagtaatccatgtcgtgcaaactggcctcttttctcttgtagaatcatctaatctctcctgaaactcgcgaagcttctctctcgaagcctaaatcagaaatcgatggcgtccttcgctcgccgagcaatgagcctagctcagattccatctgcacgtgtgcccgcctctgtttgtcagcgtcgcggtctcgccggcgccgctgatcaccatggatctaccaaggttgacttctggaaacagcccacgaatccaggaaactggaaagaggagcatttcgtgcttatttcgctctctggctggggattgctcttctacagtggatacaaactcttcaccggcggtaaaggtgacgacgagaagcctgcgcaatgaatttatcactgggaaaagacaaagagagctctccttctcgtgctggtcttgtatcaaacaaagccagcaaaattacttctttgacagtctttgtttgctttcttttaaaataatatatatatatatacatgctgctatgatgcatcaaacacttttgagatccttcctaatcatgtctccaattgatgatgattcgtagctgttttgcgtttcataattgaaacatatcaagattttagcattgtgatatgctttggatcataaaaaaaaaaaaaaaagctaatccaaacggcccac

SEQ ID NO: 2858 - DNA, 1477 bp, Glycine max
  misc_feature (1)..(10): n is a, c, g, or t
  misc_feature (15)..(29): n is a, c, g, or t
  misc_feature (34)..(38): n is a, c, g, or t
  misc_feature (50)..(50): n is a, c, g, or t
  misc_feature (55)..(55): n is a, c, g, or t
  misc_feature (198)..(199): n is a, c, g, or t
  misc_feature (510)..(510): n is a, c, g, or t
  misc_feature (590)..(591): n is a, c, g, or t
  misc_feature (767)..(767): n is a, c, g, or t
  misc_feature (868)..(868): n is a, c, g, or t
  misc_feature (870)..(870): n is a, c, g, or t
  misc_feature (900)..(900): n is a, c, g, or t
  misc_feature (1056)..(1056): n is a, c, g, or t
  misc_feature (1104)..(1104): n is a, c, g, or t
  misc_feature (1182)..(1182): n is a, c, g, or t
  misc_feature (1246)..(1246): n is a, c, g, or t
  misc_feature (1254)..(1254): n is a, c, g, or t
  misc_feature (1258)..(1258): n is a, c, g, or t
  misc_feature (1291)..(1291): n is a, c, g, or t
  misc_feature (1339)..(1339): n is a, c, g, or t
  misc_feature (1365)..(1365): n is a, c, g, or t
  misc_feature (1408)..(1408): n is a, c, g, or t
  misc_feature (1418)..(1418): n is a, c, g, or t
  misc_feature (1423)..(1423): n is a, c, g, or t
  misc_feature (1477)..(1477): n is a, c, g, or t
  Peptide Sequence Number=SeqID_6443
  Probeset Number=SeqID_12637
nnnnnnnnnnccccnnnnnnnnnnnnnnnccccnnnnnaaaccgacaccnaaccnctgaatggctcgagaaagttggatagaggcggggcggccctccccgcggcgggggcggggtcgcgatcctgagaggtgaggtgggcatcccccccggggggctggcagggaggtggacttctttagttttggatctcagtgtnnacttgaggacagatcaagccctaggagaagccctccatagtccctcaagtgctgtaggataaagtctgtattgagcctggttcctttgcgccagggccgtctgtacttgagtgaggtgtagacatgtaactagggtttaagagaagagagagaggggctcagacctgagatatatagcgtatactgcagttcttcgcgagataagagtattgctgcacctcttcagcactagcgctaagagattaggtgacggtgagacgcgatattatataagtagaggctcgtgggtgcagcggagtagtatgggtggntgtgttcggcagggtgtgctcagtgctgactcggcgcagagctccgcccatccatggattccccacagctgtgcaacggnnccctaccccgctgcaccacatccataagacgatgtagagacagagagtttgctcgtgtgtcttgtcttgtctgttgtcagtgtttttgcttgtgtagaggatggtgcgtgttcgccgctgtccttatctcttgtgccggctgtgcggcggccctggcgctagtggtgatgcgagcnttggagtaaatacagaggcggcacaatgtgcctgtgtctcggtgcggtggggtgtgatgagagatgtcacgatacgctgcttgtgaggcggcccgccagtntnctcgtctactctatgccgatggagtcgctngctgcacagcgtagttattgtaggtgtagtgtatgttatatactatgcatcggtacaaggctcatccaccgtagatcttccgtgcagtcctcggcccgcgtgctctcgccttccgcagcagccaagacaggttacacgtgtcttagcgctggatanctatctggactgcggggcgtcgttgagtcgtatcatgtccaccacagnataaggatacgtccagtcttcgtgcggatatgtcgagccgctgtgtgaatagtcgatactcctctgcgtctgcggttntggagtgtgtggtgatgtgttgatctcgcagttgtggcgacaggatcagactagctcggatctntgctcctntctnccccccttctctatcgcgagcgggacgtctagntaggacatgattgttgtcttgtggatcgtagggatgatgatgcgtggntgaagggtgacgcgcgcgccggctcngagattgtgtcgagcgcgaagactagcactcagtacagcaganaccactacgntaganagatgccctccacacgtcatattggacgcgagcccacgcgcacagcgctatcgn

SEQ ID NO: 2859 - DNA, 668 bp, Glycine max
  misc_feature (639)..(639): n is a, c, g, or t
  misc_feature (641)..(641): n is a, c, g, or t
  misc_feature (643)..(643): n is a, c, g, or t
  misc_feature (668)..(668): n is a, c, g, or t
  Probeset Number=SeqID_12638
caccccaatgaaaaaggggtgatctataccggcagcgatgatggggttgtttctcttaccagagatggcggcaaaacatggaaaaatataacacctgccgggttagcagaatgtttgatcaatgctattgaagtatctccctttgataacgctaccgcttatattgctactacacgttataaattcaacgaccataaaccggggttatataaaacaacggattacggaaaaagctggacaaaaatagataacggtattccgaataatgcgtttacacgtgtggtacgtgaagatgcagttgtgaaagatttattgtttgcaggtactgaattaggcctctatatttcttggaatggaggtaaaaattggagcccttttcaactcaacctacccattacgccgatcaccgatcttaaaattcatcaggataatttaatagcggcaacatcaggtcgtgctttttggattttagatgatttgggtttgatacgccaatacaaaaaagatacgagcttcaaagtatttcaacccgccaataattatattaccaatagctactccgaattagatgcatctaacagttcctttaccggagctaatcgttttcgtggcgtaaatgcaccatcaggaattgtttgntntnatcaactacctgcaacaaaagaaan

SEQ ID NO: 2860 - DNA, 1558 bp, Glycine max
  misc_feature (1)..(1): n is a, c, g, or t
  misc_feature (114)..(114): n is a, c, g, or t
  misc_feature (1306)..(1306): n is a, c, g, or t
  misc_feature (1355)..(1355): n is a, c, g, or t
  misc_feature (1381)..(1381): n is a, c, g, or t
  misc_feature (1421)..(1421): n is a, c, g, or t
  misc_feature (1423)..(1423): n is a, c, g, or t
  misc_feature (1522)..(1522): n is a, c, g, or t
  misc_feature (1527)..(1527): n is a, c, g, or t
  misc_feature (1530)..(1532): n is a, c, g, or t
  misc_feature (1535)..(1535): n is a, c, g, or t
  misc_feature (1538)..(1542): n is a, c, g, or t
  Peptide Sequence Number=SeqID_6444
  Probeset Number=SeqID_12639
nctgggaggtagacgtgtgctggcgttgggcgaggcggcgacgccgtcgaggtgagcgcggaatgaggcgtgaacacatgacagcatgatgtgcatcagagagtgattccacgncatgttcgcggagtcttgatcggtactggtcgacgataatctgatgagggcgtggcgatagagcatcgacatgacggtatgcgccgcggtatgcctgatgttttgaggtagtatttgtggagatgtcgagggtatggtggatcgcggtatgtgtcgctgactatagtattgatgagagtatctaaatagatagaggccgcgctcgcacaaaaacacgatgcgccgaggaaatagaatgcgggtgagctgcctctactgtcatcatattcgtacgtacactatcagcgaatgcgcagctaatgtattcagttgtcgcgcactctggcgcagcagtcgcactctctccattgggctcgaagcatgtgtgatgacgctgagacagttggacagtatgtatgctgcgagatacgctcgtactcagtataacgtaatagaaatgaatcagtgagtgtgagactgcgttcaaacactcggtgccggttagttgtgcgaatatagaacgggtctcgtgctgcagccggagtagtatggtgcgcagtggcgcgtcgtggtgggtactctttggtgcgatcgcgtagagatggtggcgcgcatatcacagactctcatatacacagtcgatgccacagggatcatgcgtgcgcgtagcggggggcgggctgcgagataagaacatggtcagagagggcgcaacatcaatatccctgggagtccactgttcgcgcatgagtataactgtcgtaatacattatctcattctcaatatacagatgtacgatataaggcatcttgagcggataacaatggagtggatacgtaggaggccagattgcgggtagtcgcgaagcaggaagtgaccacgcactgggctggagacaagcgcgcgacgcaccggtgcgcggcgacgatatcgcgctccggcgtgcagcagagcgtcgcgcgtgatggcgtggcggaggggtcgtaaagcataagagcagatttattgttaatactggagtgctagtggtctttttaagttgtattcttgcgtgtcttgtgtggtattgcagtgtatcgctcgcaccgtcacgtcaggatgtgataggaggtctgtttctctcttcatccacacgtgacatgcgctgccacattcgaccacacacagacgtggcgcgtcaggcacgcgccgaccttatatatctgaatggtncgagacacataggagacgacatagcgagacaatagttgcagaatattgnaaacaaactgttgcatatctcgattnttatatgtttcatccccgcacggtccatccaccaacttantngcgcgcgtgccgcgcgacacgcacgtgctatagcagtgtgcgcccacgcgaccgcgaggcgcatagagtgctatggtgacacgtcagtgtgtatgaaanaaaanagnnnaanaannnnnaaaaaaaaaatataac

SEQ ID NO: 2861 - DNA, 1017 bp, Glycine max
  misc_feature (1)..(17): n is a, c, g, or t
  misc_feature (1017)..(1017): n is a, c, g, or t
  Probeset Number=SeqID_12640
nnnnnnnnnnnnnnnnngcgtcttcatcaatttagtggcaatcactgatctttctgaacacaaagatcccttcaaaatttcaccatgtccggctaccccaaccagcctcccagctacggctacggctacggcgcgccgccgccgccccatccctacggcgctcctcagcccccgcaatcctacggcgcgccgccgcccgctcagccatactccgcagcgccctacgcccagccgtccgccccctacaataaacctccgaagaacgagtcccactcccacagcggcggaagcggcggtggctactcggcaccgccggctactgcgtacgcgagcccgttcgcctcgctggtgccgtcggcgttcccgccagggacagaccctaacgttgttgcgtgcttccagatggcggaccaggacggaagcgggttcatcgacgacaaggaaatgcagagagcgctttcttcgtataaccaaagcttcagtctcagaaccgttcatcttctcatgtatcacttcaccaactccaacgtcaagaagataggaccaaaggaatgcacatctctattttacagtcttcagaactggaggtccatttttgagagatttgacaaggacagaagcggcaaaatcgattatactgagttgagagatgctctactgagtctgggttatgctgtttctccagtggtattggatttgctcgtctccaagtttgacaaaactggtggaaaaagcaaggctatagaatatgactatttcatcgaggggtgccttactgttaagggactgactgacaatctcggagaggagctggctgccgggccatgctctgtcaccttgacctatgaatcgtttatgctgacagtcctgccattcctgatagctgaggagattaatggtgtgtgtgtggattggtaggcttagtaaatggctggctgcattgtgtatgacatgtgtggaggagatctatagtatgacacacatatgtagctagtactgactgatgtatgatatatn

SEQ ID NO: 2862 - DNA, 333 bp, Glycine max
  Peptide Sequence Number=SeqID_6445
  Probeset Number=SeqID_12641
taaatagccgggtttggagacatcgaaaacttcagtagcattagtagaatgaagaagtggtaaggagggagtagattgaggatcaaggaagcttagtaactaaaaaaaagcagtccgcaatagaaccccatctggaaaatttaggaagcattacataagtcaagccaacaactcagacgacaaccacccagaacaataagcccttctcttttgaaaagacgccgggaacctaacaagcctactgctacaatgggctactgcccaattctagtatacgacttctttgtcgctttatttgatggaaacaaagaagagcaagcgagtgtggctgtg

SEQ ID NO: 2863 - DNA, 559 bp, Glycine max
  Probeset Number=SeqID_12642
tcgattagctagctagctaccatgaaaagcaaggtctgcatctctcttgtaatcctcgcgctagctgtgctccctggcctgggcacgaaggcggccgcgctcgccggcggaacggctaccaccgaggacgcggcggcgtcgcagatgatggcgatatcgccatcatcgatgaagctagaagacggcgtgccgccagagcttgcggtggtggacttggaggtgcaccgccgcgtcctcacgggcacaaacatcagcccgaataacggcctgaatccctacaggccagtctgcaaccccgcgtgcacacccggaaagtcgtacaatttccaaggccggccgtgcgccaatatttacatgtgcgtcggtcacagataaatgggagggcattaggaatgcttcctccttcctgcccgtcgtcagtgcctggatgcacacgcgttccatcgatccatgttttatttccattttcattttgcaatttcttttagtgttgtcgttgtggtggaacccgttcaacagggtgcaagttctagacttggcactagtgtttgcatttttc

SEQ ID NO: 2864 - DNA, 1791 bp, Glycine max
  misc_feature (1)..(1): n is a, c, g, or t
  misc_feature (6)..(6): n is a, c, g, or t
  misc_feature (8)..(8): n is a, c, g, or t
  misc_feature (117)..(117): n is a, c, g, or t
  misc_feature (273)..(273): n is a, c, g, or t
  misc_feature (296)..(296): n is a, c, g, or t
  misc_feature (339)..(339): n is a, c, g, or t
  misc_feature (354)..(354): n is a, c, g, or t
  misc_feature (420)..(420): n is a, c, g, or t
  misc_feature (559)..(559): n is a, c, g, or t
  misc_feature (603)..(603): n is a, c, g, or t
  misc_feature (636)..(636): n is a, c, g, or t
  misc_feature (654)..(654): n is a, c, g, or t
  misc_feature (806)..(806): n is a, c, g, or t
  misc_feature (939)..(939): n is a, c, g, or t
  misc_feature (975)..(975): n is a, c, g, or t
  misc_feature (1019)..(1019): n is a, c, g, or t
  misc_feature (1163)..(1163): n is a, c, g, or t
  misc_feature (1183)..(1183): n is a, c, g, or t
  misc_feature (1212)..(1212): n is a, c, g, or t
  misc_feature (1228)..(1229): n is a, c, g, or t
  misc_feature (1231)..(1231): n is a, c, g, or t
  misc_feature (1279)..(1280): n is a, c, g, or t
  misc_feature (1511)..(1511): n is a, c, g, or t
  misc_feature (1513)..(1513): n is a, c, g, or t
  misc_feature (1518)..(1519): n is a, c, g, or t
  misc_feature (1527)..(1527): n is a, c, g, or t
  misc_feature (1533)..(1533): n is a, c, g, or t
  misc_feature (1536)..(1537): n is a, c, g, or t
  misc_feature (1539)..(1539): n is a, c, g, or t
  misc_feature (1560)..(1562): n is a, c, g, or t
  misc_feature (1564)..(1566): n is a, c, g, or t
  misc_feature (1582)..(1582): n is a, c, g, or t
  misc_feature (1586)..(1586): n is a, c, g, or t
  misc_feature (1593)..(1593): n is a, c, g, or t
  misc_feature (1615)..(1615): n is a, c, g, or t
  misc_feature (1625)..(1626): n is a, c, g, or t
  misc_feature (1692)..(1692): n is a, c, g, or t
  misc_feature (1697)..(1697): n is a, c, g, or t
  misc_feature (1748)..(1750): n is a, c, g, or t
  misc_feature (1754)..(1755): n is a, c, g, or t
  misc_feature (1757)..(1758): n is a, c, g, or t
  misc_feature (1775)..(1777): n is a, c, g, or t
  Peptide Sequence Number=SeqID_6446
  Probeset Number=SeqID_12643
nacagngnagcagaagatacgtagagagatagatggcgcatgacgagcgcgcgcgcagacgcgcggcgaggcgcgacataagagatacagcgcgcgatgctggtcactgcttgtagntctgcagcagtgacgattgaggtacgagagtcctcgtaatatcacgatcctgttctagcatcatcctctccgaagagagagtgacacgtatctatagacagaactgatatacatcactatgagttcatctattagttgatatcgtgtgatatatantgattgcaggtcaacgatgacangacgtagtcacggcgaccacgagctctccaggcgaataccgcncggagcgcacgcccntctctcctacataccgcgatcaccaattcttaacgtgagagcgcgcgacacgtggcgcgtggcggngtcgtgatgggagtgcggtggcggtatagcgcagcacattgttgcgagaagcgagagatgagtcgcagcgcgtgacagatgagagaagagtgcggcatgaatcggatcgatgcctcgcacacgagacggagtacaagcngatgtcgcaaagcgcggcagagaacaacacgcacggacggacanggaagtgacgaggtagtcggacgcatgtgatgnacagtgtttgtgctgcgngtcggtggtgtccaacagtgcattggagtggtgagggatatgttcttctagttgggtgtgtgctgtgtgggccgtctgatctcgtctctgatatcgctcatcagcctgcggtgtgtgggagaggatgatgcgaacacgcggagggtggatanaacaggaggagagtgacggagtgtgtagagcagattcactgcatcacgcccactcgatacgaatacatgtcctcctattaattttgccatcatatcactctcctcgtcgtcgatggcttgtctggcgagagtnaaatgactgtagtcgggtcatcgcgccggacatgtntgtcctcaccatagcgcgcgtggcgttgctatggatgtggcgcnttgcttagtgccatgcaggtgtatgtcatatcatagatagcctatagtgttagccgtgttcatgtatttgcatcatctattactgttcgcacagtactataacagttccgtcttattagagcgtgtcgtggctccgtgtagatnattgtctcgttgtttcgtgngcgtgtgtgttgtggccggtggtggagtnacgcgggatgcgtggnngnaggcgatggctgcacaggggtgtggcggaggccccgcccagcgggtcnnctaccacaagaccacgcgcgtggtcgaccgcgaccacaacacaacagtaagcacgcgatacaacaccagcacagaacgctatgagataagagagatccacacaatacgctcacagagcgcacagaggacggccgaacgacaagacgcatacagccagacgagagcttagagagtcgtagaggagaagcgagaagaaccagagatgcggaatggaagaagatagaggtgatngnaaggnnaagagagnaggganggnnanatatcttgtgcccggcgccgnnngnnngcgtcgagaagggtanatangacacanacataccacaaggaaccagcgnggcaaaggcnnccacgacaaccccaagcaaggcgaacacaggcaagggggggagaaagagagcccgccacgaaacanaagcncgcagaacacacaaaacaaccacacacacaagaacaaacgaaacacacaannnaaanncnnagaagaggaggggccannnaaaaacaccaaaac

SEQ ID NO: 2865 - DNA, 481 bp, Glycine max
  misc_feature (350)..(350): n is a, c, g, or t
  misc_feature (355)..(355): n is a, c, g, or t
  misc_feature (423)..(423): n is a, c, g, or t
  Probeset Number=SeqID_12644
acgagacagaacacagtgcagacagcaagtgatgacgtcgaaacagacatacagcgtgtgcttctgctggcggcggcggttcaagctggcgctggcggaagcgccgtcggaaatcaagaccctattcaatgagtactccaagaataagctcataacaccttcgcatcttaaaaaattcctgatcgatgtgcagaagcaagagaaagccactgaaaaagacacgcaagccatcatcaatggcttcgaacatttccatcacagagacgctggcctcaatctcgaaactttcttcaagtacctcttgagtgacaataatcctcctcttgttccttctcatagggggcaccatngtatnagtgtagccttatcacattatttcatatatactagccataagtcctatgtgaagtgggatgagctcancgactactacgggtgcggtcggctcataaatgcactgaagaaaggtgtgccgatgatg

SEQ ID NO: 2866 - DNA, 2106 bp, Glycine max
  misc_feature (16)..(17): n is a, c, g, or t
  misc_feature (22)..(22): n is a, c, g, or t
  misc_feature (34)..(34): n is a, c, g, or t
  misc_feature (36)..(37): n is a, c, g, or t
  misc_feature (94)..(95): n is a, c, g, or t
  misc_feature (154)..(154): n is a, c, g, or t
  misc_feature (220)..(220): n is a, c, g, or t
  misc_feature (287)..(287): n is a, c, g, or t
  misc_feature (327)..(327): n is a, c, g, or t
  misc_feature (342)..(342): n is a, c, g, or t
  misc_feature (403)..(403): n is a, c, g, or t
  misc_feature (427)..(427): n is a, c, g, or t
  misc_feature (590)..(590): n is a, c, g, or t
  misc_feature (614)..(614): n is a, c, g, or t
  misc_feature (645)..(645): n is a, c, g, or t
  misc_feature (666)..(666): n is a, c, g, or t
  misc_feature (790)..(790): n is a, c, g, or t
  misc_feature (826)..(826): n is a, c, g, or t
  misc_feature (920)..(920): n is a, c, g, or t
  misc_feature (945)..(945): n is a, c, g, or t
  misc_feature (985)..(985): n is a, c, g, or t
  misc_feature (1045)..(1045): n is a, c, g, or t
  misc_feature (1130)..(1130): n is a, c, g, or t
  misc_feature (1223)..(1223): n is a, c, g, or t
  misc_feature (1267)..(1267): n is a, c, g, or t
  misc_feature (1275)..(1275): n is a, c, g, or t
  misc_feature (1281)..(1281): n is a, c, g, or t
  misc_feature (1372)..(1372): n is a, c, g, or t
  misc_feature (1403)..(1403): n is a, c, g, or t
  misc_feature (1414)..(1414): n is a, c, g, or t
  misc_feature (1453)..(1453): n is a, c, g, or t
  misc_feature (1463)..(1463): n is a, c, g, or t
  misc_feature (1469)..(1469): n is a, c, g, or t
  misc_feature (1544)..(1544): n is a, c, g, or t
  misc_feature (1560)..(1560): n is a, c, g, or t
  misc_feature (1583)..(1583): n is a, c, g, or t
  misc_feature (1651)..(1651): n is a, c, g, or t
  misc_feature (1653)..(1653): n is a, c, g, or t
  misc_feature (1658)..(1658): n is a, c, g, or t
  misc_feature (1668)..(1668): n is a, c, g, or t
  misc_feature (1702)..(1702): n is a, c, g, or t
  misc_feature (1740)..(1740): n is a, c, g, or t
  misc_feature (1758)..(1758): n is a, c, g, or t
  misc_feature (1769)..(1769): n is a, c, g, or t
  misc_feature (1808)..(1808): n is a, c, g, or t
  misc_feature (1810)..(1810): n is a, c, g, or t
  misc_feature (1826)..(1826): n is a, c, g, or t
  misc_feature (1846)..(1846): n is a, c, g, or t
  misc_feature (1890)..(1890): n is a, c, g, or t
  misc_feature (1898)..(1898): n is a, c, g, or t
  misc_feature (1907)..(1907): n is a, c, g, or t
  misc_feature (1913)..(1913): n is a, c, g, or t
  misc_feature (1919)..(1919): n is a, c, g, or t
  misc_feature (1930)..(1930): n is a, c, g, or t
  misc_feature (1935)..(1935): n is a, c, g, or t
  misc_feature (1951)..(1951): n is a, c, g, or t
  misc_feature (1964)..(1964): n is a, c, g, or t
  misc_feature (1972)..(1972): n is a, c, g, or t
  misc_feature (1975)..(1975): n is a, c, g, or t
  misc_feature (1996)..(1996): n is a, c, g, or t
  misc_feature (2027)..(2027): n is a, c, g, or t
  misc_feature (2097)..(2097): n is a, c, g, or t
  misc_feature (2106)..(2106): n is a, c, g, or t
  Peptide Sequence Number=SeqID_6447
  Probeset Number=SeqID_12645
tttttttttttgtttnnttgtntttgttttttgngnnttgtgttcgtcggtggtccgtgtttctgtgtgcgccatctccgcgcgggcgaggccnnttctatagaatggaggaatcacacgaggctcctcatcccctcatctacaaggcgacaanagcgagctaaatccaatataataagtgtataaccttctagtagcacactctcaaactgtaagcggngcggagagggtaatcaattgtttctttattaccagagaataagatatcataacgctgattgcacacnacggacgccgctgaacatcacacataccctattacctacntgaaatatcaatgtntctcagcgcatgagttctgataatccactatatctgcgtgaaatctacactaggcagctcnatgtctttcgttcgcatgtttggnggcctcttgagatagcccatgcgtgtcatagccgggataatatattacataggagaagaagaacgaacaacagagaacaataagacatataggtacaaagcacacaacactcacaactacgcactagagtataacacatagcagcgctaaagataccagtaanacatgtgactatcatattgattcnactaatatatgatatgacataaacactaatnataagtaatatgtccctgatntatttcatgcagatgtattagttgcaaagatatagtagaactagatatatatagagtctataatgtatctgcttcactcatctagtcctacgcatcctatcaatcctagaacttatatgctgtntagcgctccgtctacacattgacgagaactgcgaangcatatcgtattacgcgaagacgctacgtgcgacgccaacaatcgcatacgctgatgctctcagcccaccgacaccgagtacgacttactatcntcatcactacaagcatatcgctccncataactcgcttgcgtgtacatctctctcccgatgatgcnatctcgctcactactcacactaaatcagcgcacgtactaaccacgtgataacgtacgcanctaatgtcatcacactcgaccaaatgcacactgctcctcatgtccgtgaaccttgtatatgatgagtgatgctagtaccgacgtngctactgtctctactagtatgtacgtatatgtacgtctacccgtagtgtacaaccgcttgatgacaatgagcgtacgaatatcgtcgcgtgcnatatctgcaccgctgagctcatctccatctcgtctatatgactntctatatnatgctnatctatttgctcgtgctgcacactgctgagttactcatattgtgatattactatattacgcgtgatatcgcagtacatcgagacgctgacnactgtatgcttcatactgctctctgcgcgtntaacgtcatgntctgcgaacgtgatcagctgctagtatgaagtaatcctncgcgcactgntgatgntgcactatgcagagaagatgctcgtcagcagcgtagctatgacagtcgtgaatatgtcgtcggcagagatccgantgtgtctgtcgcgtcntagtcatctgatctacgtgttantcaatattcattcacgctatgtcacgtatccgcactcagcatcttagcgtccacacgctcatatcctntncacancccgctgcgntgctactatacacgctcatctccactatgcatcncacgaaatacgtcacgcgtatatacgctgctgtgcccntgtcgttctgtgagcgtntctaaaattcnacatctgcactatactctatcccgtctgccgcgtatcgncnctgataccatcatganacgtactcaatgatctgtgnctggcatctcatgtcaccacgtcgtatcacaatcgatcgtccgnccacgatnagagcgtancatgtntccccngctacacgctngccgncaacatcgagctactncgctctgctgcgnaccattcntgntatcgcgtcatctgacgtgtnttcactgcactgcaggacggtgtgcagatgnctagcacctggatgacagaactacgatgatacatcgaaatgtactactaagtaatatgcagtacgtcacngcggcgcgn

SEQ ID NO: 2867 - DNA, 435 bp, Glycine max
  misc_feature (98)..(98): n is a, c, g, or t
  misc_feature (100)..(100): n is a, c, g, or t
  misc_feature (210)..(210): n is a, c, g, or t
  misc_feature (247)..(247): n is a, c, g, or t
  misc_feature (412)..(412): n is a, c, g, or t
  Probeset Number=SeqID_12646
gaaagatggcggacgacaaggttagagatgaagcgatgcagatcattggaatgtttcagatccttcccagacttgtcgttttcgacctcgattatacngnctggcctttctactgtgaatgtcgttctaaacgcgaaatgccgtctttgtacccacaagcaaagggtataatgagtggtctgaaagagaaaggaattcaaatggcgattncttccagatctcccacttcagatattgccaacacttngattgacaaattgaatatcaagtccttgttcgtcgccaaggaaatattttcgagctggagtcacaagacggagcattttcaaaagatacacacaaggacaggggtgccgtttactgacatgctcttcttcgatgatgaggacagaaacattaaatcagtttctanaatgggagtgacaagcatctggt

SEQ ID NO: 2868 - DNA, 1714 bp, Glycine max
  misc_feature (26)..(30): n is a, c, g, or t
  misc_feature (49)..(49): n is a, c, g, or t
  misc_feature (63)..(63): n is a, c, g, or t
  misc_feature (143)..(143): n is a, c, g, or t
  misc_feature (270)..(270): n is a, c, g, or t
  misc_feature (443)..(443): n is a, c, g, or t
  misc_feature (473)..(473): n is a, c, g, or t
  misc_feature (631)..(631): n is a, c, g, or t
  misc_feature (664)..(664): n is a, c, g, or t
  misc_feature (765)..(765): n is a, c, g, or t
  misc_feature (818)..(818): n is a, c, g, or t
  misc_feature (821)..(821): n is a, c, g, or t
  misc_feature (873)..(873): n is a, c, g, or t
  misc_feature (922)..(922): n is a, c, g, or t
  misc_feature (1040)..(1040): n is a, c, g, or t
  misc_feature (1042)..(1042): n is a, c, g, or t
  misc_feature (1050)..(1050): n is a, c, g, or t
  misc_feature (1086)..(1086): n is a, c, g, or t
  misc_feature (1089)..(1089): n is a, c, g, or t
  misc_feature (1095)..(1095): n is a, c, g, or t
  misc_feature (1101)..(1103): n is a, c, g, or t
  misc_feature (1108)..(1109): n is a, c, g, or t
  misc_feature (1188)..(1188): n is a, c, g, or t
  misc_feature (1190)..(1192): n is a, c, g, or t
  misc_feature (1204)..(1204): n is a, c, g, or t
  misc_feature (1246)..(1246): n is a, c, g, or t
  misc_feature (1308)..(1308): n is a, c, g, or t
  misc_feature (1318)..(1318): n is a, c, g, or t
  misc_feature (1332)..(1332): n is a, c, g, or t
  misc_feature (1439)..(1439): n is a, c, g, or t
  misc_feature (1443)..(1443): n is a, c, g, or t
  misc_feature (1454)..(1454): n is a, c, g, or t
  misc_feature (1531)..(1531): n is a, c, g, or t
  misc_feature (1589)..(1589): n is a, c, g, or t
  misc_feature (1598)..(1598): n is a, c, g, or t
  misc_feature (1601)..(1601): n is a, c, g, or t
  misc_feature (1606)..(1606): n is a, c, g, or t
  misc_feature (1629)..(1629): n is a, c, g, or t
  misc_feature (1631)..(1631): n is a, c, g, or t
  misc_feature (1652)..(1652): n is a, c, g, or t
  misc_feature (1656)..(1656): n is a, c, g, or t
  misc_feature (1707)..(1707): n is a, c, g, or t
  misc_feature (1711)..(1711): n is a, c, g, or t
  misc_feature (1714)..(1714): n is a, c, g, or t
  Peptide Sequence Number=SeqID_6456
  Probeset Number=SeqID_12647
cgcgcaggacactttctatatccggnnnnncgcctctatctctaaacancaaaccaaaagatncggactgccagtcggccttttaaagaagcctggcgacgacctccacccggacgcggtgcggcggcggccgagcattctcncggaccgttagttggattacgactcaacagagagggctcgacataagaaaatatagcggtgtatctgttgcttatatcgagagacagtctcacgagacgcaatagttgatgtaatgaaggacacaancagactagcatctacgtcgcttactggacgccgacgtgtctgcatttgtcgcatatcagtgaacgtgactggaccgtagatctcctattatcttctagatcatattcgctcgcgcaaatggtatcgaacaatataccaggcactttacagcatattaacgcgtatgtaggatntactcacttcacgcgctgataatattgagngtgtcctgtcttgttatgtccgtcgcgcgctgctactatacataatatcttatcgatcctctcttactgtaatctatattctgtagtgagaacacgcgacacggaacaacgcggactccgcatgacatcccaaccgcacattttacgcagatcacgcntgtgtgtcggtgttgtccgctatgttgccgctnctatgtttctaccactatatcatacttcgcgacgcgcctctatatattaatataatatatattatataggatggtacgctctcctactgttccacgcgctncaggcgcgtcgtgcactcgctctacgggactctatttcatttaggtgttctgngtngtcattcatcatacgagaactacataatatagactatcctcgcgatgatatncggtagattagaatattgtgagcagcagtatcatgagtctgacgacacnacaatcatctaatctagtatactcacacatcactccaagcgactcactactctgtcacatcatgacgacagcgacatattcaagatgacacgcgtggtactcatgagatacgtttgantnctcgatangaagtaagatgtgatcgcagacacgctatctactanacngctggntctgcnnncgccnncgatcaacagttatgacgcttcgactgactcactgagtatacgctcgatctctacgagctcatagaaggtgaacagcancnnncacacaagatancgcgactgtatactctcgtgtatatgtggaggcgcgtagatntaggacctctagtgcggtcgagctgtattcaccaccgtactgctcgtagcacgcgatgtcgncgaaatgagngaacaagacatacngatgccgcagtcgagcgtcgaggacgtatcgatcacgaattcgccgccgcgaaaactatgtacctgcccacgtatatgtagacatcggagtacgtgatagctaatgnaagnagcaaaaggcnctccgactagtcctacatctacttatatgtctctgtcgtatatctcgtgttatgtgtgagggtgagatgagcgagangtgcgacagatgcatgtgagcgtgcactgcgtacatcatttctatatcatgagatatnacatcggtnctntcgtnactggacgatctcaatgcacaantncatattgtcactgtagtaatntgangatgatgaagagtaccaggagagcatcgtacgagactatgatatgtgatcnccanatn

SEQ ID NO: 2869 - DNA, 497 bp, Glycine max
  Peptide Sequence Number=SeqID_6464
  Probeset Number=SeqID_12648
aaccatcgtaatcgaaaacaccctctacggagatcgggctcgtccacacactcccaccgctgccagccccccgaaccggagagcgaggccgacaccgccgccgcgatgagggccaaagggaagaagaagaggatgaggaggctcaagaggaagcgccgaaagatgaggcagcgatccaagtaggcgccttggaagcaggggaagcatcatcctgcatccaggctgccaggcaccgagggatgacggcatggtctagtgattcctggcgtgtttgctgcgatggctgtggaagctgttttacctgtgttctgtccaatttagctgtttaatgcttagtctggttatgttccaagactgagttttatgtaatgtgaggattatatgtgtttgtgactgaattttatgcagctattaattttgcagtactctgaaatatgtaattctcacctgcgtctcatcttttttgtgatgcgatgctgctcgaaaaaaaaaaaaaa

SEQ ID NO: 2870 - DNA, 1853 bp, Glycine max
  misc_feature (1)..(1): n is a, c, g, or t
  misc_feature (11)..(12): n is a, c, g, or t
  misc_feature (14)..(17): n is a, c, g, or t
  misc_feature (20)..(21): n is a, c, g, or t
  misc_feature (24)..(26): n is a, c, g, or t
  misc_feature (28)..(33): n is a, c, g, or t
  misc_feature (35)..(35): n is a, c, g, or t
  misc_feature (55)..(55): n is a, c, g, or t
  misc_feature (74)..(74): n is a, c, g, or t
  misc_feature (135)..(135): n is a, c, g, or t
  misc_feature (142)..(142): n is a, c, g, or t
  misc_feature (247)..(247): n is a, c, g, or t
  misc_feature (260)..(260): n is a, c, g, or t
  misc_feature (264)..(264): n is a, c, g, or t
  misc_feature (266)..(266): n is a, c, g, or t
  misc_feature (268)..(268): n is a, c, g, or t
  misc_feature (439)..(439): n is a, c, g, or t
  misc_feature (441)..(441): n is a, c, g, or t
  misc_feature (499)..(499): n is a, c, g, or t
  misc_feature (533)..(533): n is a, c, g, or t
  misc_feature (536)..(536): n is a, c, g, or t
  misc_feature (719)..(719): n is a, c, g, or t
  misc_feature (1034)..(1034): n is a, c, g, or t
  misc_feature (1096)..(1096): n is a, c, g, or t
  misc_feature (1293)..(1293): n is a, c, g, or t
  misc_feature (1414)..(1414): n is a, c, g, or t
  misc_feature (1502)..(1502): n is a, c, g, or t
  misc_feature (1515)..(1515): n is a, c, g, or t
  misc_feature (1523)..(1523): n is a, c, g, or t
  misc_feature (1738)..(1738): n is a, c, g, or t
  misc_feature (1829)..(1829): n is a, c, g, or t
  misc_feature (1839)..(1839): n is a, c, g, or t
  Probeset Number=SeqID_12649
ncctccctttnnannnnacnntcnnncnnnnnncncaccccctctatgtgtctantcatgcccactatcactcncactctttctctacttacacatacaagaaacttcagccctttaaaggctcaaccaacgctntccatgnccacaatatcccatatctacactcttgcttacatagacacgtgccaataactacgcttgtcatgataaaacattgtatgaatgtatatgctactcatcatgcatncggcatatactcntggncntnacaccatcttccatcacacgacgtcacacacgtctacaccagcgcagtcatactcatgatgtacagcatcagataatgtgtaggagtagactctctatccatactgattaagtcactagttcactacatcggaccaccaccaccatacacatatgatcatcactgccttcntntatctactcctgtctcaccccatcgacactcgatcatacgcgacaatcactacagaangatatagaccttagtgtcatctctactgctcttntgntgtagtagtttttgcttcacctctacatccatgcactattagctctcacgagtatctcttttttcaagcacgtatcatctataccacatatcttacgtagtacgtcctatcacctatcacctgtatcgtacatcctccacacacacacttaacctacttactctatcacatatcatagttcgnactctagctgacactcatccctctccaacatatgtgacatatacacacatatattctcactgtatatagctctcagcacatcctatttacaatattacacaatttctagaacaatgcaaccttcactcaccttctttatctcatatcatctcgttctatcttctatcatcgcacttactcctgcttctcacgtcgactctgttatctcttctcatcgatcaaactagctatcctatacatatggcaactccctctcgcaccgactcataccttgttactcatataccctaagagcatacaactacaactaatctnggattcattggcacgcacactacaaacatcctatcgttcgccactccctctccttggccacntacgctctctctctcatctaccagtcgactctatagttaattactcatcactatctctgttcgtatacataatacacgcaacaccctatttaatatatactaataaacatcacaatcactctcctctcgttacaatacctatagtgacttcacactcacatctcgtagtctatctctctcctcgacgtcacgcactntcttatcagcaacattgagacagccgtacgacgatgacacgcatacaaaatgcttcacttgagacacttgtgatgtgctaccaaccaagacacacacgccgcacaccacgtctactatcgnctaatagacacttacagcgcgactctctttgtctctaccgccacaccgtcatctctgccttctctcctactgtgttacacactcatanaaccacacaccanatcactgntactacgtctatgatatacaacgcacagatcactctcacctataatacatgcacaatgtatgtatctctcagacacatataaatatcgcgcagatgctctgtttgtcactcacacgctcactctctactgtcctcgtacatgacgctcgtgtctctctcttacatctcctgcagctcgtcttcactactgctctgctcatcgtcatatctcccanctctacgctccggctctcgtatatactatgatatctgtgtcgacgactctctccgcgcactctctattcatatttatacatctctcactantaacatcacnacagcacacacaac

SEQ ID NO: 2871 - DNA, 654 bp, Glycine max
  misc_feature (601)..(654): n is a, c, g, or t
  Peptide Sequence Number=SeqID_6465
  Probeset Number=SeqID_12650
acacatcaccctcattctctctccaaagaaagaacacatcacaatggagtacggaaggttaggaccctctgatcctggtggctcctcgcgcctcaaccctccgagatcttccgggaggaaaaacattgtgtttctgtcactctttgctgtcttattaatagccgcgtccgctgttactggagttgccgtccgctctcgcaccaaaaataccggaggggacgggactagtctcggcgagttcacacaggccaagtcacgcacgtgcagcaaagacaggggtggaggaggggggacattgaaatcatttactgggacttcccggggagtctcaagggaggatccggagaagggacctcgtcccacattttcctttcaaggaccacgcctggcggcactttctccaagggggcctctagtcctttccgccaaccattctcctacacccggcgttggattcccccggggcccgcgccgccctaccagcgagctggcctccaagctccctcggacgacctccgtcagaaggcgctccgcccgctccccccaacaaggagctccgtccggcggcgccggtcgcccgaagcataagcgctggttgaannnnnnnnnnnnnnnnnnnnnnnnnnnnnnnnnnnnnnnnnnnnnnnnnnnnnn

SEQ ID NO: 2872 - DNA, 432 bp, Glycine max
  misc_feature (426)..(426): n is a, c, g, or t
  Probeset Number=SeqID_12651
taactggaagaatccgatcacaacggtgttgatccatctcttgttcatcatccttgttgtctaccctgagctgatcttgccgactatctttctttacctttttcttatcggtgtatggtactaccgttggagaccgaggcatcctccgcacatggacacgcgtctctcacacgctgactcagctcacccggacgagcttgacgaggagtttgatactttccctacttcacgaccctctgatattgtcaggatgaggtatgataggttgaggagtatcgctgggaggattcagacggtggttggtgatcttgcgacgcaaggagagaggcttcagtctctgctgagctggcgtgatcctcgtgcgacggcgctgtttgtcttgttctgtttgattgctgcggttgttctctatgtgacgccgtttcnggttgt

SEQ ID NO: 2873 - DNA, 1383 bp, Glycine max
  misc_feature (1)..(1): n is a, c, g, or t
  misc_feature (91)..(91): n is a, c, g, or t
  misc_feature (150)..(150): n is a, c, g, or t
  misc_feature (174)..(174): n is a, c, g, or t
  misc_feature (216)..(216): n is a, c, g, or t
  misc_feature (222)..(222): n is a, c, g, or t
  misc_feature (301)..(301): n is a, c, g, or t
  misc_feature (618)..(618): n is a, c, g, or t
  misc_feature (1217)..(1217): n is a, c, g, or t
  misc_feature (1272)..(1273): n is a, c, g, or t
  misc_feature (1311)..(1311): n is a, c, g, or t
  Peptide Sequence Number=SeqID_6466
  Probeset Number=SeqID_12652
ngtactcgagaagtcgcggctcagtacggcgtccttctcgctctccgtcctcacgactccctaggcactcgggccgtgcgcggacgcgagngagaaaatacgcggtctatagggtcatttcacgataacgagtgtccgagaataccgttntatatgagtattactcgctcgtcntttctgtggaacaacgctaatagccacagtgagctgcggctnggcgangcctagtgcatgtggttcagcgtatgattgttgtgtgatatatatggcgacttcgcattcgatgagcatcattgcgagnctttgtgtcgatagtagagagagaccgtccatgcatcatgtcactccctgtatgtatcgcgacacggaggatgcgaacggtcgtacgaattgacagatgtatcggttgtggttgcctgtgcctatattgcgctactcactagacgtcatctcctcgtaataatgtgtagaacgctggccggagtacactgtcctagttcgcggtcagaggagggtggttagatacaatcacactcactcaatagacgccaattatatcggagtagtgtgtgtctttattatgtaaataaatgaagtgttgtagagggtagcggtcangcatatattgactacgtggtgcgccccgtactctcgccgtgttgtatgagtggccggcatcacttagtcggtgtcgccactcctacacactaatccgttaggggtagtgaggagatttctgatatgtaaaaaagtagtatatatgctttaattaacactgctatacctcaggcacagataaatgagatcgccttctcatacatatcatatcgactgcgtcacgcgcgtgaggaaaatggagagaccttcacctacgttaggtctccctttttctcgtgcttttctctcacttctcatctatttctcttgttctaatatgtaatcgcatgcacgttctacgaacctaagagataagttatttaatagccggctctagttgggtgctatattctccttctccgcacgtgttgggtgtgtgctcatctagtactatttccaaatctttcctgtttgttactaaagtgtgggtggggtggctggtttactaatcacttctattatcatcctcctgtatgatgaggacagtgtcgcgtcaccctcccggggacaatgagaacaaaaaagaagggggaggcctcgtagcgactgaccgtcgggancttattaagggtgggcgcctcccgtatcccctcttcttgcgcgcctggcgtcatnngggggggggtctaaaaataagcacgatatcttgctatnaatataatgtcgttgtgttttgagtatttgtgatttattgtatagccccgttctttttacattcataaaaat

SEQ ID NO: 2874 - DNA, 669 bp, Glycine max
  misc_feature (1)..(25): n is a, c, g, or t
  misc_feature (652)..(669): n is a, c, g, or t
  Probeset Number=SeqID_12653
nnnnnnnnnnnnnnnnnnnnnnnnncgagacccccaaggccagcacgttcgaccgcactgatgtgaacaaacacgtcgttgctgccatcgtccggctggatgaatccgaagcccttctggccattgaaccactttacggtacctgtcgtcattttcttctccaaagcgcacaagcgcattccgcgcgacattcacgcggctgtttcaacttcgtcgatgtctttggaaaaggagcccgcgggcacgatcaacaaggcacagcggctaatcgaatagagcgaacatatacattgttcgccccttttacaaggaaggctgccagtttgttttcagcccggcgatccagacgccggccgggagcagttccggatctgatctgccgggtcgggccagggcccttatcgattgacttggccggttgacttggccggttgacttgatcggttgacttggccgcgcgggggtggtcacctcgctgccactgagccgcgcatctccgtgacgggcaaatctgctcgttcgaaaccgacgaagacatccgcggttgctcccattctcccattcgcaacgagttccctgcgcaattggctgcttgcagggtcgtcccatttcgcagcccagcgaggagtttcgatgcaggttatggtccgcnnnnnnnnnnnnnnnnnn

SEQ ID NO: 2875 - DNA, 1154 bp, Glycine max
  Peptide Sequence Number=SeqID_6467
  Probeset Number=SeqID_12654
agcaaaaagctattttgatatgaaattattataaatgttactgggttttataaaatcatatcatttttatacaggttatgaattttattatgaacctaatctaagaagtttctgtatgcaggaaggagttccattatgcatcctaactcctacttcctatacatagccataccatactttccactacagacatatgtaggttatgagactacacatatgcaatagtacggtattacttcttatgaactagatatgaacctgtgatttgtgtcttctctcctgtcttggttgttcttgtgtgctgttctcctgggatctccgcgtgttcagtatggaaaatatatatagaaagatatagattatatatccattatatatcatcataaagacatataaactacttggacaagcttagctagttgtatgtagctattgtacaaagtagcctacgcctagggaaacaaacaccctgatctaccatcattaaatccattaaatcgtctagcctgcttaaatggtacaagcttaaattgctctgaaaatctgactaccggtaggtacttagttattaaatttggaaatctgctcgagttggattgtgaatctgccataatggtagagctgccaatctcaagtgacccgactgtgatcaactctcaagctttccattaaatatcttcactacgtctctgtaaatagcttctcttaaatctgatacgtagccttcttaagcatctttaaatcgcattaaatcttcaaagcatcttatccttaaaatggatctatttggcgcctttttaaatcctttaaaagtgggcaaaatccgctagtgtctccaaaaaccgacaaaagttgttatcttcaaaaaagtacttgcatgtatccccgaaaaaacttgagcgtcaaaattttagttgcatcattggggtcttttcacaagcagtagcggcgcattctaatcctgaactgaaaaatcatcgtgcgtttgcattaaattcatgctctaatcattttaaattggagtcttcttacttaaatcattaagtagtctcttggccttaagcaacgccaagcgttgtgtatgtgactgattgagtcattcttgtaaaatatctcaaactcttgaagttgactgtttgattaatttctaatta

SEQ ID NO: 2876 - DNA, 1427 bp, Glycine max
  misc_feature (1)..(1): n is a, c, g, or t
  misc_feature (35)..(35): n is a, c, g, or t
  misc_feature (80)..(80): n is a, c, g, or t
  misc_feature (128)..(128): n is a, c, g, or t
  misc_feature (153)..(153): n is a, c, g, or t
  misc_feature (220)..(220): n is a, c, g, or t
  misc_feature (353)..(353): n is a, c, g, or t
  misc_feature (360)..(360): n is a, c, g, or t
  misc_feature (639)..(639): n is a, c, g, or t
  misc_feature (1149)..(1149): n is a, c, g, or t
  misc_feature (1355)..(1355): n is a, c, g, or t
  Probeset Number=SeqID_12655
nccgcagctcggtacgtgagagaacagagtagtgncgagagcgcacgcgtacgatagcgctgatctatcatatggcttcnactactataacactacgtgtctgtagtgagaagcgccatatgacatanatcgagcgccagacgaccgccgcgnccacataccgtcgtgatccacgtcgtccctactaccgacggcgcgcgcgatgttgtgcggcgaggcncgtcgctgagaatgagacatgcaccatctatgacgtgcatcaagatacacactagtacctcagacgtgctaagatcagacgcacaaataacatacgagatatagaatataagatagcgagacggatctatacnggttcantggtctgcagaattcgcagtggcgctcaccatgtgcgatacacagatgatgctgacatctctaacatatatgatattcagatcgaatgtcggaagcatgagatattgcttagtggcaggactgtgaggatgggcgcgtacagcgctcgttttcccaagatgcgaacgcgacacgatggctgagagtgttttctaaagtccgaagtgaggagaagtgttgcgtgttaggtagtggagatcatggacacatacgacacatacatactgtgacgcatatagnaaatagagtgactagacgaatcgtcgcagactataatcacgagagtagtgcatataggggagtgacgttatgagcgtaagcgaagacacagtgcggcgtaattgaactacggtaatcgaggtacaagccgagacagagagggcacagagcgactagatgacatacgctcgacctcaaatcatcacgcgttgtgacgagctcaggcgagctaagtggacgtggtgagcacaacataccgtccgtgcacgcgcgcatcgctcagtatattggcctcatctacgcgcactgcgcctctacaacacatatcgcctccacatttctagtttcgggcgtcgtggagctcacagaatgcagacagtgtaaccgacggaatcgcgcagctactggcgtcctagtctcacttctcaactccgtaaccacactctctcgtctggtgagtccattctcatcttccacaccatttagggctgagcagctttttgcgcatcatggagacagacatacggacanttgcgtgaccgtatactgtgacggatggcacagtcctcgccacgctatcacgtaagatgcagatgatcgcgcacccgcggctggggtgcgttgttggtaggtcgaacccacaagaaataacacaaaaggggcggtggctggcgcgcaaacacactcgctgactctaccgccgcggggcggcgcgacggtctggcgcagaatgagtntgtatatagacggtggcgtgatggcgtgtagcgaagcggtgaggcgggagggtgaggagggagggggggaca

SEQ ID NO: 2877 - DNA, 1411 bp, Glycine max
  misc_feature (11)..(11): n is a, c, g, or t
  misc_feature (89)..(89): n is a, c, g, or t
  misc_feature (101)..(101): n is a, c, g, or t
  misc_feature (201)..(201): n is a, c, g, or t
  misc_feature (270)..(270): n is a, c, g, or t
  misc_feature (293)..(293): n is a, c, g, or t
  misc_feature (298)..(298): n is a, c, g, or t
  misc_feature (327)..(327): n is a, c, g, or t
  misc_feature (344)..(344): n is a, c, g, or t
  misc_feature (675)..(675): n is a, c, g, or t
  misc_feature (942)..(942): n is a, c, g, or t
  misc_feature (954)..(954): n is a, c, g, or t
  misc_feature (1115)..(1115): n is a, c, g, or t
  misc_feature (1124)..(1124): n is a, c, g, or t
  misc_feature (1153)..(1153): n is a, c, g, or t
  misc_feature (1184)..(1184): n is a, c, g, or t
  misc_feature (1380)..(1380): n is a, c, g, or t
  misc_feature (1388)..(1391): n is a, c, g, or t
  Peptide Sequence Number=SeqID_6468
  Probeset Number=SeqID_12656
cacgacatcancgctctctgcctctagcgccgcgtacgcagacgtatcacatactgcggcgacgcagacgcaggatcctgcacacgttncgagatcgacgngagcagatgacgtcgatatccagagagtgccgcgcgctacgcgagatcaatcaatatgcgcaccaacacgacgcgcgcgacgcgcacgccggtactcgancgagtgtgttgatatatcgcgataccgctgcgagagagcgcgcgagtcgagatagatgtcgatcgatanccagtgagaccgcctgatgttcnttgantctccgcgcaggcagcgtgctcgtgtacncatgcgcgcgtgcgagnaaacgagcggcgcgcgacacgccagtcgcgatgcgaagcaacgtgtagtagaactcaacacacatacgcgagactgtcgacgatacgaacgatgtcgtaacgagatatgtgctgtagtaacaggattagaataatataagtaatacaatgacagagagatacgttgccacgcactcgctcgtgtttctagactattgagataaagcacgagtatgcgacacacagacaagggtgtgcggtgcctatactccaacgatatgacaatgagcacgcgggctcatgcgtgtatgcgtgcgctaatctcacacactcgttataataagcgaataantactaccgcgcacacgactacacaatatatgtactatctattatatcacagcgtaaatctgtcgacgtcagtcatgatcttgaggtgtggagcgtcatatatctactgacgcgttagctatatatctttatatgcgtaacatcgcgacagcaagtcgcacagcccgcacgcaggcacagcgagactaaaacgagagagaagatcgaactaaaatatcatagtacaacataatctcgataatcacaggaacgctcctgtgcgattganctgcgtcgttgnagtaagtgcgcacgcgtgccgcagcgcgggggcgccgggcgcgcgagcggatacaacgcgcgaagcaactatcttgctcttcagcccgtgtcaccgcactgggcgcgcggcctctcatgcgcgtatctaccatatctccgcctcacttactacacgcgtcngtgctgtcntctccgcgtgtgatgcggcgacgcgcccnaactccgctggagtaaatgacatgtgagagncaagaaacagtgtcatcatgatataagagaagatagatcaggtagagaaatactacgcacgcagtccgcacacaaacacactcccgaccctacctaacaagatcggcacgaacagcacaaacccactaccacactctaccgacagactaggcgaagaggagcagcaggaggagcacgcgacggaacgaggcgcganacacagannnncgcgagaggcggggaacaac

SEQ ID NO: 2878 - DNA, 991 bp, Glycine max
  misc_feature (1)..(275): n is a, c, g, or t
  misc_feature (876)..(991): n is a, c, g, or t
  Probeset Number=SeqID_12657
nnnnnnnnnnnnnnnnnnnnnnnnnnnnnnnnnnnnnnnnnnnnnnnnnnnnnnnnnnnnnnnnnnnnnnnnnnnnnnnnnnnnnnnnnnnnnnnnnnnnnnnnnnnnnnnnnnnnnnnnnnnnnnnnnnnnnnnnnnnnnnnnnnnnnnnnnnnnnnnnnnnnnnnnnnnnnnnnnnnnnnnnnnnnnnnnnnnnnnnnnnnnnnnnnnnnnnnnnnnnnnnnnnnnnnnnnnnnnnnnnnnnnnnnnnnnnnnnnnnnnnnnnnnnnnnnnnngtgataaaaagggttagaaaagggttaggttagctgtcgccgtgatcaggcgattgttaaattaagggggggcagaaccaaatagggaaaagataaaagaggttttaaagagtaatgcggggggtaattttctgcgttaccatgcattcaagtaagagttttagtgtaataacagatagttttctcatctagaagacttgggggggcagtatgtactccttgaactaattggtcatgaaaggaggaccctgattgaagctgggtgggcaattatgtacttctggaactgcaatgatatttggagctactttaattaatctccaaaaaagataattagtagaatattgcaatgttttcacttattcagctctgtccctaagcatcagctttgctactcaaaagtcatgaaacaaagaaacgtcatcagagtatgaaacttcaattccgaagctaacatatagcattcggggtgctatatgcatgctcctagattgtgcgtcaaaatgaagtggatttcaaaacttcaaacaacaatgataaagtaaattacattcttttcagtgttaaattagctcacaaggttagctctacctcgagctgnnnnnnnnnnnnnnnnnnnnnnnnnnnnnnnnnnnnnnnnnnnnnnnnnnnnnnnnnnnnnnnnnnnnnnnnnnnnnnnnnnnnnnnnnnnnnnnnnnnnnnnnnnnnnnnnnnnn

SEQ ID NO: 2879 - DNA, 1481 bp, Glycine max
  Peptide Sequence Number=SeqID_6469
  Probeset Number=SeqID_12658
aattactagttctttctggctctgccgctgtctgtttgcgaacgccattacgttatacttgcatctaaacagcatttcacaggtgacgatactgattgagaggtagaaatgcctggtttcagcagtgtaggaaccttcaagatatttgtcgggaacttggcagaaaaaacagtatctgctgatattagacccttattcgagaaatatggaaaagttatcgaatgtgatgtggttaaggattttggatttgtgcatatggaaaatgaagagtcaggcagagacgccattcaaaatctaaatggttatctggtccatggatcagcaatgaaagtggaagctgccaccagtaggaaggggccgaacacacccacaacgaaaattttcgtgggcaacctctcagataacacaagagcacctcaagttcgctcactctttactaaatacggcacagttgtggaatgtgacattgtcagaaactatggatttgtgcacattgattgtccagacgtaaacaaaatggtagaggaactgaatggtcaagtggttgatggacagccaatgaaagtacaaatatcaacaagcaaagttcgccaaaggcctggaatgggcaatccagaacaatgctacagaatgggcccagatcgtttccgtggaagaatgggctttggaagagacccttacccacccccaccaccacccccattcctgagagacaggatgcttagtggaggatttggcggaaaggacagttactacgaccgctattatgacaggccagctgcacgatttgatgaccgggactcatttgataggaggttgccccctcttcctccacgagacttaggaccacgcagagattttatgcctccccctcccatcccaccccgtgagccactccctccccttggtcttaggggcccaccctcctccctgagagactcctttgaacgttccatgtatagccgtcggtcaccaccaccgccttctgccagatatggccgcctctatgatgactattccagggactcatatgatgatcgcagaattggcctgcgaggggcgtcaccgcgccggttcacgccgtattaattactcgctcgggtaatgattggtgagcgagcggtaacggagcggtacgtatcaacagccgacgaccgttccatatgttgacgattacatcttattttatttaagaacctttattgatgtcacactgttggtgactgtcatcacgccatttaatttgtttactatagataatatgtataatgtagttgacgtacattaagtcaaatccgtgcggcttacaatgcattaaaagtcgtgctcggataactgttgtgtgttttgtatgagtcatgttttatatatgtagtaaccgagcaaatgttttgctttctgtcttattawrgaaatmrwmtccaammwraaamaaaaamawgcttwtckataccgtckacctcgaggggggagcccggtac

SEQ ID NO: 2880 - DNA, 434 bp, Glycine max
  Peptide Sequence Number=SeqID_6470
  Probeset Number=SeqID_12659
aaattctgatttggtttgacaacgaacttacaggctgtgcgttaacaaagcgagctaaatgcaccaaggcgactagttgtcttcatcccggaactccccttcatccctcccgcgtctcgattccccagcctgagcaaaccctccccacagcccgcgccatgggcggcgagatgcccggcaccgacggcaagggccaccccgccccggcctccgcctccgcctccggattcccgccgtcggcgccgccttatcatcagcagcagcaccaccagtacggcaccttcggggccccgtccgcgtccggcgagttcccgcagccggcggtcgggttcccccagcctgctccgccgcttgggttccagaactacccgccgccgcgtccgccgccgtcctacgcggtataccctcctctgcaggcttattcggccgccgcg

SEQ ID NO: 2881 - DNA, 1659 bp, Glycine max
  misc_feature (66)..(66): n is a, c, g, or t
  misc_feature (115)..(115): n is a, c, g, or t
  misc_feature (140)..(140): n is a, c, g, or t
  misc_feature (196)..(196): n is a, c, g, or t
  misc_feature (230)..(230): n is a, c, g, or t
  misc_feature (274)..(274): n is a, c, g, or t
  misc_feature (282)..(282): n is a, c, g, or t
  misc_feature (300)..(300): n is a, c, g, or t
  misc_feature (305)..(305): n is a, c, g, or t
  misc_feature (468)..(468): n is a, c, g, or t
  misc_feature (487)..(487): n is a, c, g, or t
  misc_feature (657)..(657): n is a, c, g, or t
  misc_feature (701)..(701): n is a, c, g, or t
  misc_feature (1333)..(1333): n is a, c, g, or t
  misc_feature (1422)..(1422): n is a, c, g, or t
  misc_feature (1643)..(1644): n is a, c, g, or t
  misc_feature (1650)..(1650): n is a, c, g, or t
  Peptide Sequence Number=SeqID_6471
  Probeset Number=SeqID_12660
atatgatgtgggaagtgatgctagagcgctttagtaatgtataggaagattagcgtattcacggcngcgactgcgctgactagtagcagtacagtgtagactgtatggtatagantttagtatagtgtagtgaatgcatnatgagcatgcagtggataggcattctcgaatgagatcgatcgtctgctgtcgtgcncgcatatcatatagctcctagctagcgatgatgntcatcacgtcagtgggatacgacgtcgcttagagctgcgaaatncacgcggngcgatgacagtggatgcnatagngagagcatggtgcgtcgagagactcatacatcgatggattataatatgattaatgctgagatgaatattatgtattatatgtacagaggctccgtagatgcacagttatcgtgaggtgagagctagatgtcagatggcagtatgcacgacgatgtgcgtagcngtgtctcagtacgataganataatatacctgggtaggtgtactctctgtaggatctacaagcatgcgagtagatcagacgtcacgctctcagctagtacgtcatattcgaaatcgtgtgtgtgagacgtggtaagcgtgttgggtcgggctaagagtgtcgtctcgagagcgatccagacgtaatgcanatggatacttcagacatgatatattttatataaaataccagtgntcgcaatcgcatccgagccgatatcagaagctggcacgtgtctgttatcttaactgcgcgtagccggacgtggttgatgtgagagtaatgacacgcacgatctagtatctaagtagtatatgatacgatggtgttggatgtataagatcagcgggacagtatccacggttgctcgagatgtgttctggtttctatagtaaacatacattatatacacggaaatttcatctgtgtgttttgtatcgttactatatgtcaacagcgctacgtgaggtctggccgccgtaatctatatttcctttcctgtagcgtctgtcggctgttcctactattatcttgtgcgttcctggttctgcgttcgcgtccatcgctctgcatactggctatgaggtaatgacaagagagtgattcggtgtggtggtctcgtgtcaaaccatatacatcgcatcctactcagtccgcctaataaataatcagacgcagggcgacgatgtgtctgatagaacgtgagtcagtgaagctattgttcgttagagagtgtttgtgggtccaagcgctcgcatttgtactgtcgaggcgagatgccatcgtggataggtaactgaggtacgacgatcaccagtacgacggantacgtgtggtatatctgttattgttgaatgatgtcagtgtcttagtgagctatgtacactacgataatcgtcatcaaataacatcttangctcgtggtgtctccgtgttgtgtgtcgtcttgtcttaagtcgattatcccatacaatccttgtacacggtactaatacgtaggatgaggtgctgtggtgaatttataacataatatattgtcttatgatagttcactctaaaaccattgcattgcttgtgggggtaggtttgtgttgatagtgacatacgtccgctctctcgcgtcactatgctacggannatgagnagtactagt

SEQ ID NO: 2882 - DNA, 2146 bp, Glycine max
  misc_feature (1)..(1): n is a, c, g, or t
  misc_feature (21)..(21): n is a, c, g, or t
  misc_feature (26)..(27): n is a, c, g, or t
  misc_feature (31)..(31): n is a, c, g, or t
  misc_feature (33)..(33): n is a, c, g, or t
  misc_feature (45)..(45): n is a, c, g, or t
  misc_feature (56)..(56): n is a, c, g, or t
  misc_feature (60)..(60): n is a, c, g, or t
  misc_feature (62)..(62): n is a, c, g, or t
  misc_feature (64)..(65): n is a, c, g, or t
  misc_feature (87)..(87): n is a, c, g, or t
  misc_feature (89)..(91): n is a, c, g, or t
  misc_feature (107)..(107): n is a, c, g, or t
  misc_feature (131)..(131): n is a, c, g, or t
  misc_feature (221)..(221): n is a, c, g, or t
  misc_feature (299)..(299): n is a, c, g, or t
  misc_feature (303)..(303): n is a, c, g, or t
  misc_feature (351)..(351): n is a, c, g, or t
  misc_feature (459)..(459): n is a, c, g, or t
  misc_feature (813)..(813): n is a, c, g, or t
  misc_feature (879)..(879): n is a, c, g, or t
  misc_feature (966)..(966): n is a, c, g, or t
  misc_feature (989)..(989): n is a, c, g, or t
  misc_feature (1017)..(1017): n is a, c, g, or t
  misc_feature (1086)..(1086): n is a, c, g, or t
  misc_feature (1115)..(1115): n is a, c, g, or t
  misc_feature (1118)..(1118): n is a, c, g, or t
  misc_feature (1152)..(1152): n is a, c, g, or t
  misc_feature (1156)..(1156): n is a, c, g, or t
  misc_feature (1214)..(1214): n is a, c, g, or t
  misc_feature (1218)..(1218): n is a, c, g, or t
  misc_feature (1252)..(1252): n is a, c, g, or t
  misc_feature (1266)..(1266): n is a, c, g, or t
  misc_feature (1297)..(1297): n is a, c, g, or t
  misc_feature (1311)..(1311): n is a, c, g, or t
  misc_feature (1345)..(1345): n is a, c, g, or t
  misc_feature (1350)..(1350): n is a, c, g, or t
  misc_feature (1352)..(1352): n is a, c, g, or t
  misc_feature (1413)..(1413): n is a, c, g, or t
  misc_feature (1421)..(1421): n is a, c, g, or t
  misc_feature (1439)..(1439): n is a, c, g, or t
  misc_feature (1453)..(1453): n is a, c, g, or t
  misc_feature (1480)..(1480): n is a, c, g, or t
  misc_feature (1504)..(1504): n is a, c, g, or t
  misc_feature (1544)..(1544): n is a, c, g, or t
  misc_feature (1569)..(1569): n is a, c, g, or t
  misc_feature (1571)..(1571): n is a, c, g, or t
  misc_feature (1592)..(1592): n is a, c, g, or t
  misc_feature (1596)..(1596): n is a, c, g, or t
  misc_feature (1609)..(1609): n is a, c, g, or t
  misc_feature (1612)..(1612): n is a, c, g, or t
  misc_feature (1629)..(1629): n is a, c, g, or t
  misc_feature (1654)..(1654): n is a, c, g, or t
  misc_feature (1684)..(1684): n is a, c, g, or t
  misc_feature (1710)..(1710): n is a, c, g, or t
  misc_feature (1733)..(1733): n is a, c, g, or t
  misc_feature (1735)..(1735): n is a, c, g, or t
  misc_feature (1751)..(1751): n is a, c, g, or t
  misc_feature (1754)..(1754): n is a, c, g, or t
  misc_feature (1768)..(1768): n is a, c, g, or t
  misc_feature (1770)..(1770): n is a, c, g, or t
  misc_feature (1773)..(1773): n is a, c, g, or t
  misc_feature (1830)..(1830): n is a, c, g, or t
  misc_feature (1832)..(1832): n is a, c, g, or t
  misc_feature (1855)..(1855): n is a, c, g, or t
  misc_feature (1863)..(1863): n is a, c, g, or t
  misc_feature (1872)..(1873): n is a, c, g, or t
  misc_feature (1875)..(1875): n is a, c, g, or t
  misc_feature (1899)..(1899): n is a, c, g, or t
  misc_feature (1927)..(1927): n is a, c, g, or t
  misc_feature (1937)..(1937): n is a, c, g, or t
  misc_feature (1940)..(1940): n is a, c, g, or t
  misc_feature (1952)..(1952): n is a, c, g, or t
  misc_feature (1974)..(1974): n is a, c, g, or t
  misc_feature (1981)..(1981): n is a, c, g, or t
  misc_feature (2013)..(2013): n is a, c, g, or t
  misc_feature (2025)..(2025): n is a, c, g, or t
  misc_feature (2039)..(2039): n is a, c, g, or t
  misc_feature (2044)..(2044): n is a, c, g, or t
  misc_feature (2062)..(2062): n is a, c, g, or t
  misc_feature (2097)..(2097): n is a, c, g, or t
  misc_feature (2101)..(2101): n is a, c, g, or t
  Probeset Number=SeqID_12661
nttttttttttcttttccctntcttnncccntntttcctctctcnctcttcatttntttntntnntatacttatctatctttatgtntnnnctttatttatcacctntatttccgtgtctcatttgtcggncgctacccaatactgcacaacctgcatacaatcgggtgcttaacacaacgtcgtaccttactgcgcacacgatcgctcgcccctctcggnactgcagactagctctctacggcatcaagtcacgcacaacaaaactaaacaccacgccagttatcacagcttgataangagnagtatgacgtgtcatcatcgtttcatatagtcatatggagctcaccgntcagactaaggatcgcacgtcgcgcacgctggcgagacgacaagagagacacgctctcgcatcaatagagacaaacatacaccatcaccacaatacagatgacctctncagcgcctctacgtgcgcctccgctcgtgaatgtatcattatacgcgacagcgctgcgcgtactgtcgtgtatttctctcgtctgcgcctcactaatctactcaccttctcgctgctttgcgcttgcgtgcgtcgtctacgtcgccctctcgtacttatcatgacgagtgccatgccactgacgactaatcgtcgaagttatatcatatagataatatatcgcgcgtttgcatacatcacatatctcatactcattatatatattgtataatcatttttatagctataactcatataacgtatgctatatctcaactgctagcaatctatcataaggtcacgccgcgaacgtcnatatacactaccgttacgaatacgatctgaagatatatgatatgctatacgcgatcgcgcacacancgcacatatccctgcgtctcgatactcacatacacgtcgacactcgacgtatatcattcaccactcatagcgtgctcacgtcattanacttatcaacgtccagcgtatcnactcatgtgcgcacagcggagtgatcgntctcgcagtgccgtcctcgagacacgtctgcacaccactcacgcacatcgacaccgcgactacacactncgccatcgtcgctgctcaccgcacagcanctnacgtgacgttatatatctaacgatacgagacggngtgngcgctgacgcacaaatacgctcatacgcatcatcctctacatctcactcacacgctcncctnctacgcgtgcatctcgtacgcgccactcgtcgtntggtctcgcgtgtntctgctctctgcgtactgacacggcagctancgtctgccaactantaatcgtactcgcgtcacagtatacctcacatcnactcnancatatactatcactatgatacattgcatattgtatgtgatcactcgacgacgaacagcgtncaggcgtncgtatgatgctcactacntactctgcgcgacngacgatgcctgctcgtcgtgtcgagcngatgtcgaacgccaccacattacnacacacacaacgacgtcatcatcgatgcgaacactcatgngcgctaccatctcctacgactcgancntcatcaactcgccatcactgntagntgacatatcgtanctngactatagtatacatgntctagactacatcatgtactgacgnactgctgcacgtcgcacatggacgatatanagtacgcgagacgatctacgagtcgntttacgtactgacgcgtcgcatngnctattataaacagacngantcagaccgacgacncnacntcgtccatcatctcacatatcatgactactacaccgtatcgtatgacgcagcgactngnatactcgcaacgtcgcttactcntgtactcngatcatacnncngtacatcacggagtcactgcctantgtcgtagtcaactacgatcacagctgntcgtccatancgncgtgacaagctnactaagcgacgtgatgcgactnatgccantatacgtgaatacatatgctgagactgcacgnatgctcgacgangcgggatgctcagnatganatcagacccgtccactgnagtgagctataagctcctctactagcatcagactnaccntgctgcagatactcgcatgatatgactcgtgcgactcacgcgtcg

SEQ ID NO: 2883 - DNA, 625 bp, Glycine max
  Peptide Sequence Number=SeqID_6472
  Probeset Number=SeqID_12662
acattaaaaaaaagaactctctccctcacatggctcttcccttaaaccgcgttagatcgtcgtctatcttcacgttcactgtttcattcgtcttcatcttcgccggaaaatcattctcccaaggcttacgaccttccgatcatggcctacagtatcagtccagctcaccaccgactgaatctcactcacctcccggtatagtgatgtccttcttcggagattcccattctcctcctcctcagctcctcccaaaagcttcggaggcagacggcgacgatgactcgtggtggcgtgacgacggagccgcgaacagacatggtcatgtgatgaggcacgtgtttcttgcggcgagtatcatctgtggcgtttccggtgttgcgctgcttgtggttttcactttggtttacttctttaggtttcgcaaaaaatatccatcgaacttaccgtgtaacgatttaaggtagaaaattcgattttgatgtttttgaaatatgatttttttacacgaatttttttttatttttatttttaaaaaatataaagagcactttgctttattctgaagagttttatgttttgttgcacacccacatattctccattttttaaaaaaatatatatttct

SEQ ID NO: 2884 - DNA, 403 bp, Glycine max
  misc_feature (403)..(403): n is a, c, g, or t
  Peptide Sequence Number=SeqID_6473
  Probeset Number=SeqID_12663
aaaagtggcgtagggaattacttggcgtggcgaaagaaagatgtcgaagtaaggtggtgcctgcaaagtgcagagagtcgaagcacaagtgtactgtaaccgtagacgatgtgaaccaacctctctcttcactgattaccacgtggaactttcaaacgcttcctcataattcacgaactacacccatgaatgaaagaaacatcattgaacaacaacattaacatcaacaaacaaaactcatcttcctctttcatctctctctctctctcaaccccttttaagttttcttctcagaccctctctctcagattcttcaattttgtttactttttttttttccatccacttctttctttaaaaccaccttcataacaaaaattagagaaaccttccaggagttgtn

SEQ ID NO: 2885 - DNA, 444 bp, Glycine max
  misc_feature (53)..(53): n is a, c, g, or t
  misc_feature (145)..(145): n is a, c, g, or t
  misc_feature (429)..(429): n is a, c, g, or t
  misc_feature (431)..(431): n is a, c, g, or t
  Probeset Number=SeqID_12664
gatcgaggcagtgatcgccaggcacgaagccagcgcgagcgagcgcgtcgtcntggaggagagcaccgaggccgcggcgacggcgagcggcgtggcgcctggagccggaggcggggaggccactcggtcgccggccgcgacgatnaaggtggtggtggccgtggacgcgagcgaggagagcctgcacgcgctgtcgtgggcgctcgaccacgtcgtccggctccaccccggcgcgtccgtcgtcgtcgtccacgcccagcaccgcgtcgaccgctccgcctatgcaggcctggcctacgtcccgcccacggcgatggacgccatgaggaggacgcaggcggagaacaccaggaaggtggtgtcccgcgcgctggacgtctgcaagcagaagcaggcgagcgccacggcggtgttggtggtgggcgacgncnaggagtccatctg

SEQ ID NO: 2886 - DNA, 363 bp, Glycine max
  Peptide Sequence Number=SeqID_6474
  Probeset Number=SeqID_12665
ctgcagatggtgtaggaacagatggctaatcaaaggccatagtgtaagatggatggagctgcaaaagagagtggcataacagaaggaatcatgagggaaatcctttagacaacacccaacattagtgactggagccaacgttcagattttctgagagaaagaagtaaagggctttgatgtggaagtgaaggaggcgaaactccacgatgagtactataagatagaccctctaaaggcctataaacagatagatgagaacactttctgtgtcaatgctatccttgaaacaatactaaaccgagaatttgaagacgtcgtattctgatatgaataggtaatcgaaaagaatacaaaacttgatga

SEQ ID NO: 2887 - DNA, 475 bp, Glycine max
  Peptide Sequence Number=SeqID_6475
  Probeset Number=SeqID_12666
ttccgagacaaaggtcgtgaatctggctgaggaagccatgctcgccagaaaacgtgtcacggctccctgctatgattttaccaccatctgcaagtccatcgtcgctggtggagtctccggaggagtatcactaactgaaaccgctccactggtgctgttgaagatgttgctatcagttcagatttcttacaccttggactacaatggaacaatgcaaggtctacatactttatggagaactgaccggtgttgtgggctgttcaattgtaatggtgctaattcggctcgagttgttccaaattctgctgtaaatgtcttaagatatgagctcgcatctcaggatgtactacattattagtatgagcaaacatggaacaagggagctcagctcactctctctcgttcgatgtggtctggatgcatttccagcatgattgggatgttcgtcatgtatgcacgtgacctgctcgcaggc

SEQ ID NO: 2888 - DNA, 683 bp, Glycine max
  misc_feature (683)..(683): n is a, c, g, or t
  Peptide Sequence Number=SeqID_6476
  Probeset Number=SeqID_12667
gtatcgtttaggtcgaatctgatgaggagtttgaagaaaacagcgtcagatctcggaagcgggaatttgaaaaaagaggtttcggaaatttctgaaaggccacgtcactcgcggtgtaactcggaggaactcgttgattgctctgactcagttctgtttggttctgttgggtcacgggcgccacgtgttccgaatcctccgccgaagcctacgtcttcttcttcgccgtcgtcaccgtcgagcgtttcctccggcgaaacagagcgaaggattccgccaccgccacctcctccgccgaggaagcctgcgtcgaatgcggcggcggcacctcctccaccgccgcctccgcctccggcgaaggcggtaagagtggctccggcgaaggtgcggagagtgccggaggtggtggagtttgtaccactccctgtgccggggggacttgcatgcccagtgagactatgtctccggtgcagatatgccggcgacggggaacggtcgtgacatgatctgccagatcgagaacggatcgagttactggttgctatagagacacatgtggaaccgcgcggagatctgatagatcgtgatcaaggagctgggtagagctgattacggtcgtgtgaagtgtgggcgtttgtcatatgcgttgcgagaactatacgattgcgtaatagagcgtaagn

SEQ ID NO: 2889 - DNA, 1586 bp, Glycine max
  misc_feature (1)..(1): n is a, c, g, or t
  misc_feature (130)..(130): n is a, c, g, or t
  misc_feature (140)..(140): n is a, c, g, or t
  misc_feature (144)..(144): n is a, c, g, or t
  misc_feature (164)..(164): n is a, c, g, or t
  misc_feature (386)..(386): n is a, c, g, or t
  misc_feature (417)..(417): n is a, c, g, or t
  misc_feature (433)..(433): n is a, c, g, or t
  misc_feature (453)..(453): n is a, c, g, or t
  misc_feature (706)..(706): n is a, c, g, or t
  misc_feature (717)..(717): n is a, c, g, or t
  misc_feature (1156)..(1156): n is a, c, g, or t
  misc_feature (1184)..(1184): n is a, c, g, or t
  misc_feature (1226)..(1226): n is a, c, g, or t
  misc_feature (1569)..(1569): n is a, c, g, or t
  Probeset Number=SeqID_12668
nactcgtatgactacacgagatcgtgacaatgcgcacgcgctcatatacgatgtgtcgggctagagacactcgataggcatcacatattatcatatcgagtagtaatactgcatgcgcacatatgcagtnagagcgtagngcantactcaggtaagctaggtantcgacgagcgtcaggtataggatgtgagtcagtggcagacgagctgtgtagtcgctcattgctagtacatatcgatgatcagcgacgtgcgctgcgtatggcacgtgatgcagtgagtgatgagagagcaggagcgcggtcgaccacgacgagcgacgcgcgcgattgactgcggagcaacgagagagcggtgtcgtgagaacaggatcatagctcagtggnatgtctgggcgagcgctcgcagtcacgcagntgcgtatgtcacgtcntgtgtcagtcactcacatgnctagatagtacgaatcagtcacacggcccgttcgtcgcgcgtgcggtgtcggttacatttccgagtactgcgtcgatggacgcgcgcattgcgagtgactggactgacgcggtcgcagtatactcgtgggacatagcaaacgtctcatgtgatagtgtgtggtgtggatcgtgacggagcgtaatgtattgagatgtgtatagtgtgtgctgcagacggcgatgtcatgtatgtgtgcgggaccgacagctangtctatgactnctagctgtatgagtgactagtagtagcaatgtgcatgatgatcgatacgcgtgttcgcggctctgtcttcgatagtcatcattgtaatgagatgtgatagagcggaatagcatagtgactcgtcgctgagatcagtgagagatgacgattcaggtcaggaggtgcgagtgtatggccgtgtagtcgtattgcatacgcacaacaacacactattagtgacgtcagcagtcagctatgtgactagcggtcgttcgtagatcgacgctgatcgcagcacgcttgttctagcgatatgtagtgaagttagtgcgcggagatgattagtatgtagtgtgtggcgtgagctcagtgtagcgtgttgacactagcacgtatgtcattagatctgctgtgtcgtgggctcgatgtagtatatgttacatgatctaggtatatgcgntgagatggtgtagtctcagtgcgtgtgngcacgatgtcgttattatacagtgatacggcgacagtgtatnagatgagcgagaagtgctagcgcaacacactaacaccacaccactcacacgctggtcacgagaggcgtcgtaacaatatagcagccgcgcgcatgatgtgtgtagcgcggtcgaagatcggagtgttatgtgagaggacggtagtatatggatcggcagggagaggatgagcagccgtgacgtgcctcgccgacacgagatcagcgatggcagcgactggtcgaagtctgtgggtcgagggtagagtggtaggttataacattactggcgttcggtaataatgtaaataaccgacacagctagccgttctgcggagagccagaagacgccaagagcacgacanaaggacagaagagagag

SEQ ID NO: 2890 - DNA, 1725 bp, Glycine max
  misc_feature (1)..(1): n is a, c, g, or t
  misc_feature (8)..(8): n is a, c, g, or t
  misc_feature (54)..(54): n is a, c, g, or t
  misc_feature (235)..(235): n is a, c, g, or t
  misc_feature (252)..(252): n is a, c, g, or t
  misc_feature (289)..(289): n is a, c, g, or t
  misc_feature (309)..(309): n is a, c, g, or t
  misc_feature (429)..(429): n is a, c, g, or t
  misc_feature (687)..(687): n is a, c, g, or t
  misc_feature (1414)..(1414): n is a, c, g, or t
  misc_feature (1441)..(1441): n is a, c, g, or t
  misc_feature (1526)..(1526): n is a, c, g, or t
  misc_feature (1606)..(1606): n is a, c, g, or t
  misc_feature (1638)..(1638): n is a, c, g, or t
  misc_feature (1641)..(1642): n is a, c, g, or t
  misc_feature (1648)..(1649): n is a, c, g, or t
  misc_feature (1652)..(1654): n is a, c, g, or t
  misc_feature (1660)..(1660): n is a, c, g, or t
  misc_feature (1703)..(1705): n is a, c, g, or t
  misc_feature (1711)..(1711): n is a, c, g, or t
  Peptide Sequence Number=SeqID_6477
  Probeset Number=SeqID_12669
nttgtgtnctatgacactcatgttctatatgtatcactactctctttatcgtgntatgttcgtctctctcatccatttctgtatgtttctatgcgtcattattctgtctctagctgtgctttgtctgtctacaatgacatgtcttgtcacctgacatctctacctcgattaccattcactcctacttgtcatcatcgcaacatacattctctattacgtccatgtgcatcctttnatgctcacagatagcanatactcatgacgcttgatcagcatagatactatatgngtctctccaagattagatanaaactactcttattacaacgccagcacaccatcattaatgtatctgccaatactatattatgtgttggtgtcaacacacttcgcagctcacatctacagctctcacatcgccgcgctcanacgtacaaatatataccatggcggtgtacatatatattcatatatattgcgtcgatgtgcagctgtctatacttatactgtctgtgtaactatacgtcagaatactgtcatgcttccatatatacggtggctcataccatcggcggctcataatatgtatcttctaatattaagtggtggcgatactatagtacaacacatattctctatcacgtcttacgccaccgcctgatacatctccactccctgctctcgcanacccattctctcaacgtcggcgatctgacaccacctatcatcatatatataatgactaccacgttgtcgagatagcacatcgcggtgatcaaacactactctatattctgtctacacattctgtgtccacccacctgggtagacaaaagtgtggcatataccgcgtcacgagacaataagagtgccgacactctggtggtcaaagaaaactacgtgatgaagacgagttatatttactattcataatactaactatttaatcacctattggtgttcaacaggcggtgtgacccatacacacccgacggtgcggacacagctcggcgtgaggtgacaccagtcatcgcatcactacacgacacaccgggcgtcgcgacaacacacctcgtagcggtgcataccgtctgcctgccacaagcaagattcgataaagtcttaattcacaccaccaatgtgatactagcgcactagcccaaacacgtgtctctaatgtcgctccaacgtactctgtccgctctaccctgcgcgctctccttctctcgcacacataacagaaacacctatttacctactcaccccgcctactcccactttctctcctgtgctcttcctgcgcgggccgctgcactacaggtcgcgccgcgccgcccaccgcgtggtgcctgcatctttcattctccggtgggcgcacactatatcgcgcgtgcgcgactacatatcacaaatntccatgctgcgacaactgctatacaantaccgtatcactgctttctcactcgctatattctcccatataataagacttgcatacgctgctcacatagcactcgtctcctctnatcggtcgagcagaaaagagaaaatatagacgcgctgttgctgcggcatccctccttctctcctctcgcggagaggtaangcccccccctgcctccccacttatggcacganctnnctgcgnntcnnnaaaacncatgagaaaaaatacatcctcaacctccttgaaaaaaaaaggnnnaaaaanaaaaaaaaaaaaaa

SEQ ID NO: 2891 - DNA, 444 bp, Glycine max
  Probeset Number=SeqID_12670
tcggctccagctctgcgactcctgcgacaagacgacacaagggggagagagagagagagaaaagagagtttttaagaaagagggaataaaacaaaagagggtaagcttagtgtggctgtttagtgggtacccttgttgccctcataggaagtgagaaacaaggctagtgagtcccattggaatttttttttttgtggctgaagaaagtgaaaagggggcaagtttcactcttgaagggttttgaggggtgtcaacttgtgtttggagactccgagggtgagtttgaaagctcaatgcttcaaagcaaaagcttgaaggtactaaacatttgaatcggctgaacaagccttctggtaaaaccattcaaaggccaaatggggataccataaactggggacctggttcgaaacaacctggatttgaacatccttttcttaaaaatca

SEQ ID NO: 2892 - DNA, 779 bp, Glycine max
  Peptide Sequence Number=SeqID_6478
  Probeset Number=SeqID_12671
gactgcaaacctgaatacaacatgaaagttatcatttgtttccttctctcatttttagctgtctatgcagcaccagctaatgatggcgacggtacaaacgaaaaacttgaaaaactttttacaaatgtgtttctcataagtggtaaaaatcgatatgaaaacaggactgtacgtgaacctgatgaaagagtgcttaacctcaaaaaggataatgttgatgtaactctatcgataaaagaaagaaagttctttacgagaaaagttttgatgaatgtgacaagtgaaatgaagggaaacacattttttgttaacgcgacttctatttatttggacgctcaagaaaatgggatcgtccaggtgaacgggacggtagatcaaaaaccgctgaatgagactggacgaatttcaataaactggaaacgtttgaaagaaactgggataatggaaaagggaaaattcaaccaaatttatgtgaccgttctaagcaaggtacccgaaaatgaagggagcaaaccgactatcaaagtttctggattggaagaacttgtcaagcatgtgacggatgaagatattgcagaagcactaaacagtcagatgatgaaaaagcggcagatgcaagaagacaaatttgatgagttagattctgattcaattccaagattagcatctgaaaaatcatataataagcatctcttcataggttcattcccaacatttgatttgaatgtatcaataaatagttgataagcagagaaaagttgaatcattaaaaattaatt

SEQ ID NO: 2893 - DNA, 1588 bp, Glycine max
  misc_feature (438)..(438): n is a, c, g, or t
  misc_feature (542)..(542): n is a, c, g, or t
  misc_feature (547)..(547): n is a, c, g, or t
  misc_feature (570)..(570): n is a, c, g, or t
  misc_feature (662)..(662): n is a, c, g, or t
  misc_feature (766)..(766): n is a, c, g, or t
  misc_feature (768)..(768): n is a, c, g, or t
  misc_feature (816)..(816): n is a, c, g, or t
  misc_feature (918)..(918): n is a, c, g, or t
  misc_feature (1033)..(1033): n is a, c, g, or t
  misc_feature (1056)..(1056): n is a, c, g, or t
  misc_feature (1233)..(1233): n is a, c, g, or t
  misc_feature (1356)..(1356): n is a, c, g, or t
  misc_feature (1362)..(1362): n is a, c, g, or t
  misc_feature (1535)..(1535): n is a, c, g, or t
  Peptide Sequence Number=SeqID_6479
  Probeset Number=SeqID_12672
acctgaatagcagaagcacgcactgcctcgggcggtcgctatctgtgtatatatacctctatctctgtctatatatatctctatgtgtctgtgtgagggtgtatgtatacatctctctactatctctctctatgtgtctctctctatatgtctctctctgtctctctctctgtgctgtgctgtgtgtatatatatatatatactctctctctctctctgagtctatctctgtatctatgtatatatatatgtgtgtgcctctctctctctgtctatatatatgtgtccgtgtgtcgctctatatgatggcgcgcgatgtatgtatatatatgtatctctgtgtagaaatctatatatgtatggagatctatatatatatatatagctctctgtctctgtgcgaatatagctagatatgtacacctgtatatatagctntatgtatctgtatcactctctctgtccatatctctgtctggatctctgtctatgtatgtacgtctctacatctaggtgtgtctctatgggggtgtgggtctcgntgccntgctgtgtgtgagtggtggtgtntccgtgtggccagggaagggagcgcccctcgcgcgagcgcggcgcggcggcgccgcggtcgcgctcgggcgcgagctgcccgccgtgcgcgngcgcgcgccgcgcccgccctcgcgcggcgcgcgcggcccgctccgcgcgcgcggcagggaagcggggcgagcccacgcgcgcgcgcacgatggctcggccaccngnctgggtgtacgggcggagatcgggaggctggggggaggcggggcgggncgcactgcgtcgaagcgaagagaaagggagggcgcgcgaagccgccgcgcagagaggggccgcgcgccggcacgggaacacgcggcgcgcgcgcagcgcggnccggcgagccgcccgggagccgccctgcggcaggacgcaagctcagcggcccccgaagcgccgcgcgcgcgaggccaggcagagcgagcggagactaccgccggaggagcggaancgaaagcgagcgcgaagaacacncagcacagcccgaccacacaccaccgcggcgcggcgggaagcgcggcgagccacgcgcgcgccgagggcacacggagggacaagccggcgaacgcagcggcgcaccacaccaggctcgggcgagaggagaaggacgggaaaggcgacggccacgcacgcggcgcgccagaggaacgnaagagaaaagcggcgccgaaacacaaccgcagcgcaacaaaacagcacacgccgaccccacacgaggctgaccgcacatcgacagcgcacgcgccagcgacagaaacagcagagacgaagggncaggcncaacgcggcccgcaacgagaagcgagcacgcgccggaagaagtacgaagcaacaggctcagccccacgggcaaggggaagttgagaagccggaggagcagagcgccagtgacgagccaagaaatagcagcagcggcagcggagacaaagtcgccaagagcgagacgcgcaganaaagcggagtaagcgccaagcacgcgacgacaaaccgcgcacatcggaacacg

SEQ ID NO: 2894 - DNA, 252 bp, Glycine max
  Peptide Sequence Number=SeqID_6480
  Probeset Number=SeqID_12673
agtaactcagtttgaagttctcaagactagcaattctctacgtaacacagcatgttctctatgactttctgctcagatgatttagctagctactagctactcattcaatttcatgctataattaatctcattctaaatcatctatgtatttggagacgcattagaacttgcgcaaaccgtgtggtatgcatcgtttatttctttttttgtccttctatttaacagcttctctgcacaaagcagaaactgcag

SEQ ID NO: 2895 - DNA, 1349 bp, Glycine max
  misc_feature (491)..(491): n is a, c, g, or t
  misc_feature (1124)..(1124): n is a, c, g, or t
  misc_feature (1218)..(1218): n is a, c, g, or t
  misc_feature (1251)..(1251): n is a, c, g, or t
  misc_feature (1257)..(1257): n is a, c, g, or t
  misc_feature (1289)..(1289): n is a, c, g, or t
  misc_feature (1349)..(1349): n is a, c, g, or t
  Probeset Number=SeqID_12674
ccccctccctccccgcgcccgccttctgcctaccatgtgtgtagctgatgggtgtcgaggtccccctcgaggccggtacttgagagccccgcccctgtatcatagattactctctcgtcgttagcggggtggagatcttgcggaaacaagcatgggagactgagtgatgcagcgggaggagaagaagttacgccgccatgttcttttggtgcgcaaaggacgaagttgtctagtgggtcattcgttccataccacatccgtctcgctctccgctacgtgcattcatgggcttcaccgatatgctgtagtcttactgcgaaaagatgggtcaggagatctctggctgggtgccctgatagtgtgaatcagactcgatatggaagtgcaaatgaatattatgtaaagatcagtggtgatatcacggataatagagtgactaggagctcatacgcgtagagcccatcctcactaaaacgagcaccaacctgtgnccaagctatacgtttgattcttgtggacgaaaacgtacctctacggattttttacatccgtgctgacgaaatcgtaagatatcgaggtaacgaaggcaatatcggtcgttgctcgctcaagccaaactaagaagaagtccagtcgatcatatctcaggttgtaacagttgcactgttttccgacaccatttctaagtggcacgcagcgattttagtctgcttctgccagttggtgattgtcagcatgtctatttgttagttctagcgaattcctcagtccactattatccagtcgcacatagatggaggactcgctgcgagaatatctcagatacatcagagagagcagcaatactaacgatgaggacatatcttacgattgagttcaacgctgtgcgcatcatcgcagtatctgttatctaagagttatgaatttactaccagcgccgagcaagccagtgctacctcagatgtgcggtctatatacaacaagtaacacaactcgagaataatgatgtactcggtaggtaggcggccgattgatcttgctataattgtcagaagaggtgaacatctctatgtcaaccattcttccctcctacgtatatgctgaggtcgcttgatacgatctgnctctacgccctctgcaatgtcattcgctcgagtacgattatatggagagacatactataatccgatatgctgaagtgacgcgttatcgctcttngaactcgctatatgctctatcaacgtcgcagtnacaatncgaagtcataagacgtgatacacaagtagtantacgactacgctgtcctatcttcacgcgtctccgtatgacgtgtacatcctcgattatan

SEQ ID NO: 2896 - DNA, 595 bp, Glycine max
  misc_feature (73)..(73): n is a, c, g, or t
  misc_feature (256)..(256): n is a, c, g, or t
  misc_feature (355)..(355): n is a, c, g, or t
  misc_feature (393)..(393): n is a, c, g, or t
  misc_feature (520)..(520): n is a, c, g, or t
  misc_feature (526)..(526): n is a, c, g, or t
  misc_feature (535)..(535): n is a, c, g, or t
  misc_feature (553)..(553): n is a, c, g, or t
  misc_feature (576)..(576): n is a, c, g, or t
  Peptide Sequence Number=SeqID_6481
  Probeset Number=SeqID_12675
ttttttttttttttttttccattttttgctttgaatccataatatggtatatttatacttgctttaacattgnatttatttatttattatttattaaggaatcgataagaaattttgtttgtaaatactttgtttttccctaatagagatacaatagaatttaatcattctcacgagcttcctcataaacgtagccccgacaattcacagctccacagagacagacaagaacatctgtattctttaaatcttttanaggagcacagttgtagtcaattgttaactcttcgccaggctgaatatctctcagagcaaaaaagatgattcgtgggagcagcatatccctattctctgngtgaacagctaaagcaaccatatttggccaacagctgngattaacaaatcttgaatggttcccataaaaaaatgcatcgatcacaagaggaaaatttgcagcaatatcctttaattttttcatcttacgagtctcgcaaactccatcgatattcaggattattgnatttgntgattcatnaatctcctcaacctcggnatgtttattcagatcaaagaggnagttacagttcaccgaatc

SEQ ID NO: 2897 - DNA, 438 bp, Glycine max
  Peptide Sequence Number=SeqID_6482
  Probeset Number=SeqID_12676
gcatcgcttgggagatctattctaccgtttagtgtctcagaagttcgaagatccagcagaaggggaggctgcgctagtggcgaaattcaagaaactgtacgaggatctcagtgctggattccgtgccttggaggatgaaactcggtaagctgtcaagaaccacaaagtcctccgacttgcgggttgtatgggagaaagagtatctcatgttctcttttgtttttgagccaacaactatcatatagtggtcggtatttatttatccggtttgttccatcagtcgagtttagctctgtgaacgtcatatgattctccccggctgtgctgtgtaatatgtttgattcgttgtttttttctttggatggtaataaggtacagccaaagtgagtcttctatttgatttgttgtacctctctcagttccaaaaaaaaaaaaaaa

SEQ ID NO: 2898 - DNA, 798 bp, Glycine max
  misc_feature (1)..(8): n is a, c, g, or t
  misc_feature (795)..(798): n is a, c, g, or t
  Peptide Sequence Number=SeqID_6483
  Probeset Number=SeqID_12677
nnnnnnnngtttatttagctggttctaggatctcctttgttgctgcatcttgatctcctgctttgctgtaactatgttctgctgcttgatgtttgtttccttctttctagctacatgcttattctttctagccacatgcatgttttccttttgctgtgggaaatagttcagttatatttatcagtagcatctctatgtttatagatacatactaggaacatgcttatttagtgtggccttctcttttttatgcaagaagtgtgccttctctaatctgacaatcatcttatttgttgttctaaataattactgcaggatggagcagcaggcatagatgaaatctactgcaaatttctattggttgcggcatcttccgctgagtatgaagacttgaagagtggtcataatgttacttaaaggaggcctcaacttgcaccaaatgcatgggcatgtgcaacagcaacttatgtaggtttctaaaaaccaataaatgctgctctcaaatcagttaggaggctgaaggtagtagcttactgaactctcatttctggaaaaatctggagatgtcttgtttgtacaatctctaaagatggtgctccattgttctgttaatcaagatttgttccctcctttcttactagctgatacgtgatgaccgtttgcatggggtttatgttaactatattctattcatgattcaaactgtttgttgggtaatttagtttagacattgtgtcctgagaatcttgatatctagctgtattggtatagtatagtttgtgatttttcgctctnnnn

SEQ ID NO: 2899 - DNA, 1726 bp, Glycine max
  misc_feature (47)..(47): n is a, c, g, or t
  misc_feature (69)..(69): n is a, c, g, or t
  misc_feature (71)..(71): n is a, c, g, or t
  misc_feature (73)..(75): n is a, c, g, or t
  misc_feature (77)..(78): n is a, c, g, or t
  misc_feature (81)..(81): n is a, c, g, or t
  misc_feature (85)..(85): n is a, c, g, or t
  misc_feature (88)..(88): n is a, c, g, or t
  misc_feature (100)..(100): n is a, c, g, or t
  misc_feature (120)..(120): n is a, c, g, or t
  misc_feature (122)..(122): n is a, c, g, or t
  misc_feature (125)..(125): n is a, c, g, or t
  misc_feature (129)..(129): n is a, c, g, or t
  misc_feature (157)..(158): n is a, c, g, or t
  misc_feature (160)..(160): n is a, c, g, or t
  misc_feature (162)..(163): n is a, c, g, or t
  misc_feature (165)..(165): n is a, c, g, or t
  misc_feature (207)..(207): n is a, c, g, or t
  misc_feature (210)..(212): n is a, c, g, or t
  misc_feature (214)..(214): n is a, c, g, or t
  misc_feature (219)..(221): n is a, c, g, or t
  misc_feature (224)..(224): n is a, c, g, or t
  misc_feature (226)..(226): n is a, c, g, or t
  misc_feature (302)..(302): n is a, c, g, or t
  misc_feature (313)..(313): n is a, c, g, or t
  misc_feature (333)..(333): n is a, c, g, or t
  misc_feature (363)..(363): n is a, c, g, or t
  misc_feature (371)..(372): n is a, c, g, or t
  misc_feature (416)..(416): n is a, c, g, or t
  misc_feature (437)..(437): n is a, c, g, or t
  misc_feature (472)..(473): n is a, c, g, or t
  misc_feature (497)..(498): n is a, c, g, or t
  misc_feature (605)..(605): n is a, c, g, or t
  misc_feature (607)..(607): n is a, c, g, or t
  misc_feature (610)..(610): n is a, c, g, or t
  misc_feature (612)..(612): n is a, c, g, or t
  misc_feature (639)..(641): n is a, c, g, or t
  misc_feature (644)..(645): n is a, c, g, or t
  misc_feature (650)..(650): n is a, c, g, or t
  misc_feature (670)..(670): n is a, c, g, or t
  misc_feature (703)..(703): n is a, c, g, or t
  misc_feature (948)..(948): n is a, c, g, or t
  misc_feature (953)..(953): n is a, c, g, or t
  misc_feature (955)..(955): n is a, c, g, or t
  misc_feature (960)..(960): n is a, c, g, or t
  misc_feature (1029)..(1029): n is a, c, g, or t
  misc_feature (1199)..(1199): n is a, c, g, or t
  misc_feature (1203)..(1203): n is a, c, g, or t
  misc_feature (1232)..(1232): n is a, c, g, or t
  misc_feature (1335)..(1335): n is a, c, g, or t
  misc_feature (1346)..(1346): n is a, c, g, or t
  misc_feature (1363)..(1363): n is a, c, g, or t
  misc_feature (1366)..(1366): n is a, c, g, or t
  misc_feature (1369)..(1369): n is a, c, g, or t
  misc_feature (1493)..(1493): n is a, c, g, or t
  misc_feature (1497)..(1497): n is a, c, g, or t
  misc_feature (1542)..(1542): n is a, c, g, or t
  misc_feature (1565)..(1565): n is a, c, g, or t
  misc_feature (1604)..(1604): n is a, c, g, or t
  misc_feature (1647)..(1647): n is a, c, g, or t
  misc_feature (1692)..(1692): n is a, c, g, or t
  misc_feature (1701)..(1701): n is a, c, g, or t
  misc_feature (1703)..(1703): n is a, c, g, or t
  Probeset Number=SeqID_12678
cgagatgacgatgtagctggatagtatgacgttgaagaacgttactnataggtagtcagaagagcagtnangnnngnncantagngtntagatactgatnaaatttgatagtagtgtaantnatngtcnatacagatgatagtagcatatcatctgnngnanngnagtactgatgtgtggaataatcacagactgagtagagtgggnagnnngnagcannnaanancatgatgtcgtgagagagtatagtgagtgcgtcgcagtgaggacagataaaatatatacgtggtgtagccacgcgncgtccacactnctaggctgatcagagtgcanagtagctagcgacatgtggtgggacggcantatcagcnnaccacgatatcgatgcgtatgtagtgagtagacgtagcgagacnacaggacgttatgatagatcntacttatataagatacatactggtagtagagaatnntacatctacatgctatcatatcgnnacaaccgcactgcgcagagtaagagagtagttatatgtgagagcgaaagagtatgagagaggagcgtgcgcacgatcgcatacctgcgactgacatgtgcagattcnanaananaacaaaaagcgagcagagcaagataannnaannatatnataactatgagtatacatgncatgagagtgtagatagaggtgagtgtgagagnagaagaaacgatacgcaagtgttatagaagggacaccagatagcgtaaaatgataggtacagagggagagagtgagaatctatgactagttgccgtccatgggcactagagggcaaagggggaaaccagatatactagggtgagtgtagtgtagtatcagaggatatccatcacgagtgagagaggaagtagagaagcgagtagataaatacgcgagcgcgataacatgctaatagtcaattccnagatnantcacnagatgtcatgatggggatacggagagataagcaatatgctgagcgtatacgaatgtgtggcgctatagntaactcaaattcgtctacaggttgagatgtcgtgagcgagtctaagtgtatacgagcagtacaacagtacagatagagaaaaatgagcgtaacatatgtgctccgattttgcgaatggaggacgacctctaaatcggcactagtcacgcgctgcgacgcaaggatgcgtnctangctcgtgcgctaacatgctgcttgactantgagtacgaccatatagagtatagagtgacatcagggtacaagatatatactaagacgatgctctgcgtgcgcgagtgcgtacaagagtagtagacgtgtcantttacgagatngtactatgtagtgacanatntanctcgcagtatgcgtttacctcccagtatgcgaggagagtcgagcgacagaagtgcgtggagcagggactggatcctgtgtgtagtcttgagcgcgtcccccactagtgagcatcgcgagatacntaanagagcgatatggaatcagatcacatgtctcttgcctacgccgcgncgtgggtgagtattctacaagcntatatatacgtagggagtggcgggccacagacgcaagcncgagcggggtgtgatggatccccgatagtattatttagagagncgaagatgagtacagaagtgagtgagcaggtgcgagggatgcagngaacagagnangagaagagaaggtagagagacta

SEQ ID NO: 2900 - DNA, 1746 bp, Glycine max
  misc_feature (67)..(67): n is a, c, g, or t
  misc_feature (132)..(132): n is a, c, g, or t
  misc_feature (148)..(148): n is a, c, g, or t
  misc_feature (381)..(381): n is a, c, g, or t
  misc_feature (402)..(402): n is a, c, g, or t
  misc_feature (407)..(407): n is a, c, g, or t
  misc_feature (447)..(447): n is a, c, g, or t
  misc_feature (483)..(483): n is a, c, g, or t
  misc_feature (522)..(522): n is a, c, g, or t
  misc_feature (526)..(526): n is a, c, g, or t
  misc_feature (535)..(535): n is a, c, g, or t
  misc_feature (562)..(562): n is a, c, g, or t
  misc_feature (565)..(565): n is a, c, g, or t
  misc_feature (590)..(590): n is a, c, g, or t
  misc_feature (628)..(628): n is a, c, g, or t
  misc_feature (644)..(644): n is a, c, g, or t
  misc_feature (678)..(678): n is a, c, g, or t
  misc_feature (791)..(791): n is a, c, g, or t
  misc_feature (799)..(799): n is a, c, g, or t
  misc_feature (1733)..(1733): n is a, c, g, or t
  Peptide Sequence Number=SeqID_6484
  Probeset Number=SeqID_12679
tatagtacacatcacgaccaatatgctctgctgtgtatattcgtcgtaggctaaacgactgacgatntagtatcaatacatcggtattatactgcgcgcgcatgcgccgcgggagtgatatatacatcgtcnttatgtatgccagggnccgcctgcgagtcatactatacgccgacttcgtgagtattataacgagcgcgtccacgtacacgccgcgcgcgcgcgcgatgatatgtgtgtgtgatttataccgtatacgcggcacgacactaatacgtctcgacgatcattttttgtctgtcgacacctatacggcagcacgcgcgcgacgctctgtaatatgtgtctcacgcgccgcatgtctagtctattctcacctantcctgcgcggcgcgccaggcnccgcntacgccgcattgtatgccatacattatatgtctatctccngactcggcacgccgccgcatatatattatacggccngcccccgattcgtatacttgtatgacagtcagtagcgcncacngcagcagtncgtcacagtcgcacgcgcttactatgnttntacgcgtgcgtagagtgtgtcgtgngccccctcattatagacccgtgtctgcactattatctntgtgcagatagattcnaacgcacataccatcgtctttctgttatcattgncataagtcttatgaacacactcactgtacatatcctgtacgatgcacgttgcgtcgtctattaacacacccatcgtcatattcgtacgagaaacgcgtcatgctcggtgggtntttatctncatacatacatcatcatgtctgcgttcctatctacacacatcatctctcataatagtgataatggcgaagtagcagaagcaaacaacacaccatatttattgtgtcgtatttgtcgtgtggcagaggacgtgttatcaaattcgacacagaacatgtgttctgcgtcaatatttacgcgcgcgtgtatatatcgtacttcgagtgcaagagaacacattttatttgtacgcgcggggggtcagggtcattttgtgattcgggcgccagctattaaaacacgtcgtgcggtaaacagaacgaaatagtacgcgttgtggtcgagtacacggtatacgctatcacaattataattaattcttaagttctttagatcacggccgctttgattcggcgtgcgacgtagatagagaaacgggaagttgtaaagagagattggcatgtgttggcgttggtagccaccggcgcgccccaccacaccgccggcgttcgtgttaacgcggcgagagatagtaagagagggatcggcgacaatgacgaggagaatataataaaagaaaagggggagattaaagccggattatatataattctattggaggattcgtactatgcggcgccgcgcggtgtgcacagataaaatatgcttaatgtgcgggcaaaagaatctgtggggtgagacactgtgttgagataaaccgtagtgtgtggcgaaactactttcattagtgattggtgtggtcgtggatcgttataacagttccctctcgacaacacaatgggtcgggagaggaaggcaactaatatcaaaaatatggataaacacaaacgaaagaacaggcgattcaaaatatgtaacggaagaagagtggggggagcgatgtaacggcgcgcacaaatataccatcgctagctatatcgtgtggggcggaggtngggggacactatc

SEQ ID NO: 2901 - DNA, 474 bp, Glycine max
  Probeset Number=SeqID_12680
attttcaatcactctcactcacaagttagtcaccaaaaaaccaaaaagaaaaaaacaaaaaggaaattcaatggctgcctcgacaatggctctctcctcctctgccttcgccggaaaggccgtgaacctttctccagcggcatcagaagtcctcggaagtggccgtgtgacaatgaggaagaccgtggccaagccaaagggaccatcaggcagcccatggtacggagccgagagagtcaagtacttgggtccattctccggcgagccaccgagctaccttaccggagagttcccaggagactacgggtgggacacagccggtctctcagccgatcccgagacattcgcaaggaaccgtgagctagaagttatccactgcaggtgggccatgctcggagccctaggctgcgtcttcccggagttgctggccaggaatggagtcaagttcggagaggcggtttggttcaaggctgg

SEQ ID NO: 2902 - DNA, 1376 bp, Glycine max
  misc_feature (670)..(670): n is a, c, g, or t
  misc_feature (973)..(973): n is a, c, g, or t
  misc_feature (1164)..(1164): n is a, c, g, or t
  misc_feature (1365)..(1365): n is a, c, g, or t
  misc_feature (1376)..(1376): n is a, c, g, or t
  Peptide Sequence Number=SeqID_6485
  Probeset Number=SeqID_12681
taccttatatcttctccatccgtaaaatatcctcaagcaccatggatcgctcttcttatatttgtcttctgcgttctctgtccgcgcgacgtgcttctcatactccttgtggctaccctctgcccgactttccctacagactaacattactcactctaaacggaattgtctcccaagtacccactgatgtatcctctattatgttctctcgcggctaatatagcttgtatacttgtgccacgtacaacattccatgcccatcgagtggacatgtagatgattagaacttctcgttgagcacaagaatcagcttttcgtcatcatcatagatcgcgacatcttgcgccacattgtgtgtgaagtatgcagactcatccgatgttaacctaccgcttctatctctctcgccagataatatctcctgtcatctggtgttgtacatgtgagtcgacaacacgttcgcattctcccacatgcagcactatcggctatctccccacgaatataatataacactgtcctcttcctcatcatagcacgctccagttttcgcgccaactggcactcgccacgctccctcgacataaagatgcgtattgtgacacttccgtgttcttgtactcatcccactcggcacatgcccgtaattcatagctttagcatccttgcncgtatgcccagtatatccacgacatcgagtctctcttctcatatagctaaccgcgctgataatactttcgactgattactatagtgatactcgtatctgtcaccgcagttccagtccaaatataatcgcatatatccttcccctccgtgatagaacacaatctcctttatctatatcacgtcttggtgacaatattgtgaggatctgtatgcaactgctcttatactacgcggtcttacgcagcctgacagagattctcaaaatagtgatacgaagccgaagaatagctaccgaatatactanttattcattactctctcttatatacatatgtaagtgcgagcctttattgtatccacgtaattgccgtgatgtatatatcgcatactctcatatcgatagactctatcggaaaacaatttcatagagagctccttatgtggcgcatcgcactccacaacactgtaccggaacacacgatcatctacatcgtncgttgtacgaatgactgtgtatcctataatggcctcattaactcctatcctttctatgatttagtcgacggttggcgcatctgatacgcgtacagcatgatgttatctgacgtgactcacatcaatgaaagtatcttaatataaagtctctctcgtctgatgctcctatacttatgctcgacatatcccgctctacatatnctctggtacan

SEQ ID NO: 2903 - DNA, 618 bp, Glycine max
  misc_feature (601)..(618): n is a, c, g, or t
  Probeset Number=SeqID_12682
aattcggcaccagcgttgctcgtgttccttgtcaagagatccttttgcttgaggcgtgaatggaaagaggaatgggatgactcagtgtggttgtcacctgaagaaggccattgacatagctgtgaggagatggaggatggaatcatgtggtgtgccctaaacctcgagcattgggcctgttgaaccactcaacctttgataaccacatcagacccttgaggccaccctttatcaagtattcaccctaccttttcctaaaaaattacatcatatctttatttttgttgaattttttcaatcaatttattttgtaaaatttctgactttatattttttttttactaaaacagctaccaatcagaaattgaagattcaggagttggggctgagcttatggacattattctccccaaggttattttttgcctcaatcttcatgttgaaaagagttttttttttctttaaaattgtttaatttttccccaaaacattttaaatgaaaaatatatatgaaaaaattggttggttcgtgtgattcctcaaagatgtcacaaatctgaagttttaattttggtgttgattgctagggaatagagatgcnnnnnnnnnnnnnnnnnn

SEQ ID NO: 2904 - DNA, 613 bp, Glycine max
  Peptide Sequence Number=SeqID_6486
  Probeset Number=SeqID_12683
aatcaaaaaaaaaaatcaaccacttcatcatcatcatcgtctcagatttcgaaaaatggcagcgaagatctcccagcttgcgtgtttctcctccaccaaccgccaattccacttctagaaccgatcgtttccaagccttaggttccgtcccgagtcttttgtagttagaagcgttgttgatgggaacagctcggaaacaccagcttctctgagatatgcagctgaggtttcgaaacctttcgttgagaaaacatctacagtggatgaaactactacgggtaaagaggttatcacagagtcggtagaggaacatgctcgcgtcatcacagtgtaaaagagcagagaagattcatgactctctgctttcgcattccttatggtggcctggctcatgagcggaggattgccccgaatgtgtgattgcaccccacacttacagcggctaagaaatcgcgtggtctctgacggggggtggacctcctgaaccccaaaatgaacgagaacacataaaccaccacggcggaccggtttaaagacccacgtgggcccctaccaccccggagggggaagcggggggtgtggcggcccgtcacccctcgtctgcatacagaaa

SEQ ID NO: 2905 - DNA, 763 bp, Glycine max
  misc_feature (1)..(1): n is a, c, g, or t
  misc_feature (473)..(473): n is a, c, g, or t
  misc_feature (576)..(576): n is a, c, g, or t
  misc_feature (695)..(695): n is a, c, g, or t
  misc_feature (702)..(702): n is a, c, g, or t
  misc_feature (705)..(705): n is a, c, g, or t
  misc_feature (712)..(712): n is a, c, g, or t
  misc_feature (727)..(728): n is a, c, g, or t
  misc_feature (735)..(735): n is a, c, g, or t
  misc_feature (741)..(741): n is a, c, g, or t
  Peptide Sequence Number=SeqID_6487
  Probeset Number=SeqID_12684
ngcgatacttactacatagatcctcatactgttttaaggtgtcacacaagtgctcatcaggcagaattattgagaagtgaatacacccatttccttgttacaggagatgtttaccgtagggattcaattgattcaactcattatcctgtcttccatcaagtatgtccccatatgcagtaactggcttaatctaataatagtcaactttatataatttcatcttttttattatgtagatggaaggctttcgggtttttgttccagaagaatgggagggatctggaatggatgccacattatttgcagcaacagacttaaagcaatgccttgagggtctagcacgccatttatttggtgctgtggaaatgcgctgggtggatacttatttcccatttactaatccatcatttgaacttgaaatttatttcaaggaaaagtggttggaagttttggggtgtggagtgacagagccngagattctgaagagaaatgggaaacctaataaggttgcttgggcttttggcctagggttggagaggttagctttggttctatttgacatacctgatattcgtntcttttggtcaaatgatgagcgatttacctctccagtttccaagggtcagcttgggagtcaaatttaagccctttccagaagcttcctcctggtacaaggacatgagtctctggatcanggactcntcnactgcancccctctgccggacnncggcccncggccnccccggcgaccccggcgcgggc

SEQ ID NO: 2906 - DNA, 2059 bp, Glycine max
  misc_feature (1)..(4): n is a, c, g, or t
  misc_feature (9)..(11): n is a, c, g, or t
  misc_feature (16)..(23): n is a, c, g, or t
  misc_feature (30)..(36): n is a, c, g, or t
  misc_feature (39)..(40): n is a, c, g, or t
  misc_feature (52)..(52): n is a, c, g, or t
  misc_feature (87)..(88): n is a, c, g, or t
  misc_feature (100)..(100): n is a, c, g, or t
  misc_feature (180)..(180): n is a, c, g, or t
  misc_feature (191)..(191): n is a, c, g, or t
  misc_feature (197)..(197): n is a, c, g, or t
  misc_feature (206)..(206): n is a, c, g, or t
  misc_feature (209)..(210): n is a, c, g, or t
  misc_feature (227)..(227): n is a, c, g, or t
  misc_feature (229)..(229): n is a, c, g, or t
  misc_feature (344)..(344): n is a, c, g, or t
  misc_feature (377)..(377): n is a, c, g, or t
  misc_feature (448)..(448): n is a, c, g, or t
  misc_feature (451)..(451): n is a, c, g, or t
  misc_feature (516)..(516): n is a, c, g, or t
  misc_feature (612)..(612): n is a, c, g, or t
  misc_feature (615)..(615): n is a, c, g, or t
  misc_feature (637)..(637): n is a, c, g, or t
  misc_feature (667)..(667): n is a, c, g, or t
  misc_feature (781)..(781): n is a, c, g, or t
  misc_feature (882)..(882): n is a, c, g, or t
  misc_feature (995)..(995): n is a, c, g, or t
  misc_feature (1212)..(1212): n is a, c, g, or t
  misc_feature (1311)..(1311): n is a, c, g, or t
  misc_feature (1505)..(1505): n is a, c, g, or t
  misc_feature (1567)..(1567): n is a, c, g, or t
  misc_feature (1571)..(1571): n is a, c, g, or t
  misc_feature (1576)..(1576): n is a, c, g, or t
  misc_feature (1589)..(1589): n is a, c, g, or t
  misc_feature (1600)..(1600): n is a, c, g, or t
  misc_feature (1624)..(1624): n is a, c, g, or t
  misc_feature (1644)..(1644): n is a, c, g, or t
  misc_feature (1664)..(1664): n is a, c, g, or t
  misc_feature (1679)..(1679): n is a, c, g, or t
  misc_feature (1681)..(1681): n is a, c, g, or t
  misc_feature (1699)..(1699): n is a, c, g, or t
  misc_feature (1705)..(1705): n is a, c, g, or t
  misc_feature (1710)..(1710): n is a, c, g, or t
  misc_feature (1732)..(1732): n is a, c, g, or t
  misc_feature (1748)..(1748): n is a, c, g, or t
  misc_feature (1770)..(1770): n is a, c, g, or t
  misc_feature (1798)..(1798): n is a, c, g, or t
  misc_feature (1814)..(1814): n is a, c, g, or t
  misc_feature (1848)..(1848): n is a, c, g, or t
  misc_feature (1854)..(1854): n is a, c, g, or t
  misc_feature (1856)..(1856): n is a, c, g, or t
  misc_feature (1862)..(1862): n is a, c, g, or t
  misc_feature (1916)..(1916): n is a, c, g, or t
  misc_feature (1946)..(1946): n is a, c, g, or t
  misc_feature (1958)..(1958): n is a, c, g, or t
  misc_feature (1966)..(1966): n is a, c, g, or t
  misc_feature (1983)..(1983): n is a, c, g, or t
  misc_feature (1986)..(1986): n is a, c, g, or t
  misc_feature (2015)..(2015): n is a, c, g, or t
  misc_feature (2023)..(2023): n is a, c, g, or t
  misc_feature (2032)..(2032): n is a, c, g, or t
  misc_feature (2058)..(2059): n is a, c, g, or t
  Peptide Sequence Number=SeqID_6488
  Probeset Number=SeqID_12685
nnnnccccnnnccccnnnnnnnncccaacnnnnnnnccnntcacatgcaccnccgcaccgcccacacccccccgctcctcgtcccgnnctaccgcccccntattttttaatgttagataatgatgttagattgttctctcaagatgtatgttttggaagaacaatcgtcaattcgctttnccatcttctcntcgggntagttcttntannaagtaaataacaaatcnanagagagatatgaatatacaatggtgcgcttagtactcatctatacatctactctattcactatataatatatgcttctgtatattatatatgatctgttgtctcgttcgtcctcncccgatattttatttatcatctctacctccctnactctcaccagacacaccgacactcatcatcatacaccatactaccccatctcacatactcacacccactncanctccactctcgcgtctccaccgctccccacaccaccagacacactaaacactatcgttctcctanacacacacaacacctcagcaatccatactatattagataactataacaatgtctctactaacaacatacattatatactaaaattcatattacctnaanaaacgtattatctactactatnatattgtacctattctattatttattctanactatattattatcataatatatatattttaattttctcatattactactatcattactcatactcattcacctcctctatatatatatactaaatatttatatttttatatanttattctcattaataactataaatacatatattacattatatctgactaactactattactaacaccatcattataactcatcactctctgctacgcactntacgtctatatattgctttatattctctacacactgctatactccacatcatcttctgcactctcatcaaatacgtctctacatacactattacactactgtatatcttactnatctgacttatttattctaataattaccgatcacaccagagaatcaactccactcataatcatactctgacatatatgacactcaccactctctcctctccgccatccactactcccgaaacccgctatactccaccacaaacacatctatacactacatatataagctatacaaatcattcaataactatgcaatcatgagacacatgactcatcnaccagtctctcataccctcccatcattatacgattctgatgtggaacctctctccactatgcgctatctaaatacgcctgctcgatcatatgcgtaccntcatcactaatatactatacatacttctgcatgtctctcttatcatatatcctacctctataataactcgcactactaacgactatatctctacgcgatacgacatcatactactatattcactcgaataccgtacatccacgctcacactctacacttctcattctcacagtactaccttatcccccactcanacagtgcactagtactatcaatatatcatctcactaaatctctctctctactatcttctcanatancgtanagcagaaatctgngacagatttgntagctctctctctctatattcccnactcgtactactagtatgancacaaaagcttattctaccntcactattattgacntngactatattatgatttanctatantatcngcatatcgatatccattctgtntcgtacctttatctantctagttctccatcatcacttncgtatatacatgtccccttcatgacganactcagtactatatgngtgcggaacattatgacgtgatgactcgactagngaagangncgacanagccgcaccaggctgcgcagtacactacgtacgcattacaccagcgtatgtgtntatcatagtatagtcactacttcacacgangtcgttactatnatgctganttcttcacgtaatcttngtnagcttttgaagtcctcattacctattttnatgtactntatacaccngctgttaaactacacgctctttgcgnn

SEQ ID NO: 2907 - DNA, 1962 bp, Glycine max
  misc_feature (29)..(29): n is a, c, g, or t
  misc_feature (152)..(152): n is a, c, g, or t
  misc_feature (186)..(186): n is a, c, g, or t
  misc_feature (226)..(226): n is a, c, g, or t
  misc_feature (346)..(346): n is a, c, g, or t
  misc_feature (349)..(349): n is a, c, g, or t
  misc_feature (354)..(354): n is a, c, g, or t
  misc_feature (520)..(520): n is a, c, g, or t
  misc_feature (670)..(670): n is a, c, g, or t
  misc_feature (746)..(746): n is a, c, g, or t
  misc_feature (781)..(781): n is a, c, g, or t
  misc_feature (1013)..(1013): n is a, c, g, or t
  misc_feature (1206)..(1206): n is a, c, g, or t
  misc_feature (1507)..(1507): n is a, c, g, or t
  misc_feature (1737)..(1737): n is a, c, g, or t
  misc_feature (1942)..(1942): n is a, c, g, or t
  Probeset Number=SeqID_12686
caacggtgctacgattactatgccgtcantactttgcttgtggtatgtactaatgcagatggcagtgagtgcgcgcagctgtccgatcgtacgcttgatagagagagagttgcgtttaatcacgtctcgcacacgtagattgatgggtatantttcgctatcactacgatctagtatggtacgagnatatgctcgcagctacatagactacttatgcatatcggcncatatacctacacacaacgtgcgcacgtctaattgcgtagtcgatataatgatctcgcgctactatacgagatagattgataatgcgttacgcatgcgaatccgcgctatatgcgagtantgntctcntatctgattcgtgcatatactcatacggtgtgtatcgatataccgtattgtatcataggttgcatgatagtcacatattgttcgtctttgcacctgtagatgagagtgtgaagctcaaagagagacacatcattcgtatcacgctctcaatgccgaagggtatgcncgcggctctagcgagtacgtgtcgagacgtacgagctctcatgatagtatatatattttcatgcaacgtatgagcatcgtttctagagtgtgttgccaacgatagagtgcgtagtccagctggtgatctgagccttcgaggtgacgatcnctcgccgcgcgccgccgctcacgcctggtgaggtgtgctcactttcatattgacactatcggtcatatagcactcnttgagtgtaatatacggtgattgttatcgagacgncagacagcgatggtgaagggatgaacgacgtgagagcacgtaggtagagatagtaccattcgcatacatccatccatagcttagtaaatcgcctcgtgcatcatacactctcttacagagcttaatgtctttctatctcgtatgatcctgatgtaatggctgtctgcacattctcgaagctatctgtcattcaagttgtcgtactctgcgtaatgcagatgctactcacgtnaattctcagcggagcagccactgaattgaaagtgtgtgggtgagaggtgtcgcgccagtgacacactacatcgctctacccatatcactgacatcggcaccgaaagagagcgacattgcgtcatctgcagtgtgagtgtgctctgctctcacctctcctcacgtaaatgtaggcagcgggatgcgcgtctccntggtgcgctggtcgtacacactaacacgagtcgcgtaagacgtaaatgcgaggcactagaggtgtgtcggtccgatatagatagtctcacctcaccatacaccgacaagacctaccgctctatcaatgatcatacctcatgtggagcacgtatctacaacgaggcgcatcctcagaaagagaacgctaatatcagatcatgacgctcagtgtgcttgctcgctttgttagacacgcagaagttgagttacatgccatgtaggggacggcatcatctaacatatcccgccctcgggcagctntttacccggtgcgtcatggtaagtactatactctcttcattagccgactacagctcaccttcactgcttctcatgtgtttatggtcgtgtagctagttgtctttgacgtaggtcgcgttacatgccggtgctgctaagacgatagtgtcgctgacacatcagtagggtatatatggtgatttagacacctgcacatatctcgctctgtgcgcagcggccccgacatctcncagacgactcatccactagattgtccgccttcctcttctacgaagtaacaatcatctgaaagaatgagggagagaaagagtgcgtattacacttatcacttcccttctcgaggggggggggaggtcccgcctctctgctatccctctctctccgtcttctctcgcgcggttctcacgaacctcctcgcatgggtcggtgagaggntgggtgggagagtggggggt

SEQ ID NO: 2908 - DNA, 638 bp, Glycine max
  misc_feature (488)..(637): n is a, c, g, or t
  Peptide Sequence Number=SeqID_6489
  Probeset Number=SeqID_12687
ttttttttttttttttttcttttttttttttttttttttttttttttttttttttttttttttttttttttttttttttttttttaaaaagggggggataaaaagttggaaaaaaaaatgtttccttgatgtacagcaacaaaaacagacaagcccccccggggagcatacatttccccactacaagggcccccccctataaattgaactttcaacaaatctaaaaaaaccctacataccccccctcatggcccaaaaaaaaaatgggggcaaaaaaaacccccaaggaatgatcccccagcagtttaaaatttaaaaaatcccccaatgtcagtaaaaacccctaaggggacccttacaaaggcggaaactccaaaaaccaaaaaccccttggcccgatttgaggaacccttccaaatggaaggcccccttctgaacaaaaaaaagtctttcccccccaaggttgaccccgcttttgtacctcgccnnnnnnnnnnnnnnnnnnnnnnnnnnnnnnnnnnnnnnnnnnnnnnnnnnnnnnnnnnnnnnnnnnnnnnnnnnnnnnnnnnnnnnnnnnnnnnnnnnnnnnnnnnnnnnnnnnnnnnnnnnnnnnnnnnnnnnnnnnnnnnnnnnnnnnc

SEQ ID NO: 2909 - DNA, 1447 bp, Glycine max
  misc_feature (1)..(1): n is a, c, g, or t
  misc_feature (194)..(194): n is a, c, g, or t
  misc_feature (197)..(197): n is a, c, g, or t
  misc_feature (387)..(387): n is a, c, g, or t
  misc_feature (552)..(552): n is a, c, g, or t
  misc_feature (572)..(572): n is a, c, g, or t
  misc_feature (888)..(888): n is a, c, g, or t
  misc_feature (917)..(917): n is a, c, g, or t
  misc_feature (923)..(923): n is a, c, g, or t
  misc_feature (961)..(961): n is a, c, g, or t
  misc_feature (1079)..(1079): n is a, c, g, or t
  misc_feature (1288)..(1288): n is a, c, g, or t
  misc_feature (1364)..(1364): n is a, c, g, or t
  misc_feature (1387)..(1387): n is a, c, g, or t
  Probeset Number=SeqID_12688
nccctgctgcgttcgtagatcagagtttgtggcggcggtaggcggcgacacggcacattgttcatcatattttgcgctggcgcttctcgccgcgtctgcgtcgcccatcactgccgcctcaagatacgcatatccggtgatttgatcatgtgacggtcctcagatgcgccatacgtcgatcgggtaggtagcangantctctttctctctagacgccagtgcctgccgtatggtaacggctcgcggatgtaattctgagtgattatctgagtgatctagcatcgatcctgatgcatcgtcatgcaatcgcgggcacacgcgcaacgacggcagggagtatatagcgacgtcgcgtacagcgtacgtatgcgttcactcgacagcacntcagactcatcgagttcttatttatgatcgttcgcgtgacgacagcagccatacgcgatacgcgctgtctcaacgatcgtcatcgcggatacgacaacgatacactgtgtgtcgtcatctcgtctagtgaacagcagtatgttcttgagtcatatgaactggtancctcagtaggacggtgtggngtgctgaccgtcagtggtatcacgcttactatcttcactactactacgctacgtcgcgacacatcgtacgtagtcgtagagatcgtcatgtctctgcgctcgtcagctcgtcacgcgacgtgcgaggaccgacgcggccgccagcagcgctatctgcggtgttattcagttcatctcacggtataagcagcggcgtgcggctgcacgctgcgcgcataacagtagtctgctatagtcggcggtcatgacaatgcgccgtcgcgcgacacgcggcgctcgtgtggtctattgctctatcatgtccgtctatccgcgngtctagagaactggacgatacattgacgntcgccncaagaccgcatatcatcaatcatcgacaacaccactantcgcatggcagtcgagcgctacatcgcgcgtcgacggagcgtgcgcctctcgtaccgcttgctggctatcagtcactctcaggttcgtcatcaccagtcatcgtcatcgtcgcgtgtntgcagcgtagatagcgcaccaatatcgtaactagcacgcacgcgcatcgcacagatggcacgactctgcttcgtcgttcgcgtaggagtcagatacaagtcagcagatagatagagcgccagcggtagtatatataggatagaggtaagcactcgactgcggccgtttgttctctggtgagagatgcacgctctatatgtcgtcgcggncaggtggagctctacttggtgcaatacatctacgcatgatgtggggcggatagatctgcgctcgtccatgacacanaacacaatatctgtactgtcgtngtgtgttgcgaatgtgggaggagctagaggagtggggtggcattgtgctgtgtatgttca

SEQ ID NO: 2910 - DNA, 510 bp, Glycine max
  Peptide Sequence Number=SeqID_6490
  Probeset Number=SeqID_12689
acaaggcaagctggagctatctatctatggatgtaccagaattacagcaccagacaatagcgtttctatgggccttactaaatggagatgatattaaatatagagttaagctcagaagggagataaaattctttattttgagatttaatgagtataaggatcattggaaaaatcagacactggagctgtttgtggcgtttctagcgagtgtgttgtttcatcaggggaaagtgatgtttgaagggttacaagaaagtgagaaagaggaggtaagagggtgtaaggagtatttggaggatcataagactacgctgtcggataaagggaagtattttgcggaaagaataacgagtttcttggaaccgttgcttctggagagaagggaagtagaggatcaggatgaagcataataaataatttagggaaaaatctttttatttattttttaaattgtggattttacgaataaagatacattgcacttttggatatgatagtaaaaaggtagtc

SEQ ID NO: 2911 - DNA, 506 bp, Glycine max
  misc_feature (13)..(13): n is a, c, g, or t
  misc_feature (145)..(145): n is a, c, g, or t
  misc_feature (172)..(172): n is a, c, g, or t
  misc_feature (216)..(216): n is a, c, g, or t
  misc_feature (234)..(234): n is a, c, g, or t
  misc_feature (253)..(253): n is a, c, g, or t
  misc_feature (369)..(369): n is a, c, g, or t
  misc_feature (415)..(415): n is a, c, g, or t
  Probeset Number=SeqID_12690
aatcctgccctgnaagtatcatatcatggcaacctgaacttgacaacatattcctacgagcagtttccaaacggaagcgttttacacaactccgcgacggcccggcgtgcacgtgcgttacaaagtttcagggtcgcggaagggncgagaagaaacctgtgtaagaaagcgnacacactattggcgcataacctacgctgcctaaaccggcccttnagatgggggggagacctnagacatggacgcatacggnaacccgactctcttctggagcacatagagcaacaatatctgctgaagctggaagacaaaatagggattttggaagatttgctaaaacactggtcttcttcaatgggttaccatctnctgctaagttctctgattttctagctgagaaaatatctgatccttnccctagtgaagtcattaacacaatgggaacttctgatattggactggtagctggagcaactggtggtgttggtcgaagggtggttgacata

SEQ ID NO: 2912 - DNA, 1703 bp, Glycine max
  misc_feature (24)..(25): n is a, c, g, or t
  misc_feature (28)..(29): n is a, c, g, or t
  misc_feature (38)..(38): n is a, c, g, or t
  misc_feature (40)..(42): n is a, c, g, or t
  misc_feature (44)..(44): n is a, c, g, or t
  misc_feature (53)..(53): n is a, c, g, or t
  misc_feature (61)..(61): n is a, c, g, or t
  misc_feature (63)..(63): n is a, c, g, or t
  misc_feature (101)..(102): n is a, c, g, or t
  misc_feature (105)..(105): n is a, c, g, or t
  misc_feature (123)..(123): n is a, c, g, or t
  misc_feature (126)..(127): n is a, c, g, or t
  misc_feature (140)..(145): n is a, c, g, or t
  misc_feature (148)..(148): n is a, c, g, or t
  misc_feature (150)..(150): n is a, c, g, or t
  misc_feature (168)..(168): n is a, c, g, or t
  misc_feature (170)..(170): n is a, c, g, or t
  misc_feature (206)..(206): n is a, c, g, or t
  misc_feature (441)..(441): n is a, c, g, or t
  misc_feature (443)..(443): n is a, c, g, or t
  misc_feature (557)..(557): n is a, c, g, or t
  misc_feature (631)..(631): n is a, c, g, or t
  misc_feature (640)..(640): n is a, c, g, or t
  misc_feature (757)..(757): n is a, c, g, or t
  misc_feature (795)..(795): n is a, c, g, or t
  misc_feature (866)..(866): n is a, c, g, or t
  misc_feature (880)..(880): n is a, c, g, or t
  misc_feature (1004)..(1004): n is a, c, g, or t
  misc_feature (1062)..(1062): n is a, c, g, or t
  misc_feature (1112)..(1112): n is a, c, g, or t
  misc_feature (1136)..(1136): n is a, c, g, or t
  misc_feature (1475)..(1475): n is a, c, g, or t
  misc_feature (1477)..(1477): n is a, c, g, or t
  Peptide Sequence Number=SeqID_6491
  Probeset Number=SeqID_12691
ggggggggtgggggggggttgcgnnttnnttgcggcgncnnntnataatgacntacattanancacaccctaccacgacaagacgtatttgtgggagatanntgntaatgtagagtaatattntannacccctcctgatnnnnnnaantnccacgcccactcgcagcncntcatatatactacccaactctccactactgttactnctattatctactcctgctcatatcaatatctacttaaattgatatcatctctcatactatgtgtgttgtgatatagaataatgtggatcagaggatatgataatgtaatcatgattaacaatatcgaacaccatgtaatcattatatacctgcacatacgtagctagtcacacacgcctctctcagcaccgcggctcgttgcagggactggagcgtatagtatcaaccctacctnanaatgtaatatatgagcacacacacactacactctcaaagacatgtcatatgtctgacaaactgactataacatcgccagacttatatccaccctatgtctactactgcatgtcntcatacatctcttcactcgtattttgctactcttcatatctactcacgagatcgctatatgctatacattgttntgattattnaattatggctatatcggcagatcgattactcatacgtctgcgccgcgatcttctcttctactcgatatatatctgtattctctcccagtgtctacgtagatactccactcacgttcncgtatgtataatacgcgcgtaatacgttatgtataganatcacgtaatagagtatagaatactatatataatacagagaatacgaaacgatatcgctacatcaataatncacgcgcgactgcncgcgcatcatggcaatagtagcactatgtgtactctagactctagatatactatcactaaccatcatagtgtatcaatacttacatcagagatagtaattagcaaatacagtaagactgtattntataactagacagtaactgtagtaagaatacgacaccgcataccaccgctgtgtatgnccgacgacacactttactcgctccgcacactcagaccgtgcgtggcgtgnacatgcatatgatatatacgatgntgtgctgaggctagagtaataacgagtcacaatcacgatcattactatcgccgatcactcatcctactctcgacgcctagcaaccatcaccacaacaccctcacgcgcccactacctcacgtcttcgatcgcgacgcggctgagcgtgtgtgtctcattcggatatataatatgcgctcagcacctgtcgcctactctcaccaatactcgcatggagtgatctatcaccacgacagagacattcaattcatatatctgctatgtgatacaactctcacgacgtccgaaatgaaacggtgatcacggcatcaacacacgatccgtcacaacatacaacananaatattcatataactacatcaagtaaggagacaccgttacatctcatcacacattcgtgtcatatactttcgtaatgcgacactccaccaccaccttctgctattggtgcagcctagacatcaacgatattggcagagttcgcaccgaatataccgaggacgaccgccaccgcacgcttctcatcaccacgcgaatcgtgatcatccgatcacatatgcgaccgcg

SEQ ID NO: 2913 - DNA, 1657 bp, Glycine max
  misc_feature (14)..(14): n is a, c, g, or t
  misc_feature (23)..(23): n is a, c, g, or t
  misc_feature (52)..(52): n is a, c, g, or t
  misc_feature (81)..(81): n is a, c, g, or t
  misc_feature (158)..(158): n is a, c, g, or t
  misc_feature (190)..(190): n is a, c, g, or t
  misc_feature (363)..(363): n is a, c, g, or t
  misc_feature (386)..(386): n is a, c, g, or t
  misc_feature (430)..(430): n is a, c, g, or t
  misc_feature (684)..(684): n is a, c, g, or t
  misc_feature (687)..(687): n is a, c, g, or t
  misc_feature (779)..(779): n is a, c, g, or t
  misc_feature (949)..(949): n is a, c, g, or t
  misc_feature (970)..(970): n is a, c, g, or t
  misc_feature (992)..(992): n is a, c, g, or t
  misc_feature (1009)..(1009): n is a, c, g, or t
  misc_feature (1017)..(1017): n is a, c, g, or t
  misc_feature (1024)..(1024): n is a, c, g, or t
  misc_feature (1083)..(1083): n is a, c, g, or t
  misc_feature (1157)..(1157): n is a, c, g, or t
  misc_feature (1170)..(1170): n is a, c, g, or t
  misc_feature (1175)..(1175): n is a, c, g, or t
  misc_feature (1183)..(1184): n is a, c, g, or t
  misc_feature (1190)..(1190): n is a, c, g, or t
  misc_feature (1249)..(1249): n is a, c, g, or t
  misc_feature (1275)..(1275): n is a, c, g, or t
  misc_feature (1286)..(1286): n is a, c, g, or t
  misc_feature (1319)..(1319): n is a, c, g, or t
  misc_feature (1329)..(1329): n is a, c, g, or t
  misc_feature (1379)..(1379): n is a, c, g, or t
  misc_feature (1381)..(1381): n is a, c, g, or t
  misc_feature (1384)..(1384): n is a, c, g, or t
  misc_feature (1391)..(1391): n is a, c, g, or t
  misc_feature (1409)..(1409): n is a, c, g, or t
  misc_feature (1429)..(1429): n is a, c, g, or t
  misc_feature (1449)..(1449): n is a, c, g, or t
  misc_feature (1457)..(1457): n is a, c, g, or t
  misc_feature (1513)..(1513): n is a, c, g, or t
  misc_feature (1530)..(1530): n is a, c, g, or t
  misc_feature (1535)..(1535): n is a, c, g, or t
  misc_feature (1545)..(1546): n is a, c, g, or t
  misc_feature (1556)..(1556): n is a, c, g, or t
  misc_feature (1566)..(1566): n is a, c, g, or t
  misc_feature (1573)..(1573): n is a, c, g, or t
  misc_feature (1584)..(1584): n is a, c, g, or t
  misc_feature (1591)..(1592): n is a, c, g, or t
  misc_feature (1599)..(1600): n is a, c, g, or t
  misc_feature (1606)..(1606): n is a, c, g, or t
  misc_feature (1617)..(1617): n is a, c, g, or t
  misc_feature (1620)..(1620): n is a, c, g, or t
  misc_feature (1626)..(1627): n is a, c, g, or t
  misc_feature (1632)..(1632): n is a, c, g, or t
  misc_feature (1643)..(1643): n is a, c, g, or t
  misc_feature (1645)..(1645): n is a, c, g, or t
  misc_feature (1654)..(1654): n is a, c, g, or t
  misc_feature (1657)..(1657): n is a, c, g, or t
  Probeset Number=SeqID_12692
gcgcgccacgaccnacctccccnctccctccccgttccactactcactacanaagagtagttgacgcgcgcgacctcgccnctatctcgcaaatagtagagcaagaactgccggaggatccgccgcgcacatgacagcacgaccttctcctaacatcnaacacacacacactcctagtcacgcagatacncgtgctctctccgcccgacatgaaaacttcatccacagacctgcttatagtatgcctcctctgtgagctacgtcgcacgcccacacctccaccgtccgactattgttctcgcgccatccgagtggcgcgacgacgatctatcgctgtctcgtctagatagctagcagtatatntgtataatctcctattatacgancaaattatgctctactatcagagctagttatcagtgagaagcgnaccgaaaggcgctacatatacttgctcacaactacactagcgggccgctgacacctatcacagaagtgagcacgtctctactcagttctgtacgtgtcagtctgcgctcgtgcgtgatcagactgaagcgtccgcgtcccgccctctctgcacacccgcccagtcgccgcgaacgcgccgcatcccgacggcgcgacgcgcctcggcagcgtgagcgctgcagcatgtctcgacgccacacaccggccccgcgncgnaggccgcgtaggccgcctactatacctcgcgcgcacacggcagtcgcgccacggctccgctctgccgcgacgatgttcgcgtgctggcgatncgacgatgacaccatgctacgcctcgactctacgactcggagaccgtcgctgctcgatgctctgaactctacacacactgcatgccgtagtcgcgccgccttctccacctctccactcgagatgcatcgctacgagagtgatcgcgtgctatctacgtcgtcaccccggnagcgatcggcgcgagtgcgcnagagtccgaccgcggtaaccgncgagagcaggcacgagngctacggntcgcagntctcgagtcgctcgcgatccgctccgtcgcacgatgacacgaccgtcgctgcgcgacgncagtcccgcgctcatgagaatacacgtcgcatcgcgcacgtgcgatctgcactcgcgcgtccacgcgcatcggntgcgcgccgcacncacgncgcgcacnncgccgncgacgacgcgcgtcattgagtcgctcgcgtgcgcgtagcgtcgcagacatgtcagcganagtctctcgttcgcgcgcgtcctcgncagactgctgncgaggtgaggtgcgatgcgcgcacgggacgacncacgaccccntgactcgagatgcgcgcacccgacagctgctacggcatcgcacatcgacngncgnatgcgancgcgtgatgtgctgcctncgcgcgatccgcgacgaccntagaacgtgcatatcctcgncagcgcgntgagcgcgtgcgcgctgctctctcgcgcagcgcgcgtacgtcgtcgcgcgtcacgnctcgcgcgacgcgtcgncgcanacagacgacnncgcgctgcgntgctgccacntcgtcgncgtgacgcacncagcgcnnctccggnntcgcgncgtcgtcccgncgnccggtnntacgnctcatacgagntncgtcgacgncgn

SEQ ID NO: 2914 - DNA, 949 bp, Glycine max
  Peptide Sequence Number=SeqID_6492
  Probeset Number=SeqID_12693
taaaaacgatactcctgacgcgataaacctaaatcctatctcagcattgtttgctcagattgaaagacccatgtctctgttcccgatcttaaccgcctcgcttctcttcctcttctgcgttccggcccccaccgcagctgccgacggcgatttgccgacggcctccaacctcctccacacgctacaacttccccgtccggattcctcccccacaggactcttgtcgcaccgatccggaccacaccccaggggaagctttccaccgcctatttccgaccaagtcgctgtagcttccccctccaccccccccccccttatcaccccgaaccgaccaactccggccccctctccgagcccgaccgtactcgcctcaccgccccgcacccccaaggttcttaccggcggcccccaaccctcgagcttccccgggaccccttcgcggccgcgtcctccgccccccgcccggcgcccatccctgcgtaccgcaaaccacacaaaaccttcgcacctcttccccccacacatcgaaacaattacacataacacgacaataaaaactcttctcaagttcatattgagcgcccgacacttttctaccacacaatcccaccacccacacacgagcgggacgtagggcgggcgccttcctaattatggcacacggtgactaatcaccacctccgctctcttccccgcccaacctctctctctctctcttgtgggtgggacactttttttatcttcatattcacttttcgctagtcttctagtgaggcggagtatccctctctacgctactaccacgaaactacaccaatctgggcaacagatctatcatatcgattccactcacacatcggggctctaatcccgaccaaactctacgtacaaatacaccgccactctcgtcacccacataccacccccagcacacaacaaaccccccccc

SEQ ID NO: 2915 - DNA, 2345 bp, Glycine max
  misc_feature (8)..(8): n is a, c, g, or t
  misc_feature (41)..(41): n is a, c, g, or t
  misc_feature (144)..(144): n is a, c, g, or t
  misc_feature (175)..(175): n is a, c, g, or t
  misc_feature (191)..(191): n is a, c, g, or t
  misc_feature (282)..(282): n is a, c, g, or t
  misc_feature (294)..(294): n is a, c, g, or t
  misc_feature (308)..(308): n is a, c, g, or t
  misc_feature (312)..(312): n is a, c, g, or t
  misc_feature (324)..(324): n is a, c, g, or t
  misc_feature (376)..(376): n is a, c, g, or t
  misc_feature (392)..(392): n is a, c, g, or t
  misc_feature (423)..(423): n is a, c, g, or t
  misc_feature (427)..(427): n is a, c, g, or t
  misc_feature (431)..(431): n is a, c, g, or t
  misc_feature (443)..(443): n is a, c, g, or t
  misc_feature (450)..(450): n is a, c, g, or t
  misc_feature (453)..(453): n is a, c, g, or t
  misc_feature (462)..(462): n is a, c, g, or t
  misc_feature (483)..(483): n is a, c, g, or t
  misc_feature (551)..(551): n is a, c, g, or t
  misc_feature (557)..(557): n is a, c, g, or t
  misc_feature (560)..(560): n is a, c, g, or t
  misc_feature (563)..(563): n is a, c, g, or t
  misc_feature (566)..(566): n is a, c, g, or t
  misc_feature (630)..(630): n is a, c, g, or t
  misc_feature (654)..(654): n is a, c, g, or t
  misc_feature (656)..(656): n is a, c, g, or t
  misc_feature (665)..(665): n is a, c, g, or t
  misc_feature (673)..(673): n is a, c, g, or t
  misc_feature (692)..(692): n is a, c, g, or t
  misc_feature (697)..(697): n is a, c, g, or t
  misc_feature (711)..(711): n is a, c, g, or t
  misc_feature (714)..(714): n is a, c, g, or t
  misc_feature (718)..(718): n is a, c, g, or t
  misc_feature (724)..(724): n is a, c, g, or t
  misc_feature (778)..(778): n is a, c, g, or t
  misc_feature (781)..(781): n is a, c, g, or t
  misc_feature (797)..(797): n is a, c, g, or t
  misc_feature (801)..(801): n is a, c, g, or t
  misc_feature (863)..(863): n is a, c, g, or t
  misc_feature (884)..(884): n is a, c, g, or t
  misc_feature (906)..(906): n is a, c, g, or t
  misc_feature (926)..(926): n is a, c, g, or t
  misc_feature (950)..(950): n is a, c, g, or t
  misc_feature (962)..(962): n is a, c, g, or t
  misc_feature (966)..(966): n is a, c, g, or t
  misc_feature (981)..(981): n is a, c, g, or t
  misc_feature (988)..(988): n is a, c, g, or t
  misc_feature (1054)..(1054): n is a, c, g, or t
  misc_feature (1056)..(1056): n is a, c, g, or t
  misc_feature (1083)..(1083): n is a, c, g, or t
  misc_feature (1099)..(1100): n is a, c, g, or t
  misc_feature (1138)..(1138): n is a, c, g, or t
  misc_feature (1142)..(1142): n is a, c, g, or t
  misc_feature (1198)..(1198): n is a, c, g, or t
  misc_feature (1207)..(1207): n is a, c, g, or t
  misc_feature (1213)..(1213): n is a, c, g, or t
  misc_feature (1218)..(1218): n is a, c, g, or t
  misc_feature (1311)..(1311): n is a, c, g, or t
  misc_feature (1319)..(1319): n is a, c, g, or t
  misc_feature (1325)..(1325): n is a, c, g, or t
  misc_feature (1336)..(1336): n is a, c, g, or t
  misc_feature (1341)..(1341): n is a, c, g, or t
  misc_feature (1350)..(1351): n is a, c, g, or t
  misc_feature (1354)..(1354): n is a, c, g, or t
  misc_feature (1388)..(1388): n is a, c, g, or t
  misc_feature (1405)..(1405): n is a, c, g, or t
  misc_feature (1422)..(1422): n is a, c, g, or t
  misc_feature (1435)..(1435): n is a, c, g, or t
  misc_feature (1446)..(1446): n is a, c, g, or t
  misc_feature (1448)..(1448): n is a, c, g, or t
  misc_feature (1451)..(1451): n is a, c, g, or t
  misc_feature (1460)..(1460): n is a, c, g, or t
  misc_feature (1531)..(1531): n is a, c, g, or t
  misc_feature (1600)..(1600): n is a, c, g, or t
  misc_feature (1645)..(1645): n is a, c, g, or t
  misc_feature (1880)..(1880): n is a, c, g, or t
  misc_feature (1930)..(1930): n is a, c, g, or t
  misc_feature (2003)..(2003): n is a, c, g, or t
  misc_feature (2072)..(2072): n is a, c, g, or t
  misc_feature (2107)..(2107): n is a, c, g, or t
  misc_feature (2162)..(2162): n is a, c, g, or t
  misc_feature (2179)..(2179): n is a, c, g, or t
  misc_feature (2181)..(2181): n is a, c, g, or t
  misc_feature (2258)..(2258): n is a, c, g, or t
  Probeset Number=SeqID_12694
cattagcnatcatagcgagttagacgtgacgcatcagttcnagacgtaatgtgctgcagaatctgatgtagatcgtagcgtagggttgtacagatgtcagatacgatactgcatgatcactgcatgcagatcaccacgactagntatcgctatcgcgagactagcgtatgtgacncacgaatagttcgacnactgacgagttagtgtgtcgatgcgcagtcagatcagagtgtcgctcacgtgtgtcaaagctcagtgtatagtgagacgatcaacgtggcngacagtatcacntagtcccatcgctnacgntgtctggtatantactcatgtctgatcacaggatgaatgctatcggtacgagtgacatctggcntgtagttacgggcgcncctgtagcagtcactgtatgcatctgacgtnactngagngcacgacgtgtnatcatgntangacatgcantagtcatcgtgagagagtacnataggatcacgcttatatctgcatgagacggcgtcgggaattcgacgactgacgtgacgtagagaggntgagcnganacnacnatcactacgtcgcgcagtcagtcgctacacgacgatagcagatcacatgctcccgcggcacganatgagcgatactcatgcagggatngntgtacgtcngaaagcantgcactcatcatgacagtncttantgacgctagatagntgnttantatcgnagggagatgcttcgcgacgttgtagcgcatgtacgagacgcatacatagcagcnatngtacgttggagccagnatanctgagcggtggctgaatcctagatacacgtcagtatgatgggagtacatcagagtaaagagnagggaagagcacgaggactgnagcgatgactgcacgatggatnagtcacgaagatgacgatcntatgtgtgatactcgactacgcgnatatcgctcagncgtntggcagtgacgcgtngtgacgngaggtgagagtacgtagagcacgatggctgctacatgacgcagtagactgctctatcgcagcgcgnantctcagacgaggtgcatcatgacatgntcgtctgctagagtannacagtatctgcgactcatgatgtagtctctttacacgncatnagacgtctgctctgcatagctgcgcgtctagctctctatcactctgctctgaccancgcatcgantcctangctcnctcgctcgatctctgcatcgctagtctcctctgctcgtcgcgacgtgaggttcgcatacagcgaacttgatacatcgcactacactctgctgntgcatacnagtgcntcagctactanggacncgagtcganntanctcaagaagtcggcgtagcagtagagctagctantatgtatgcatgagtantgacgtgacgacgtcgngcagatggcagantatagctctgngncantctagctcntctcgtactgactcagcagatcgcgcagtgtgcacatgtatgtcacgttctcctgctctctgtctacgatntcactacgccatcgacttccgcgcactctccttgtaaactgctgcgtcgcactccgctcagtcactgancatctagtggcttctctaccagtcgctgtcatcctgtagtatatngactgctacgcgagcctagtcgactagagcgcggcagacttaacgctataaatagtaactcaggtatgcatgcatcatagtcgatgctgcatgatggcatcactactgtgtcaagatcccagcgcacggtaggtctggctgtgatagctcagcagatgaatctgatgataagacatctctctcgctgagcggactatgacgcatagtgtacacacttcgcgtgtacagacagcgnagcacagactgatacactctgcagagtcactgatccgcactactaccganacctcgattcgtgctcagaagcgtgactattaccagagatccacaaggacatcggcgagtgatgataacgagnagtctgcactcgctgacagtgcgtgtacggcagtacatatcggttcgtgcatgagctctagacacacgnatactatctgtcgcgcgagacgtcacacttccatngatactatcgctcacgcctcgactacagtacgtgtcgcgcgtgactacagcactnctctagcatctatcagngnagcgagatagtggcgacgtaggtcgcgcagcgtgctgtgatagcacctacgtcgtggagatggcaagcctcgcactnctgttactcaactagtcgtcgtacgtccacgtcgtccatcatcacaccgttatagtagtgaaccttctcttcctgcggcgctcgcgc

SEQ ID NO: 2916 - DNA, 885 bp, Glycine max
  misc_feature (1)..(285): n is a, c, g, or t
  Peptide Sequence Number=SeqID_6493
  Probeset Number=SeqID_12695
nnnnnnnnnnnnnnnnnnnnnnnnnnnnnnnnnnnnnnnnnnnnnnnnnnnnnnnnnnnnnnnnnnnnnnnnnnnnnnnnnnnnnnnnnnnnnnnnnnnnnnnnnnnnnnnnnnnnnnnnnnnnnnnnnnnnnnnnnnnnnnnnnnnnnnnnnnnnnnnnnnnnnnnnnnnnnnnnnnnnnnnnnnnnnnnnnnnnnnnnnnnnnnnnnnnnnnnnnnnnnnnnnnnnnnnnnnnnnnnnnnnnnnnnnnnnnnnnnnnnnnnnnnnnnnnnnnnnnnnnnnnnntttcccccctctcccgtgggaaataaaaaaccccccgcgggctccccataatgtaaaattgtgttccaccccgccttctggggatccaaagaaaccattggggcccacataggttccctcctttataaacgggcgcttggcggtccctcaatcaagtggggacggcacttgtttatgggccccccaggggctactgattttatccccccgaccttaaatttggggggattttagggggaaaaatgctttccccgggaaccaccgggccccaagttttcccgaatttttaacgggtcccaatttagggcaagaaggtgccccgcccaaacccggcccgaatcaattatcccgggcgaaaatagggaagaggcggggggcccccccgttacggtcccggtatttttttttttttttttttttttttttttttttttttttttttttttttttttttttttttttttttttttttttttttttttttttttttttttttttttttttatcattacacaactaatatgttaatctttgttatcgtgagtgtaaaaattaactttacaaattctaattacaaaagcaaaattgctgccaaaaaac

SEQ ID NO: 2917 - DNA, 218 bp, Glycine max
  Peptide Sequence Number=SeqID_6494
  Probeset Number=SeqID_12696
attcatacgatttacttacctagctggctagcttattctctcaactgcatatgttcttgcattactggtttgtttaaatcaatttattttttctaacacatctcaggaatgccagcacacaaaccagttgttgggttatcatggcaaccacagttgcctattccatcatcattcaaagccactgatgggtctcataccaaacctcaaactgaggcatc

SEQ ID NO: 2918 - DNA, 341 bp, Glycine max
  Probeset Number=SeqID_12697
acgcccacgcgtccgcccacgcgtccgcccacgcgtctcgcggacgcctggggttcggtgggctggtacctctgtgtccgtgagtgctatggagacaggaacctactgtctggtggatgaatcatgaccgtgtgatcatgagcgtgattaacggcccgggtgagtttctctttggagtagtctcatctttggctgttgaggatcgttcttaggacacttccatgtgcctgggaatgggcatacgcggtgtctgacagaccttatgtgaatctaagacctaacagtatttgcgctggtggaggcgaccgctatgtgggatctgtatgaattgctggagaacc

SEQ ID NO: 2919 - DNA, 1444 bp, Glycine max
  misc_feature (17)..(17): n is a, c, g, or t
  misc_feature (378)..(378): n is a, c, g, or t
  misc_feature (778)..(778): n is a, c, g, or t
  misc_feature (788)..(788): n is a, c, g, or t
  misc_feature (1138)..(1138): n is a, c, g, or t
  misc_feature (1248)..(1248): n is a, c, g, or t
  misc_feature (1341)..(1341): n is a, c, g, or t
  misc_feature (1347)..(1347): n is a, c, g, or t
  misc_feature (1412)..(1412): n is a, c, g, or t
  Peptide Sequence Number=SeqID_6495
  Probeset Number=SeqID_12698
aaataagaaccatatanttgccgtaccttcaacattatattctctggtcttatgtatccttatctgttgtgtctcgtccgatctcgaattggttattttgctcgtctcattctcctccttatagtattgggtgtaatgataataggttgcccgactgaccctccaatgtctaatatattcactgtttctaatagaaataataggatgatatatgtatgcactggagaaaggggcatagccacgcaacaacgcccacgcacccgaagatgtcgggtgttttgaggggtgtcataagactcttcttcagtatggcgtctacagattagggtcactcatctcacaccccgacacctgggtaatcgaatgacatattttctnttgcaggaagtcgggactacagaatttgttactccctcctcttgtgcgatgtgttgggtgcggtggctgtggtgcggactcataaatttattgtagttgatgaatacattatagcaacgtggggcagattatagacgccgccgcgcgaccagtgcgcgtgacgtgctgcaaatagctcgatatcggatattatcctatgctatatgttgtgccacgcggctaatgtattaatacttgaagaccgattattatattctcatcaatcaccgacttcttaatttgtcctaacatcaggttgtgcttatatggatgcggttgtgcgaccgtgtgtattgatgattggacattaattataaatccttcatccgtgagattataatttcgagattagggaccgccnggtagaggancgcaagatcatgaaatgggaaaggacgagcggattatcgtgtgataccgatagatcgtattatttcccgctattgcatatcccctttcccgggcacgttccgttaatctccctcgacattttcttattgccactcctgtttataccattttttcattgggttctgttactccactctatcaactaaccgcacactcgcctatgttctttacttactttcgaatctacggccacacatagagttgatctacatatattattattacttctgcatataatatgtcttatggctgtgagcgttacagataatatagtatgataacatctagagcgatcgtagttagataagangcgacgcgctgtgtcgatgatagcgagacaacacaccacacgtcttggatagatgtgtccgctcggcgatgaagtccttagtggtattacacgtatgtaggacgcttggnggaagaactaatatgcgcgtccgcagcacgtgtgtgtatagtaatattttttactgatgtggcgggatgtattgacgcctcaaccaccgaccncaactnctgacatcgcgataaaatatacatcagtcgtctgagatatgcatatccgcagacgctgtatatancactctatacatacatatatcgggttctaatg

SEQ ID NO: 2920 - DNA, 1817 bp, Glycine max
  misc_feature (913)..(913): n is a, c, g, or t
  misc_feature (1032)..(1032): n is a, c, g, or t
  misc_feature (1330)..(1330): n is a, c, g, or t
  misc_feature (1423)..(1423): n is a, c, g, or t
  misc_feature (1467)..(1467): n is a, c, g, or t
  misc_feature (1491)..(1491): n is a, c, g, or t
  misc_feature (1532)..(1532): n is a, c, g, or t
  misc_feature (1545)..(1545): n is a, c, g, or t
  misc_feature (1552)..(1552): n is a, c, g, or t
  misc_feature (1555)..(1555): n is a, c, g, or t
  misc_feature (1671)..(1671): n is a, c, g, or t
  misc_feature (1743)..(1743): n is a, c, g, or t
  misc_feature (1764)..(1764): n is a, c, g, or t
  misc_feature (1781)..(1781): n is a, c, g, or t
  misc_feature (1810)..(1810): n is a, c, g, or t
  Probeset Number=SeqID_12699
ctactcacactacaatccacagcacaacacacctgaccgctcgtcaattctacatctctctctttctcataaatatcttgagaagtctcccatccgtcgggctgtgtcgggtacgtcgttctttacacactaggaagaggaatgtccctcagtggcctcgccagcggacattagcttatattatcaatactcttttattttttccatcgcatgctataactatacacaatcatcaaccaatacgagtaccgtagaactagttatgacacacaccggagtcactaaataggaatagcgatgaacggacgtctgagcttatacgaaagtgacattctttcgtgtatagcgccgagagaggactgactatcaaagaaattcatggtagcattttatctttcacctgctactctgactatcagcgtggtctatagtatgagattgattatacttcctcactcctcacctatgtataacaagctcgcagcctcagcgaaagatgcatctaagtattctctatggacttcaatattcaaccaactgtgagatcagattgagctccatactgtatcaatctcatctgcaggcgatcacgatcacatatcggccagatctccgttcggcgagaaacagatcatgtttgctttccttagcactcattgactttaccacggaatacgttatgcctcaccacacgacctagcattctgccgtgttctcctagcacacggagcggtgtgaacgagttcaaccaggatcgcctcattaaggaattcgttattggcgcggcaaagacatggcttcaccagtcgtaacgcacattagatttatatctacataagagtgcactgtacgacgcgaactacaacaaccgaactaacaactaatatatgatgacatgaattaacactgacgncgcgatgatcctgaatcctgatgagttcaataaatgacaggcctgtatatactatgtgtgaagagtatatatgaaatattcgatacgcatccaggtataatcatcacgtcgattcgatntacgcatgtctattctattcctcgcgacatctatctcttcaactacctgcgaatgtacgaatcagtgttgataacatgacgtcacgtagatcttagacatctatgaatgaactatctctgtatgcgagatatacaaacgaagcagactcgcgtgcgatgtgctcatggctcatcagagtgctatactcgtgctcttcgacgcctgactacatacgtgtatatctagcatgctctgatcgcgcgcaacacacagagtgacactatatatcatgagtcaacatacgcgaacggtatatanttgataagcgaacatcgagaagatacggaataccacaccatgctgagtctcagtgacatgtctagtgaatcaaccgtcgagaccagatagtgncactcactatgctcactcatgctgtgacgtagggtgcttatatncactaatatctgacaacgtcaaancgtgatcgcgcatctagtcacagtgcatgtatagatcacantcgtctcaatganctcgtantcntcatatctagagctgtctctttatctctgttgatgtctcatatatcgaagtgtatcatgtacactatactctgcaggcctactagatgagctgtcagtatgcatgtctctcatcantcatatcatgactggatcactagatagctcaaactgtgacgtactacgtgacgactatgacaacacgtctcntcaaagatgagcatctatgtngctcgtctgcatcccanatgcaactatagtaccgacatcacaacantgcgtac

SEQ ID NO: 2921 - DNA, 1613 bp, Glycine max
  misc_feature (17)..(19): n is a, c, g, or t
  misc_feature (24)..(26): n is a, c, g, or t
  misc_feature (32)..(32): n is a, c, g, or t
  misc_feature (35)..(36): n is a, c, g, or t
  misc_feature (38)..(39): n is a, c, g, or t
  misc_feature (42)..(42): n is a, c, g, or t
  misc_feature (69)..(69): n is a, c, g, or t
  misc_feature (87)..(87): n is a, c, g, or t
  misc_feature (96)..(98): n is a, c, g, or t
  misc_feature (112)..(112): n is a, c, g, or t
  misc_feature (205)..(205): n is a, c, g, or t
  misc_feature (228)..(228): n is a, c, g, or t
  misc_feature (236)..(236): n is a, c, g, or t
  misc_feature (242)..(242): n is a, c, g, or t
  misc_feature (249)..(250): n is a, c, g, or t
  misc_feature (281)..(281): n is a, c, g, or t
  misc_feature (283)..(283): n is a, c, g, or t
  misc_feature (333)..(333): n is a, c, g, or t
  misc_feature (380)..(380): n is a, c, g, or t
  misc_feature (463)..(463): n is a, c, g, or t
  misc_feature (579)..(579): n is a, c, g, or t
  misc_feature (595)..(595): n is a, c, g, or t
  misc_feature (621)..(621): n is a, c, g, or t
  misc_feature (668)..(668): n is a, c, g, or t
  misc_feature (696)..(697): n is a, c, g, or t
  misc_feature (701)..(701): n is a, c, g, or t
  misc_feature (718)..(718): n is a, c, g, or t
  misc_feature (739)..(739): n is a, c, g, or t
  misc_feature (744)..(744): n is a, c, g, or t
  misc_feature (746)..(746): n is a, c, g, or t
  misc_feature (751)..(751): n is a, c, g, or t
  misc_feature (794)..(794): n is a, c, g, or t
  misc_feature (938)..(938): n is a, c, g, or t
  misc_feature (1181)..(1181): n is a, c, g, or t
  misc_feature (1331)..(1331): n is a, c, g, or t
  misc_feature (1344)..(1344): n is a, c, g, or t
  misc_feature (1404)..(1404): n is a, c, g, or t
  misc_feature (1507)..(1507): n is a, c, g, or t
  misc_feature (1513)..(1513): n is a, c, g, or t
  misc_feature (1613)..(1613): n is a, c, g, or t
  Peptide Sequence Number=SeqID_6496
  Probeset Number=SeqID_12700
ggttgtgtgtgctcccnnnttttnnntttttnttnntnntanaattataatatctacctcacaaccacnacacacacaccgaagccnagaatgagnnngccgaattgtgtgncttgactgcgcactgctcacacctctttcacacagggataggtattgtattgtcaatattgtacgtatacttagcaggaggcacgagagaggnatgggttgtatatcgcctccaanaagatagnacaagnacacatnntataatacacataggtccgggcagcaggaananataccagatataccgcagaacgcccacaacatcactcgatttgtatcatncctaccagttgcgggaatagaaacaaatcactagtaacacttacganagcagtaacatacacactctcaggcttcgcacgcgcgccgccgatctgcgacgctcgcgctactctcagtatcagcgatgtantgttcgccgctgtgcgtggatgcgcgcggcatcgtttaacaaacattctaatacacgaacgagacataacaacactacaacagtcggaatccaaaaagaacgactatacgagagantgtaatattgaagaantgtgaaccacaccataatgttgactngctggtaaaaatgtaatgagtgaatacatatctggtgctcggcaagntcgtctcggcctccactcctcgatgatnngggnggtgtggttgttgtgcngcggtgatgatgttgtgatgntcttngntaatntaggtgtgatgactcaaacataacactacaaacatacacaatntatcactctcgcgcatgtgaagtcagtccaccacccaagagtattacttacatcaaatcactattgattacttatgatgcagtgattattatgcgtagaatcatctcagtgttataccagtagaatgtataaaagtaaaaaagnacgacaccgacaacagacagacatcctcactcaccgcacatccccggcgtcgtctctcatataatgctactgccatgttctccacttctatatacgatgtaagatctatcatacaccgccgacgataggaacacacataaacacatatagtatcgagcagacgtcgctcttctccactcttatttgcgcgcactgacataacgtctacgtgtacatacacacctctcgttagtgttcatatcntcctgcgcacttccactcatcgtgctcctcggtgtacgtgtttaaccgcatctcatactcattctatataagagtctacgtcaattatcatggctagctgtgtataaatatagtgcatgatgatacattactagatgctcacacatgccncgtttataagatncgatctacactcaagatcatcgcccttaaccacaacagagagtggctgttatgtgatgcncacgtgagactcatatctcaccttcactacctatgattattatatgcatcataatacagtatatatgctaaatatatgatatactactatactcttgatgtcnatccantctgatctatattgtctaccctcctctctcttctgcgtactgtatcgtagccgactatctgtgctgtagtttcagcttagctctggtgtcgtctgctagn

SEQ ID NO: 2922 - DNA, 1659 bp, Glycine max
  misc_feature (24)..(24): n is a, c, g, or t
  misc_feature (26)..(26): n is a, c, g, or t
  misc_feature (33)..(33): n is a, c, g, or t
  misc_feature (46)..(46): n is a, c, g, or t
  misc_feature (226)..(227): n is a, c, g, or t
  misc_feature (249)..(249): n is a, c, g, or t
  misc_feature (253)..(253): n is a, c, g, or t
  misc_feature (320)..(320): n is a, c, g, or t
  misc_feature (354)..(354): n is a, c, g, or t
  misc_feature (410)..(410): n is a, c, g, or t
  misc_feature (422)..(422): n is a, c, g, or t
  misc_feature (512)..(512): n is a, c, g, or t
  misc_feature (547)..(547): n is a, c, g, or t
  misc_feature (566)..(566): n is a, c, g, or t
  misc_feature (575)..(575): n is a, c, g, or t
  misc_feature (594)..(594): n is a, c, g, or t
  misc_feature (628)..(628): n is a, c, g, or t
  misc_feature (711)..(711): n is a, c, g, or t
  misc_feature (777)..(777): n is a, c, g, or t
  misc_feature (839)..(839): n is a, c, g, or t
  misc_feature (850)..(850): n is a, c, g, or t
  misc_feature (862)..(862): n is a, c, g, or t
  misc_feature (1067)..(1067): n is a, c, g, or t
  misc_feature (1378)..(1378): n is a, c, g, or t
  misc_feature (1600)..(1600): n is a, c, g, or t
  misc_feature (1637)..(1637): n is a, c, g, or t
  misc_feature (1659)..(1659): n is a, c, g, or t
  Probeset Number=SeqID_12701
tggatcgtggggtgtgttggtgtncnggctggngtggggtgtgttnccggcgtggtgcttggtctggttctttcatgtgttccgtggtgagtttcttctatcgatataatgtgttcgttcgtatacttgaagggtaggtatgtgttgtgttttgtagttttaatatagtcctgtttctctaatctccgtacactagaagtggtgtagttttagttatatatatatnnataggtgatagtgatagagagnatancttaatatatgtgtgtgtttgtattgccaatattgagtctattatttgtgagacgcgctcggaacanggtgtagtggcgtatagacggtctgccagcgctncgtagaaggagacaggcatggcacgtatgtcgatgaggcgaagaatgtgagttgtngtgagcgaggangaagaggcagagtgagggaacggagaaaggggaaggagaatatgagagagagagacgagtgagcgtaggacaaatatatagataggatgntatatgactatgctattgtttctattatatgaccntcttgtgttatattatcgnaagcaaagnaacaaagcaccaaacaacncgagaagatacaacaaagaaaaaatcgcaacccnccaatcataataagtatctattaccctccctcctctatatcactagcgccatctcggtccacaggacaaactcacacacacgnagccgccggtgcgccggcggtcggtgccgagcgtgatcatgtatatacatatagtaacgacatatntataagtcaggctgtgtataatattcatgagtgccatttacataatacatgttctcaggtgntatgtattgtnagagaaatacangacgataacgtgaaatgaatatacacaagaatataaagaactttattatgaaataatgcaatcgtattctatattgttgacactctgcatcctgcgcgcataccgatatgttagagaagctctatatataacatgaatgctacagacatgaacaacttaatccacacacaatgataagtagtgaaaatatgaagtaacaacaganttcacgagatactcgatatgatataatcctaagttgaagaattatatatgtgtgttgtatgcggtgcgggagtaatttatgcgatgattatttgtgtatagtggctgtatattatagcgacgtgtactggaatgtattgtattatgtagaatagatggtagcgctccatgatatcatatatagaatgatagtgtgtgtgttgttcgtaatagtaagaagaatatagattatatattatgatggattataatcatgtcttgtgtaaagttaaggtcttgtgcagtgtcagcacgacatatcgactatgctantatcatagaacaagagatactgtataagagacatcgctacacacaaagaacatacatagacatgcgtgcgtgctgccggtgtgctgtataccgtcgggtgtcgaatcgatggccgtcttgagaagggaccgtctcgtagcgaaatgagcgatatatcatcgtcgtcagtatgtgtatcaccgggaaccttcataatgtacagatcgacgaccacggggagcncatgtctcacgctgcgtatgacccagtcgtctagctnctcatctactttgcatactggn

SEQ ID NO: 2923 - DNA, 686 bp, Glycine max
  misc_feature (686)..(686): n is a, c, g, or t
  Peptide Sequence Number=SeqID_6497
  Probeset Number=SeqID_12702
gagtcagctacgtaggccccccccccttttgtaggagcttcacaatgttactttgctgctattttcttttttcttttttttttttttgtgtggaggcaagtttgttttattgttgttattattattattacttgtttggttatcacatattatttttgttttaaattgaatatatatatattcttgtaaataaactgaacaaatacgtccatatagtcgactgttgtaaagtgtaaactaatcaaataccttctgatgtcactttttacggctcaaaagtacatgtgtttagaatggcgggaaaaaaaaaccttgttaagtgttatattaacaaagtacttgaagcttcttatttttaatgaaaagtgattaatttatattgtgatatggaataaaatattcagaaatattcatcaaacttttttttttggtgaatcagagatattcatcatttgttccttgtggtaactggctaactggattcgtgaactatggtcaataaatagactaaactgcaagctgtagtggtcaaagtttcatgattatcatatcaatagtttatttgtaactacttaatatctttatgaaaagataatcactttggaatgtttctggggttgaatacattttgaatttgacttctttttttggggatttgactaaaacactaacaaatagctggatgn

SEQ ID NO: 2924 - DNA, 571 bp, Glycine max
  misc_feature (521)..(521): n is a, c, g, or t
  Probeset Number=SeqID_12703
aaatggccaaaaaacatgaagttgttcacgttcaagagcaaccatttatacaaaagattacagaaccaaccaaatttgaagaaatcaaagaaggctttggagctcctgtactcaatattaaacaaggaccagttcaccatgtagaagaaattggtgatgttcgccatgtcaatcttggtgaggatattaaagccgtcaccagacaagaattaattgaacgtcacattgtacctactgttacagaaatccgtgaacaaaaggttgtaaatgtaatcgaacaaccaattgttcgtaaaatcattgaaaaaccaatcattagagaagttactgktgataacacgttacctctcgtaaaagaraacattactcttcaatcacaatcatcatggaatgaagcagctccacttcaaagtaaaccaatcttgagtgaatcaacgttcaagcaagacgagatgagagactcttcattagaacgtgaaaaacaattaccacttgcccaagaatcaactcacgtcctcgtnggcgaaggtcacattaaaccagaacttcatcatggtgtatttagtgaaga

SEQ ID NO: 2925 - DNA, 1548 bp, Glycine max
  misc_feature (779)..(779): n is a, c, g, or t
  misc_feature (971)..(971): n is a, c, g, or t
  misc_feature (1082)..(1082): n is a, c, g, or t
  misc_feature (1092)..(1092): n is a, c, g, or t
  misc_feature (1278)..(1278): n is a, c, g, or t
  misc_feature (1541)..(1541): n is a, c, g, or t
  Peptide Sequence Number=SeqID_6498
  Probeset Number=SeqID_12704
cacacacaatccatcgacctacaccccacccacccccctctctctaatattccccttgagcttgggagttctcccgtcggctgcgcgtggcggcttctaataactaggtgcgatgcctcccgcggcctgtcagcgaatctcattctcttttctttcttcttcttttactatcttccagactccctctcttccgctccctacaggaaatgacaccgatcgaatgcaccttcgcaataaactattatgtgcggtcagatggctttccgtaactatgttacacgagtgagcgcctacagtacaactccacagtatagtatggaatattattgagaatcgtgtgtagcccactccgctcactgaaacacccactaccctcctcacagcggcggacagagtatcattcacacgaatactgcggttcctctagaacgatcgtctattagccacacagtcctcgtcaacagtggctacttatgttatctatggctgaccagcatagcctgctaggtaacataacacaagccaaacgtctcacgtcatattccattcgctgattgcccctaccagatctctttcacgttctcgttttcactctttttaagaaagactgtcgatccactgggtctctagcccttccattttagcctaagcgtcctcctctggctcgactccaatctggaactcatctctggacatatgaaatgctatcgttctgttcccaagacgcacccagccctcccttacaatctcatgtccttggtacgtataaacccgccgcncaccgcgactcaactataccataaacagatatctcttgctggaataactcaacaaagatcaaactcaactcaccccaacttttgtattgccaactccaagggcaacactcttccctcgcatagcggatgtttatgtcacacagtcgaacgcatcccttataatgccaagtaccggagcaaaaccgcgacttncgtgggatcttcgtgggacacacacgaaactcatagtggtcgtctgatagagcgacaactagaccaggtcgtatacgctagccatataatatactctgagtgcgtatacangctcgtgccntctgcaccgtgcatatcgtatatcattaatcctctcctcggtcagacagctacaacgcaatatagcatattgcactcttcatctctccgtgcgtgagagagaatacttacatacgtgatacacacttactccttccacggaataatatcgttgcggccatgccacacttcctctcacgaagaccantcgctctcttacgatatcaatgacccacacactcgcgagcatcccacaagaagacgaatagactctctctctgtggtcactacattcctgtcaccgatctgctcttctgccactcccgacgacgatactctccatgcagatatctgcatctgtcacaggtatactacacagctataatgagggtagctgggaggcgacgcgcgacattcatacattccactctgtccctcctacatgatgaggatctcactcgtggcccacgncaacacg

SEQ ID NO: 2926 - DNA, 571 bp, Glycine max
  Probeset Number=SeqID_12705
acttattcttataagatattaatttatttcttatcaactaaattaatatttattagtatcaaataaattttaaagacaaacttgaaaataatatatataaaatagatcttaaagatgaacttggaaaccttattgttgccccttggatcaaattttaataatgacatttcgttacgcgactttcaaacttgtacgcaaaatcaatctttccagatagacttttccatgccgtgtgggcaattttcacacggtcaactgtccaaacactattatgagattaagaatctaattaagtcttgtttttgttttattttttaaaaccaagttaactaaagaaaaccaaattattagaacaattaaataaaaataatgaaaataaaaaaaatttggtgttcaaatttatcttattttcaacccattttttaatctctattttcatttttatcacattatttgtcacgcctattattttttatttttgtttttattctcgttttcttccaccattatccttaaaaaaattgtaagccataaatttcaacatgcgtgtcagattgttggttctttaacc

SEQ ID NO: 2927 - DNA, 2135 bp, Glycine max
  misc_feature (35)..(36): n is a, c, g, or t
  misc_feature (57)..(57): n is a, c, g, or t
  misc_feature (97)..(97): n is a, c, g, or t
  misc_feature (105)..(106): n is a, c, g, or t
  misc_feature (122)..(122): n is a, c, g, or t
  misc_feature (124)..(127): n is a, c, g, or t
  misc_feature (129)..(130): n is a, c, g, or t
  misc_feature (141)..(141): n is a, c, g, or t
  misc_feature (148)..(148): n is a, c, g, or t
  misc_feature (227)..(227): n is a, c, g, or t
  misc_feature (263)..(263): n is a, c, g, or t
  misc_feature (265)..(265): n is a, c, g, or t
  misc_feature (269)..(270): n is a, c, g, or t
  misc_feature (275)..(275): n is a, c, g, or t
  misc_feature (282)..(282): n is a, c, g, or t
  misc_feature (284)..(284): n is a, c, g, or t
  misc_feature (306)..(306): n is a, c, g, or t
  misc_feature (318)..(318): n is a, c, g, or t
  misc_feature (334)..(334): n is a, c, g, or t
  misc_feature (339)..(339): n is a, c, g, or t
  misc_feature (380)..(380): n is a, c, g, or t
  misc_feature (406)..(406): n is a, c, g, or t
  misc_feature (433)..(433): n is a, c, g, or t
  misc_feature (473)..(473): n is a, c, g, or t
  misc_feature (481)..(481): n is a, c, g, or t
  misc_feature (514)..(514): n is a, c, g, or t
  misc_feature (546)..(546): n is a, c, g, or t
  misc_feature (732)..(732): n is a, c, g, or t
  misc_feature (756)..(756): n is a, c, g, or t
  misc_feature (758)..(758): n is a, c, g, or t
  misc_feature (807)..(807): n is a, c, g, or t
  misc_feature (811)..(811): n is a, c, g, or t
  misc_feature (865)..(865): n is a, c, g, or t
  misc_feature (942)..(942): n is a, c, g, or t
  misc_feature (945)..(945): n is a, c, g, or t
  misc_feature (957)..(957): n is a, c, g, or t
  misc_feature (966)..(966): n is a, c, g, or t
  misc_feature (1013)..(1013): n is a, c, g, or t
  misc_feature (1058)..(1058): n is a, c, g, or t
  misc_feature (1111)..(1111): n is a, c, g, or t
  misc_feature (1220)..(1223): n is a, c, g, or t
  misc_feature (1326)..(1326): n is a, c, g, or t
  misc_feature (1348)..(1348): n is a, c, g, or t
  misc_feature (1459)..(1459): n is a, c, g, or t
  misc_feature (1520)..(1520): n is a, c, g, or t
  misc_feature (1571)..(1571): n is a, c, g, or t
  misc_feature (1586)..(1586): n is a, c, g, or t
  misc_feature (1655)..(1655): n is a, c, g, or t
  misc_feature (1797)..(1797): n is a, c, g, or t
  misc_feature (1833)..(1833): n is a, c, g, or t
  misc_feature (1887)..(1887): n is a, c, g, or t
  misc_feature (1973)..(1973): n is a, c, g, or t
  misc_feature (2072)..(2072): n is a, c, g, or t
  misc_feature (2135)..(2135): n is a, c, g, or t
  Peptide Sequence Number=SeqID_6499
  Probeset Number=SeqID_12706
atggaaataacacacacacacaacaaacaaacccnncccccctcccgtcctgtctgntcgtggcgcgctccccatctggatgacacttatggagagntaatgtannttatattaatacaacnannnnannaaaagcggacnaaggcgnaagttgcgttatataagagtgagagtggacgaggttcggcttctctcactgcgtgcgcgacgcgcgagcttcgcctccncaatgtgtctctcccctcgtgtactgccatatcacncncgcnnagcancgtgcgntngatatgagcgagcggtaagganactagtagatantattacattctgatgnaatanataataaatgtatcgagacatacgacgtatcgatatcaagncatacatatgaatacgacgtataccnatgagattgtacaggagggtgtaggcnctcgatccgagactaggccggcagcgctctcgccgcgtgntgcactcntccgcacgtcgatcgccgagagccgcacagtangaggtagagaatggagcatgagagcagtaggncgagaggagagcgacagaagagaagcactataaggagagaaatagagagaagagaacatagtcacacgctaagcaagatagagctgcacacagatatggagcgacacaacgcgacgagcacgacgacgacacacgcactctcctcacactaactacatatcgaataacttactcgtcgacacaccnacacacacccacaccacagaccancncgagcgacgcacaacgccataatattctctacacacaaatattacgctnaacnacccactctcacgctctcacctctgcctccttctatctccacccgcgccgtccnagtgtaggatgagagttaggtacataatctcacaatatcaaccacaatcacataagagaacagtgacgagtgatganggnaggagatatgangacactcangaacagaggtgcgtgaggaagattgcagcgactgtaggagccgcgcncgatcgtcgctttagatgtgtaagcgcgccgcacacacgctattntaacgagtcctataaacatatatagagcagtatggtgatgacagagcgatatngggaatgtgatgtggcactcagagtaacgcgtagtgttgatgctgaacgtatagacactgagcatgaagatatgatcgagcagaagtgcacgtagtcacatctagccgnnnncactcgtcagagggtgtgatgcatgtgagcagacacgacatgacgcgacgtatatctacatgagtagcaacgacgacgacacgtatagagcgtcagatctagngcaacgtagatcactagaatanatgcgagtaaaatttgaaattacgaagagatacaacctacacacgtaatattctgtaacaatatgagtcgttggatcgaccgacatatcgctgatctcgcgctcgctatcnagcgtagatacggcgagacgtcggggacgtgcgaggcactgatgctacatacgtatatatncgattgcgatgagtggtgtcgcagaataatatagatcacactgtaagacantccggagtgcgattngtagcatacatccgcctctgagactgatcggagatcaacgaggtcacggtatatgaagagatgaccaancatctactatatcaacgctctcgtgcgtctacctgatgcaaatctccatctagacatgatcacaatataagtagaacataatagaagagaatagagataacatgtacgacatcaaaactgcacacataaagcgactgtagancgcgcgtgatgtaattatatggttagtcatatctantcacatcactagcgctacgaaatacaccgtacgacctgagcgacgctcgccgcncagtgacatcgacgacgctaacacacgcagcgcgtgcgatgagacgcacgactactgactgagagcgcatgcggccgggacgtgcntctcagtcgatgacgcagtgagcggtgacggtgtcaagtggttcggcgggttggccagacgcgtcagacaccagaaagaaatgtaacgggcaaaggagntgagtgcgagcggcgggactacatgaaacgacgacagacagcgagacacactcacgctagagn

SEQ ID NO: 2928 - DNA, 1736 bp, Glycine max
  misc_feature (17)..(17): n is a, c, g, or t
  misc_feature (101)..(101): n is a, c, g, or t
  misc_feature (226)..(226): n is a, c, g, or t
  misc_feature (1061)..(1061): n is a, c, g, or t
  misc_feature (1151)..(1151): n is a, c, g, or t
  misc_feature (1178)..(1178): n is a, c, g, or t
  misc_feature (1257)..(1257): n is a, c, g, or t
  misc_feature (1301)..(1302): n is a, c, g, or t
  misc_feature (1320)..(1320): n is a, c, g, or t
  misc_feature (1400)..(1400): n is a, c, g, or t
  misc_feature (1446)..(1446): n is a, c, g, or t
  misc_feature (1469)..(1469): n is a, c, g, or t
  misc_feature (1508)..(1508): n is a, c, g, or t
  misc_feature (1529)..(1529): n is a, c, g, or t
  misc_feature (1679)..(1679): n is a, c, g, or t
  Probeset Number=SeqID_12707
ctcaaaataagtgcctnaagcagaggagaggtaaataggaacaaagaaaagatatatatagggggaacaggaattgagggtgagagagggggtaaaacgcnttgtagtgtatctgttttgcctaaggatctccctccccctccctccgggaggggcggggtttgcgcccgataagaaggacgtcagagaagaagaataccactaattaatagaaagaaaagatggncgaaggagggggagaagatgttgtttgcgccaccagagaaaacaagagggaagggagagggtcgtccgggcaggcggaggcaaagcagagaaagagaataacacacaggacgtgcgagacggcacaataccaggagagtatgaaggaaccaagaggaaagaaagagagatagaggaaagagtagataaaagaagtgccggaggggagaggggtgcgaagagcacacgataaaggagaggcaccgcgtcgcaggagaggtataaataacgcgtacgacacggaaagggagaaaataaaaagaaaagcgcgggcgggggaaccggggtggactgggagataaaaatataatgctaaagaggactaaaaagagggagagacgcggatgaatatccgtgcacaatacgcatagttagtcaggtaggacagggatggggatggtaggagggagaaattacaaagaagggagaggcaagtatgaggaagcagacaagataagagtcagatgatgaaaagggcccgagtaacggcgagacggttggggagacaggatgatgaagacagactccagggtcacaactgtaataagaagataccaagagtgagagaccaacagtgggcaacataagaactggcaagagctataagtaggacgtcgagattgacggagaaagatgaagaaggaaagagacgtagggagtgacagaggagggatgtagagagaatatagaagaaacgtcgcggatatcgaatgagaggagagagaggagagtgctgaggacgagagtgtgagtggaacagttcgcgagcgagcggcagactacgagaggaagaattncagacgatgcacgagggatccagagtaaaagtgacgtacgagcacagtgaagcgtctaatgctgattgaagaggcgtagcgagtgtgtcnggtgtgtgtgtaagtagagtggaggcngaaggagagtgatgccgtacgctagggcgtggagatggggagcgacgagcacatgaaggaagagtgagagaacagcatncgactcacggtgaaatgatagagtatacgtggtgagagatacanntaagaaggaaggtgcganataactcatacagatacacacatacatgctcatacgtctgagaatagcatagtggtgatagtgcaggctcctcgcccgcncgagagataatcgttgagatgagactagaaacagtgacgtgttgangagaatacaggaatcgtcgaaancgaatgtgagaatacgagcgaagctagagaaacaagtcncatctgcgtgcgcgcaaacanacagcctacaagtgatgggtagagactgatgatatagagaccacgatgtatgattatatgcagcgtaggatagaggcagggtagaggataaaggcgggaaggtgaaggcaaggtgtcagtaagcgcgagaggataggatatggaaagatnctgaaaagcacagcgaggagcagagggagacggatcggtcagtcgacacgatgctgg

SEQ ID NO: 2929 - DNA, 612 bp, Glycine max
  Peptide Sequence Number=SeqID_6500
  Probeset Number=SeqID_12708
actgctgcgcaatgtcaacagaaggagaagacgtgagaagatcaataacattttaaggacacatccttttactcaaaagaagagtatgctgccggagtctgagagatatggtgctccccttcattaattggggcaattcaagtgaatccatggaacattgattctgtcactaaagctatggattctgcattgatgggcccataggctgaaaagcagatgccgactgataagcattatagatatgtcagatacacatcaggttgcttattgggcacgaacctttttgcaggatctggaaagggcatgtagagaacatctgatgaggagatgctggggaattggttatggattaggcttgctagtgattgctttggatccaaactttagaaagctatctgtggaacatattgattcaacttataagaggaccaatcaccgagcacttcttttggattatgatggcactatggagcatcctgtgtcgatgagtacaactcctaatgctgaagccgttagcatcttgaacatcttgtgcagggacaccaagaatcatgttttcattgtaagtgtaagggagagaaagactcttactgactggatttcttcttgtga

SEQ ID NO: 2930 - DNA, 2049 bp, Glycine max
  misc_feature (1163)..(1171): n is a, c, g, or t
  misc_feature (1196)..(1209): n is a, c, g, or t
  Peptide Sequence Number=SeqID_6501
  Probeset Number=SeqID_12709
aacaaacattggaatactacactatacttgtcaaccctttgagagttagaatggctgctgctattgaaatccccacaatagtgtttccaaactcctctgcccaacagaggatgccagtggttggaatgggatctgcccctgacttcacatgcaagaaagacacaaaggaggctatcattgaggccgtgaaacagggttacagacacttcgacactgctgctgcttatggctctgaacaggctctcggtgaagctctcaaggaagctatccatcttggcctcgtctcccgccaagacctctttgtcacttccaagctttgggtcaccgaaaatcatcctcatcttgtccttcctgctttgcgcaaatcacttaaaactcttcaactagagtacttggacctgtatctcatccactggcccctgagttctcagccagggaagttctcatttccaattgaagtagaagatctcttgccttttgacgtgaagggtgtgtgggaatccatggaagagtgccagaaacttggcctcaccaaagccattggagtcagcaacttctctgtcaagaagcttcagaatctgctctctgttgctaccatccgtcccgtggtcgatcaagtggagatgaaccttgcatggcaacagaagaagctaagagagttctgcaaagaaaatgggataatagtgactgcgttctctccactgaggaaaggtgcgagcaggggcccaaatgaagtgatggagaatgatgtgctgaaggagattgcagaggctcatgggaaatccatagcccaggtgagtctgagatggttgtacgaacaaggtgtgacatttgtgccaaagagctacgataaggagaggatgaaccagaatctgcacatctttgactgggcattgactgaacaagatcatcacaaaataagtcaaatcagccagagccgtttgatcagcggacccaccaaaccacaactcgctgatctctgggatgatcaaatataaactatttactactatgcagctcccactctatttttataatccatctttttacctcttgtttcattttacgtttaaataattcatgccatgccacttcttattttagatttcacaatcaataaactaggcacgcgcggcacatgatatgaataaactatgttcaannnnnnnnncttctcttagtccttctatttattnnnnnnnnnnnnnntcttgattaattgaaattcgtttgttgaaaaagaattgacgatcgatgttcgacaataatcctgatgttctccttctaggccagatcaatccaggatcagctcttcttcgtctgggctttgactgagatcattaaaaataaactaatttgcctcagccagagaaggttgttccgtggaccttgaaatcgttcatttcttgtcttccgctccgaagactttgtagctatcaactgctatgccccaaagcctctgcccctatcccctcttcctaagacagggacctttctgccattccgatggaatgccacccctgcgtaccataagtaccttcccgtggcagggtatcctaagatccatatcacaggggaacacaggcagtaagacaaatgcggcaaaggcctcagaatcatctttctgacgtgttcactcgttcgcgaccgctcgcgatcgaggctccctagaatttcgatccaaccctgcctgccccagtgaggaaagcggcccactacacctttttccacgcccacaaacagagtcatcaacgtatacgatcagcgccttcacacagtgttctacactgattcacgcaccctccctcatcggccatacagaggtgccccgttcctcgctagggaactctctcctcctccctacccacgcccgctatccccctcatcatctttttgtccttccctgctcatccaaaccttgtcgttccatctctgcccctttgccgaacaattggtaaacacccttacacttgaacttagcaacagatatggctctctatcacccatccacgcacctgttgtcactcctcccgagtgtatccgtgcttg

SEQ ID NO: 2931 - DNA, 665 bp, Glycine max
  Peptide Sequence Number=SeqID_6502
  Probeset Number=SeqID_12710
gaggagtgggcagcggataataacttcccgcagacagctattatcatcatgattacaacaagccagctattcctccttaatgagggcaacagaaggaggagctccgcggtggtggcggctgttgtagtagtagaggatccggcgggcagcaggaattcggaggacatcatttagtagatcataatagtagaagaaggtgttgtagtagttaataaggtcgttcgtctcgtagtagcgctgttcttcttctcagcagtcattctcaacgacggcgaagaagaagaatatagttccaccgtcgtcttataacgccaactactgcggcggcggacagcagaagaagaagaagtgcagcaagggacaacaggaggagaaggtgaacatcatggttttcgttgatcaagcttcttacgacaatcttttctaagatgctaacaagttcatcatcatcacttccttcatcttctacggtcgtcgtagcatcaatgggtctcttagtaggaacatcagtagagatatgatgaataaaggcatcatcaggatgttttctcctcattctaagcagcagatctacagtaggacccaccactaataagcttgtcgcatcatgaggggtgctcctctctctctgtcgcaacaagtgtcgagacgatagaagagaataa

SEQ ID NO: 2932 - DNA, 1386 bp, Glycine max
  misc_feature (12)..(12): n is a, c, g, or t
  misc_feature (44)..(44): n is a, c, g, or t
  misc_feature (66)..(66): n is a, c, g, or t
  misc_feature (86)..(86): n is a, c, g, or t
  misc_feature (131)..(131): n is a, c, g, or t
  misc_feature (228)..(228): n is a, c, g, or t
  misc_feature (233)..(233): n is a, c, g, or t
  misc_feature (280)..(280): n is a, c, g, or t
  misc_feature (377)..(377): n is a, c, g, or t
  misc_feature (497)..(497): n is a, c, g, or t
  misc_feature (583)..(583): n is a, c, g, or t
  misc_feature (619)..(619): n is a, c, g, or t
  Peptide Sequence Number=SeqID_6503
  Probeset Number=SeqID_12711
cacaatatcgtntagtacatatgtaacagtgcccgatccactcncattcgacgcgcatcgtctccntgtcagctcgtgtactgcancatagtcatgacatgatacgatactgtatagtacataacactcantccatgctctgtgtcagtgatgtatctatatgctgtagtgtccgtacgcgacgaagtctcattcagtcctactcgctctatggtctagcgcgcgcangtctntatcgcgcgtcgtactcattcttctctctacaatgcgtccctccgcnaatcaggcggcgtgagcacatctcacactatctacgcgtttgtctaccatgtcatgagagtgcccctacgcatacctgacagaatataaataaaggntggcgtgcgtagtggatccggacgacctgtttcaataatagcaaagcgcaccatgcacaatccctctcggcagctacatctggataatagctgcgcgagaacgctgcttatgcgcagcangctcattctgtgcctataaataaaagaaaaacaatagagtgcggacgcgggagcaaagcagggcgcgtcgtgatctacttacaagncacgtgtgaggcgtaacaatagtataagtaatatanaattccgttcgtaccgtcgttgccgtcgacattcatagctctactgtcaccgtgaagaaagtgcgtactataatagagactgcggtagcacgatatggtgacactatgagcaagataaaaaagtgagtcagtcaagtactcgatacgggacagagacgatcatgcagtaacaattctatacagctagagggggtcggtcagagcaaaaaatgaggggtgggcagtcgaatcggcgctcacactactcaggctttgtatgtctggatacctcgtgcgcggcgaactactatcacactcgcgtccgcagcgggagtgtgggtgatacagaggatggtgtcataaagtcgtaataaatcaacataccccgagtaccgcgcgggcatgctattagtcctctcattctcgaatataagtgcatcacttgtctcagtatagagtcaggtcgtaacactgcacagaataaccaatacgactatcagctcgccgtgctaagaatgtcgcgtgaggagtataaacaagctagcgcgctgaatggtctatggagtcacgctcggcgcctaacaattacaatcactacgacgagaaggagtatacgcagagggcgcgctcacagaggtgcccgcgagggtggtaggaagcagcgaacaaaaatatgtacacatcctctctccttccctcttgtcggtcgttagtttcgatgcttagcggtgccgcgtatcgcgcgcggtacctcgatgcagtgaccgtaggggtagacgaggcataga

SEQ ID NO: 2933 - DNA, 593 bp, Glycine max
  Probeset Number=SeqID_12712
actcatagattctactcagcgtcggcaaaggagccatgggttctagcaaccaagttaccagtagaaatttgacctctctatcaagttgttcatattattcgaatcgaatgctgacagacgatacctcttgagactggtaaagtgctgcctaggatctaggcctactccatagtcgacagagcagatcagagcgttttgatatcatgttggtaatcgccctgatcattcacattacatgttggttcgcgggggttcatgatcagaaactaggttgggacaagctcttagcaggctaacgcagtcagaaattgaagatgtcctctcaacagttcgattaggcatggaagttaggaggcaatcagtctgcacaatcacaagggaaggcttcctagagaacgctaactttctagctcgatatttattcacacatggctacactatggggaaattacgtggggatctctcaatgtaaagtctcctttcttttccttcgacgacatttttcaaatcgataatgtggttcatgtatatcaatgatcaagccatccatagaaggaagacgaaactcaaaaaaggcacaaggtgtagaatac

SEQ ID NO: 2934 - DNA, 328 bp, Glycine max
  Peptide Sequence Number=SeqID_6504
  Probeset Number=SeqID_12713
aagcatgttggtctcaggagattccatcctgtgtaggttatgtcaaatggtgtaccctcggatgcactcaattggtcagccggtgttcctgggacaatgtagcaatcaggaggaacatttggccaccgctaagaagtcccatcaagaaggccgtccagggccatgagctgagccacaagagatctgagtcccccaatagacccatcttgcacagtgatcagaacctcgtgcgattgggcaaggctgcgaataagggaacggtacaatgtcttgcagaaacgtgcatccgccactgttgcgcgcaagccatgatgttccaacaaggaag

SEQ ID NO: 2935 - DNA, 1507 bp, Glycine max
  misc_feature (586)..(586): n is a, c, g, or t
  misc_feature (872)..(872): n is a, c, g, or t
  misc_feature (1072)..(1072): n is a, c, g, or t
  misc_feature (1123)..(1123): n is a, c, g, or t
  misc_feature (1166)..(1166): n is a, c, g, or t
  misc_feature (1255)..(1255): n is a, c, g, or t
  misc_feature (1386)..(1386): n is a, c, g, or t
  misc_feature (1412)..(1412): n is a, c, g, or t
  misc_feature (1444)..(1444): n is a, c, g, or t
  misc_feature (1471)..(1472): n is a, c, g, or t
  misc_feature (1477)..(1478): n is a, c, g, or t
  Peptide Sequence Number=SeqID_6505
  Probeset Number=SeqID_12714
cacgagcggtgctcggtagtctttactctctaatcacaatgttcgtgtatgtttgatcagattgcgctcgacgtcgagcggtgcagcgggttgtaggctcgtgaccgcagtgcagtggtgttgtttccgtattgtctgttcatggggtgtttgccgctcgttatcggttgtttcacgtcgaggagcgtgtatcatctagtacgtgtcgtctgtcgatcttatattggtggtcggtactatgtgctgttttgtgtgtagcttgtccctatgctctctcgctgtgttatctcgtctgtgtgagtgcgtactgataccttatatggactgtctgaggcggatacttatatatactggtatgtatgcggcttgctgcttagtgtcattgttggtatctatctctggtcgtctcttcatatattaatgttgttcgcgtttcctggtagagtatgtattattgatcgctatatttgtttaatgtgtgcatcataaggtgaggtgcccgcgacacgagcgatgaataacacgcgctgtcagaagaacagcggtgacagccggcgctccgtctattgcacgtgcagccacgcantcctctcgtgttcttctagtcaggatgcgtgatcatacagtggtgtttcatagagtttagatgtatttatatgttgtatccgacgagcctatcgtgtgcgtcgttataaatatgtgtcggctgttgtattagtttactcgttttgtatatattgtgttgcgtgtttcgtgtgttgtaatgtgtgtatattatctgtgtttgtgttgtgttaagtatgatataagtttgtcatgagatagggaggagtgacagcacgcgtattcagttaagtacgccgcaatgaacnactttgcgcccgagcgcgtattcgatagtgcggctagcgatcccccaagccgtgtgctgctcttcctgttatatttgtatggcggctcgtgtctttcggcgtacgtctgcattatattactggtgaacgacacgtgaagggggggaaagtttatatttattcttgtattgcttgttttggttggggtgcggtaatgtcgnttgtgttggagattgagtacaatgggttgggcacggtgaggatttctgtcntttattttgacatggtggtgtagaggtttgtgacttgcctcgntcgtatttctgagttgttatcaactcctgtaactgggaatactctttattattcttgttgtgtatacagttactgcgcgcctcgttgangcgctcctttaccgtaaaaatttgttgtcaaattgttgtgcgggttgattacttgtcatgcctaaagttgggtggtccatccattatgtctgctctcacgtagggttgtgttgggtgcgccatccatatantttttatttatcactacagtttcggntggggcgctgcggttgccgtcgtcggcggccngaggggggagggaggagggatgaaggnnaaggnngaaccaccacgccagccacaaaaaaaaaa

SEQ ID NO: 2936 - DNA, 2038 bp, Glycine max
  misc_feature (1)..(1): n is a, c, g, or t
  misc_feature (2038)..(2038): n is a, c, g, or t
  Probeset Number=SeqID_12715
nattacccttccgtccaatttacgttccattccccccccccacggggtaggcctgggcttgttgggccttctccttttctccgccccgctgtgccacgacgctccttgggtgggtcaacgcggaactcctgggcctcccttttagaccgtaaaacgtaaacccaggatagtaatttcctccccgcggaaatttgattgggggcccccccccgtgtcaggtacgtaggccccccccccaatggctttagaaacaatgttgaagcttctttaaataacagtgaattacggaaagattcagccattctaataaatgagatgggggtcaatggagattgttatgatggtagaaacaaggaagttaacccagttcttggcgaaagctcagaatgggaaattcaatgggaggatcttgatattggtgagcgtattggtattggttcttatggtgaagtttatcgtgctgaatgcaatggcactgaagttgctgtaaagaagtttctggaccaagatttctctggtgatgcgctagctcagttcaaatctgaagttgagatcatgataaggctgcggcatcctaatgtcgtgctcttcatgggagctattactcgctccccacatttctctatcttgacagagtttcttccaagaggcagtttatataggctattgcatcgtcccaatcttcgacttgatgagaagaaacggttgcgcatggctctagatgtggctaagggaatgaattacttgcacacgagccatcctcccattgtccaccgagatttaaagtctccaaatcttcttgttgacaggcattgggttgttaaggtctgtgattttggtctgtcacgaatgaagcaccatacatatttgtcatccaaatcctgtgctggaacgcctgagtggatggcaccagaagtcttgagaaatgagccagccaatgagaagtgtgatgtgtatagttttggtgtgatcttgtgggagttgactaccacaagaattccctggcaaggtttgaacccaatgcaggttgttggagctgttggattccaaaataaacggcttgaaattccagaagatgtcaatccagtagtggcacaaataatacgtgattgctggcaaacggagccacacttgcggccatcattctcacaactgatgtctcgtctttaccgacttcaacatttgattgtcccaaaaacaagctcaacacattaaacgaagttgtctataacatagctattgtaataatacttaaagctgttccttggttcaaagaaccagaacagctaaagtttttcttttcttttctttttttcgtccatcttgacatatcaagatattgctgaactggtaagtgtcaggtacattctaagttgggactggacacaacccattcagaaaagagcagggtccctccccaatatctgcataagtgcagtggaggtttagttggagtaggtacaaatgaagaatccccagagggaagaaaggcaagaaacataaaggaaaaaaaaaaagtacaaaattattctttgtctgtagaggtcttatttggaattgtaacatgcgatctctcaggttctcatgcaaatgtaaaaaagaaaaaaaaaaaaaaaaaaacagaaaaaaagaacattatgtatttcccgttaaacagcttgagtttttcttgagcaagtgtacttcctagttgttatgatcaaaaaaggatttcctggagccccgggggatccatagttctaaaagggcccgcccccgggggggagctcccactttggttccctttagggagaggttaattcgaggttggcggaaatcatggccaaagctggttcctgggggaaattggtatcccgctcaaattccacaaaaataagagccggaaaaaaaagggaaaaccctgggggcccaagggggggccaacccccttaattgggtggggccactgccccttttccagaggggaaactggggggcccttgtttttaaaacccccccccccgggagaaggggtttgcttttgggcccttcccccttn

SEQ ID NO: 2937 - DNA, 1780 bp, Glycine max
  misc_feature (188)..(188): n is a, c, g, or t
  misc_feature (216)..(216): n is a, c, g, or t
  misc_feature (259)..(259): n is a, c, g, or t
  misc_feature (332)..(332): n is a, c, g, or t
  misc_feature (360)..(360): n is a, c, g, or t
  misc_feature (494)..(494): n is a, c, g, or t
  misc_feature (607)..(607): n is a, c, g, or t
  misc_feature (922)..(922): n is a, c, g, or t
  misc_feature (956)..(956): n is a, c, g, or t
  misc_feature (1029)..(1029): n is a, c, g, or t
  misc_feature (1296)..(1296): n is a, c, g, or t
  misc_feature (1585)..(1585): n is a, c, g, or t
  misc_feature (1629)..(1629): n is a, c, g, or t
  misc_feature (1637)..(1637): n is a, c, g, or t
  misc_feature (1666)..(1666): n is a, c, g, or t
  misc_feature (1679)..(1679): n is a, c, g, or t
  misc_feature (1689)..(1689): n is a, c, g, or t
  misc_feature (1691)..(1691): n is a, c, g, or t
  misc_feature (1726)..(1726): n is a, c, g, or t
  misc_feature (1746)..(1746): n is a, c, g, or t
  misc_feature (1753)..(1753): n is a, c, g, or t
  misc_feature (1759)..(1760): n is a, c, g, or t
  misc_feature (1765)..(1765): n is a, c, g, or t
  misc_feature (1767)..(1768): n is a, c, g, or t
  Peptide Sequence Number=SeqID_6506
  Probeset Number=SeqID_12716
ctagttcgtacattctgtgtcgctgagaacagagtgcgagtctgtgagacatgatgatatatatagtataatatcgagtcatatcatgtccgatactcactatattaatatccgtacggtcatcgcgaactgaagcttgacgtacgaagaatgcacacacacttacaatattacactcacactcacanccacgccgacgtcgtcgagctgtacttnacatcgagtggcacctctactcaccgctgcgctccacggccgncgtccatatatatatatcgactagctgatagcatgtacgtcataagtgcgagtgctgcgcgtgctatgtcttntgcgtctgactgtcttatgttacgctantatgtatcagtagaggtatagtacgacattatctatctcataatatcatctatcatggggcggctgagcacggacgctgtgtgtgctacaagttcaatatgtatacaatgtgtcgatatcattctatctactangtagcatcatatcgtatgacaacgtgcgacatgctgatgagatcgattgtgcgtcattatcgtagtatgtgtgtgatggctgtgatgagtgtaggtcaccagcgaggcagagnagggtcgaatgcgtacgattgttgtaccactcatcatcatcaatcagcactcagatacgtgcacatgcacatgcgatgtgcttcatagcacgcatagagagcgtgctgttatctatgtatcggattcactgatctatacagcacactgcgtatctggctggtggtcgcagtgtcggttgagtgtgtactacatccgcatgtactatacagatggtcaatcattgtatcttttactacaacatacatatcattctcgtcactatcatctatcaacttgtgtatggttggggatgtatggattgtctggtatcactntcttctctataactagcgacagcagcatgaggcnaccacatagagatacacatacagtaatacacatagagtaagcaacccagtcatgcgccgcgacgtcggcgacncagcgcggcgctgggccacagcacacacacgcgcagtacatgactatatgctattactaatcaacctagcgtcattgcttcgtatcacggcatatatcctatgcagctaatctgcatcatactcctattatatgctacaacaataagagaagtagagtgcacgtacggcaggctccaccacactgacttcgacgcgcgcgccaatgatgtactcgtgacgcccacatacgacagtacacgtgcagctcgcctcgcgcaccgacacancgtgcgcatacgcttgcaggctgctgtatctccttacctgtcgtatctgtatgtatcatacccgtgacactcgtcgctttggggttggtgtcgttgcctctcttttcagtcttacgtatctgtgctcttgcatagagcactcacaatacgtcgtattactaatcataccatctcattataacggtggataatataaatgaattacaggcggacacacataagtgatagttatctcttattgcccatcctgagagttgccacgtgtatcttatgcgcgaagcggcggacncacctcattgagaatctccatttttttgcacccggcgtcagtgncacagggncggggggcccatcccactccacgctccgnatctctcgcatanggctctcctncncgcaagaggtgtactaccgcgtctcgccgcgtgtntgtctggagagcagaatagngacaatnaagatnncaacnannctaacacccccg

SEQ ID NO: 2938 - DNA, 196 bp, Glycine max
  Probeset Number=SeqID_12717
ttatgttgcagacagtatgttcttgcatctcgtcacataaatatccttcataactggccatttcctgagaagcacttgcaattgtgttttaaagatggtctgaaggaggtgttgccaccatttggaggccaaacttctgtgtctacaaagtcactaaccacccttcatcacaggagaggaaaatcactcaaatcag

SEQ ID NO: 2939 - DNA, 1822 bp, Glycine max
  misc_feature (34)..(34): n is a, c, g, or t
  misc_feature (139)..(139): n is a, c, g, or t
  misc_feature (156)..(157): n is a, c, g, or t
  misc_feature (173)..(173): n is a, c, g, or t
  misc_feature (176)..(176): n is a, c, g, or t
  misc_feature (178)..(178): n is a, c, g, or t
  misc_feature (183)..(183): n is a, c, g, or t
  misc_feature (205)..(205): n is a, c, g, or t
  misc_feature (234)..(234): n is a, c, g, or t
  misc_feature (241)..(241): n is a, c, g, or t
  misc_feature (253)..(253): n is a, c, g, or t
  misc_feature (319)..(319): n is a, c, g, or t
  misc_feature (321)..(321): n is a, c, g, or t
  misc_feature (385)..(385): n is a, c, g, or t
  misc_feature (438)..(438): n is a, c, g, or t
  misc_feature (456)..(456): n is a, c, g, or t
  misc_feature (478)..(478): n is a, c, g, or t
  misc_feature (516)..(516): n is a, c, g, or t
  misc_feature (520)..(520): n is a, c, g, or t
  misc_feature (529)..(529): n is a, c, g, or t
  misc_feature (535)..(535): n is a, c, g, or t
  misc_feature (583)..(583): n is a, c, g, or t
  misc_feature (597)..(597): n is a, c, g, or t
  misc_feature (624)..(624): n is a, c, g, or t
  misc_feature (626)..(626): n is a, c, g, or t
  misc_feature (631)..(631): n is a, c, g, or t
  misc_feature (635)..(635): n is a, c, g, or t
  misc_feature (651)..(651): n is a, c, g, or t
  misc_feature (656)..(656): n is a, c, g, or t
  misc_feature (731)..(732): n is a, c, g, or t
  misc_feature (761)..(761): n is a, c, g, or t
  misc_feature (859)..(859): n is a, c, g, or t
  misc_feature (882)..(882): n is a, c, g, or t
  misc_feature (895)..(895): n is a, c, g, or t
  misc_feature (938)..(938): n is a, c, g, or t
  misc_feature (955)..(955): n is a, c, g, or t
  misc_feature (960)..(960): n is a, c, g, or t
  misc_feature (1005)..(1005): n is a, c, g, or t
  misc_feature (1057)..(1057): n is a, c, g, or t
  misc_feature (1064)..(1064): n is a, c, g, or t
  misc_feature (1133)..(1133): n is a, c, g, or t
  misc_feature (1181)..(1181): n is a, c, g, or t
  misc_feature (1183)..(1183): n is a, c, g, or t
  misc_feature (1247)..(1247): n is a, c, g, or t
  misc_feature (1251)..(1251): n is a, c, g, or t
  misc_feature (1256)..(1256): n is a, c, g, or t
  misc_feature (1329)..(1329): n is a, c, g, or t
  misc_feature (1510)..(1510): n is a, c, g, or t
  misc_feature (1513)..(1513): n is a, c, g, or t
  misc_feature (1527)..(1527): n is a, c, g, or t
  misc_feature (1571)..(1571): n is a, c, g, or t
  misc_feature (1575)..(1575): n is a, c, g, or t
  misc_feature (1603)..(1603): n is a, c, g, or t
  misc_feature (1646)..(1646): n is a, c, g, or t
  misc_feature (1648)..(1648): n is a, c, g, or t
  misc_feature (1678)..(1678): n is a, c, g, or t
  misc_feature (1735)..(1735): n is a, c, g, or t
  misc_feature (1743)..(1743): n is a, c, g, or t
  misc_feature (1766)..(1766): n is a, c, g, or t
  misc_feature (1775)..(1775): n is a, c, g, or t
  misc_feature (1792)..(1793): n is a, c, g, or t
  misc_feature (1797)..(1798): n is a, c, g, or t
  misc_feature (1811)..(1812): n is a, c, g, or t
  Peptide Sequence Number=SeqID_6507
  Probeset Number=SeqID_12718
cacaatatatgcactcgtctattactaatagtgntaaagcgactcacaaacacgtactctcgtactaacctcgatctatatacaacatgcaatgtatatattcatatatcatactaataatcatatatatacgcgatcnacacgttgagatagcannctcatctgtatacagncgncnacaanttgcgacatcatacgcattagntcatacacacacacatacgaacatactcntacttanacacgcgcatcntactactaatctgcatttgtcgttgatgtatgagcgacgcgcatgcgcctacgacacatatatatncnagtcatcagtcatagtaatcagatatacatcaaatgagacagacgtaagaactaatacgatatnaattagtcatgagcatcaaatatcatcttgcgacatccagcgtgcttgtcgtncgagcgcgagtcaccgtnagcgtattatacgtgagacaanccacatactcgcatctcgtatcacaaacgactatacgngctncacactcgncaccantatagaatacagcatctcgtagtacctctcatactatgtcacgtgctncatttgtctccgcntcgcgcgtactatcattcgcaaactananatacnactnatgataagtacagcangatancgactatcatagcacttatctgcatcgtcagtacgcacatcacgtatcgcagatcagcagacgacgcaatagcgnncatcgacatgtcatactaatgacgacatncgtctctacgttatgcgatgctgacatattaacatcacatcactcatacgatcaacgactgctcatacacactatactatccatccgtctcagatatntcgcatactgactacgttgatanttacgtctgacgncatatccacctacatcacaacctcctccactattacactctantaatcacactcgacagncacanccactacgctctcactatcggttctttcacgacgcgcgactagtnagaagacaacaatccatgcgatcacacgaaccgtcactcgcaccgcacgatncgacgtnccaccgcgaccacgaggacgtgtgccggaactagcggctagctcccgacctatacgactatcgtacgtncgaacactgcgctatgtattagcaggcatactctctcgacatcgactnanattcacgtccgctcgcgcgtagcgactcatgcagcgccacgcgacggacgacacaccgtagagnaggnatctngagttcgtgatctgctcctcgtcagcatcgagaacatcgtcacggcgctcgaggcgcactgttaacatttctncacgagatgtatgacgagagcgacgacgcgtcacatagcgcacgcgtcagactactcacctcgtatcgtatgttctgtatctgctgtcgttatcacgcgcgtacgtacagcgcggacgcgatgctgcaccgcgcgaaagcaagcggcgatgcgcgacgtctcacgcgagatcaggaatcanagncgggaaagaagaangtggcgcgcgcgccgcgccagacgtgcgacggccattgtcgcgnctcnctgcggggtcgcgggtcgtactcgctgntcacctatcgcctcccgctcctgccgcttcaattgtcgcttcnangcctcggcggaacagagcgcagactgtcgngtagcgccgtcgtgtgcggcgcgcgtcccctgcgcgcggtccgcgtggtgtgtgtgnggagtgtngggtcgtgcgtcgtggcagggtngcgtcgtgnggcggtgcgggggcggnngggnnggcgcggggtggnnggagccacca

SEQ ID NO: 2940 - DNA, 1558 bp, Glycine max
  misc_feature (1)..(1): n is a, c, g, or t
  misc_feature (114)..(114): n is a, c, g, or t
  misc_feature (172)..(172): n is a, c, g, or t
  misc_feature (212)..(212): n is a, c, g, or t
  misc_feature (326)..(326): n is a, c, g, or t
  misc_feature (686)..(686): n is a, c, g, or t
  misc_feature (875)..(875): n is a, c, g, or t
  misc_feature (1067)..(1067): n is a, c, g, or t
  misc_feature (1219)..(1219): n is a, c, g, or t
  misc_feature (1270)..(1270): n is a, c, g, or t
  misc_feature (1294)..(1294): n is a, c, g, or t
  misc_feature (1319)..(1319): n is a, c, g, or t
  misc_feature (1403)..(1403): n is a, c, g, or t
  misc_feature (1410)..(1410): n is a, c, g, or t
  misc_feature (1433)..(1433): n is a, c, g, or t
  misc_feature (1501)..(1501): n is a, c, g, or t
  misc_feature (1517)..(1520): n is a, c, g, or t
  misc_feature (1525)..(1525): n is a, c, g, or t
  misc_feature (1531)..(1534): n is a, c, g, or t
  misc_feature (1539)..(1539): n is a, c, g, or t
  misc_feature (1549)..(1549): n is a, c, g, or t
  Probeset Number=SeqID_12719
natgcacacactcacaccgcgccccacgcggagcgagcacacacaactagggtcacggagcgacaaagcacgcgtgcatgtgagagggagacacacaacatacagcgtaggcgncggctctcacatacatagccgagcgatgtgcacagaacacagatagcagtacataganccctcaaggacgcagacggcgctggcggtacaggacgacngcaccatgacgtgcctcagtagcacaaccttattgctggaccgtaacgccgcgcagcagcagcgcgcgagcgaggtaaccccaacacgatcgatctcctccgctaccgcaccangcgcgcgcaagatagaagtgacgcgtagcggcggggcaaaggtaacgcaccgcaagcgcggctgtagcgcgtatacatacacgccgtcagcgggtgcacagacagcatcacggtcgacacgctccggccgaaacacgcaacacacgagaggagcgggcgcggcgctcgcggagcatactggcgtctcgcactaaccagacatgcggggagacacacataggtgcatggagagagacaacatcaccgcgagcccgccgtcgctcgacgtcgcgcgacatgcgccacccatccacgcgggacgcagacgcgcagcgacggagcgcaccgcgtcgttcgtgaagcgcctcaatagggcattgnacttcacacacactcacatatatgcccgcaccacctccctcctcccctctatacttacacctcccgcacatacggacctccgcggtactcactacttgcacgtacatccatgcacgagtgcgcgatgaaacgagaggcgtcgagtgagacaaaatgtgagatacatatcagaaagacaccaagcatacnaaccgcgtgcgcaaaccgacggtgggtcagcaggcgagcgaacaaccataacactcagaatcccataccagcattctagactacagactagatgcacaccaccaactctgccggaaaacgctagacacacaataggcttatgagagaagcgatgagatgaataatatagcagcactcgcaccgacccagtgnacaagcagagatagatgttcgtgtgtctgaatgtgtgattgataggagggagggtgaagcacatagcgcatcaatataagacagcacactagtgatacgctgcgctccaagctccaccacaacctatgcacgctatacctcacattgtaganaaacgaactgtgtggtcgcgcctgctagcgcgggcgcgcgtacgatctctnacattcaaatccaacaaacagagngggaaaaataagggagaggcgaganctcgctgtatgtgcgtcaatactcacagagaagagaggggggagaggcgcccgctcgcgccaccacctcgcagcgtccgctatntctctgnggcggggtggggtgtggggtggntctcctaaagcgtagcaatatataatatatccacataccaagcggcgtgtcgaagggcgagccgcgcncacgaagaacgacgannnnagcancgagannnnagagncaccaaaccntaaaaaaaa

SEQ ID NO: 2941 - DNA, 783 bp, Glycine max
  misc_feature (783)..(783): n is a, c, g, or t
  Peptide Sequence Number=SeqID_6508
  Probeset Number=SeqID_12720
agagcagccacacacacagaaaaggctaccaagagagaggtgggctcctgcgactacaacatggtatcagacctaggcggcgacgatggggcctgacgggagtagggcggcgacggcggacctaggaggcggactgggctcacctccgcgcgggctcctacctcttcccctcattcccttcttgttccctctcgcggctgtgcgctggctggcctctcgcagctgcaggggagctgcgccagtagctgcgtgcgagtgaggaagacaagggggcggcgcgagctgaggagatgcgcatacgggaggggctgttgaggggactgacaggaggtgtgctgctggaactgctgctgtgtgcagcggctaaatcagaaggagaagtggggcagtgttgtgctgctgattgaaagggaactggagactgctgattctgcagaggactgtgtgcggctgtgcttgctgctattgttggctgtgtaggctgtgtccgcagatgagtgagccaacaggccttgctgaggctttcgagaagctagctaagatcctcgaggagtcgaaatctggggccatcgttcctcgacaggaagtggctcagaagatcgaactgtcgcccatggacatgaagttagagggggctaccaattatctgagctggtcccgaagggcgttgctagctgtggaacagaaggagcttgatgggcacttgttgggtgctgttgctgaaccaggagacaagactaccgtggagggaaatgagatggtatgctggttaaaaaaaaaaan

SEQ ID NO: 2942 - DNA, 1410 bp, Glycine max
  misc_feature (76)..(76): n is a, c, g, or t
  misc_feature (132)..(132): n is a, c, g, or t
  misc_feature (138)..(138): n is a, c, g, or t
  misc_feature (772)..(772): n is a, c, g, or t
  Peptide Sequence Number=SeqID_6509
  Probeset Number=SeqID_12721
catgaggtagtatactaagaacgatatgacagtgtatgttatgtaatatatgagtaatgctcaatcactgaatatnagaatatcacatcaatacgtattgagtaactcacagagaagaggttacagatacancgtggntgtattacatatacgactataatgatagtatatatattattaacgtttagtgttttcttataatcgcatagtcgatgagacagtagtgatgacgagagtatattgaggcacctagcactacttacacagcgtatcacagacgtgatctatcattattatcatatctattgatgtgtatatttatgatattatatacagatcaagagttgaatgttagaggtaacgcagtcgatctgtgatcgtacataccaccacgaagctgagagatatagtatcgtataagtagattatagtcagtgatgagagagaataaagatgacggagagatacaagcatatctgagacagaagtactgaggcaacacgtgattctatagaagctgatcgacgacgcgggagaggtgacaagttagcatttagatagtgagcacagataaatagcacactaacgagaacgcacagtcctgtgccgatgagtttgttatacacatcttgtgtcgatgcaggaaaagtcaagcgtatacttaagcagtacatataaattccagcgctctcctaagagtgcagcgacatattcagtctgcaatagtgaggtaatcaagatttggaggtgaccatgtatgactccacgtaanaatcctctacctctcgagccaccatcatgaccgacgataggagaccgagcgctgagagcggaggtgggataagtagagagtatgggatatgaggatacggtacatattcgtatggagtcatgattgatacttgtgtagaatggtggtgtggtgcgtacgattatacttattcagttcagctaattatagtaagataattattttcatctgtctgtcgagattatttcatcattttgatcttgatcagtggtgcttcagtggcaggtggaagcggcgcgagagttgggatatcgtaatagatgtgttgtagctcaagtcccctcttactcatttctatgtgttatctctataattgattactttagcttttatgtgaagataagaaggtatatgtaactatactatttattctttctcatctgtatagtgagtctggctggtggcggtggtggagcgatggactggtgtgctctatgcaattcgtaagttgagtgctgctcgtatgtaaaaaaataaattattgaatattaacaaaaaagaagggagaggttcgctaatagttaagatggtcaccacaaagcaatgccatggtaggagggaggggtggagggggcaggggggggcaggagcaggagagc

SEQ ID NO: 2943 - DNA, 717 bp, Glycine max
  misc_feature (1)..(114): n is a, c, g, or t
  misc_feature (656)..(657): n is a, c, g, or t
  misc_feature (659)..(660): n is a, c, g, or t
  misc_feature (663)..(663): n is a, c, g, or t
  misc_feature (715)..(717): n is a, c, g, or t
  Probeset Number=SeqID_12722
nnnnnnnnnnnnnnnnnnnnnnnnnnnnnnnnnnnnnnnnnnnnnnnnnnnnnnnnnnnnnnnnnnnnnnnnnnnnnnnnnnnnnnnnnnnnnnnnnnnnnnnnnnnnnnnnnntggcgcgctgttattgttccttttcctcgtgggtgttcggtgtggcgtgctgtgttgctgcgctttatgtttgaggggttttttgtgtggcttgttgttttttttttactcgggtttgttgcgttctcccgttttggtgattgcgtttggtcacccgtcgggggggggtgtttgtgtttctttggacgttttttgggtggttctttttttattttgtcggagactggtttgggccgttttgtgatggggggggtttttttgtttttgtggtggtggttctctcgtttgtgggggttcccggttagttagggttccggcactttgtttaccggtcccgggtttggcctctactgttggtgccctgcagttggcttgccccggttctcggtcggttggttctgttgttgttggtgcttctggtcgcttccgtagtcttcgcgcccctcccggctgccgtagccaccgccgccgtcgatgagattcccttcccgcggctgtgcatgcgccccatggctgcggctgctgcggcggcgaggggagtnncnncgncggcggcggcgggaagggcgtgagaggcgcgagtggtgagaggatagaaaannn

SEQ ID NO: 2944 - DNA, 731 bp, Glycine max
  Peptide Sequence Number=SeqID_6510
  Probeset Number=SeqID_12723
gcactgtttaattcttccggcacacttttaggaaaaattcctttttccgtccccctgatggttttgtggaaccgggtgtggcaggtcccagtattgccctaagcccggtcacctttgaggtagcttctccttccaaaaattctgatttggttattttgagagggatggggggggcccttcctacttaccttaaagctctgttttaaccgggtgcttttaaaccttccatgggggaaaacccgggattggccgaaaaattggtttaaggggacctttttggtttttttttcaaattcgggcccgccagttggaaactttttttctccccggttgttttataccaggcctccttgggggggcctgaaagaatccttttgggtaattggggttaaaatttttcccgttctttttggttttttgccccggggacctccgagcttggggaattagagtttaaaagttgcttttttacccccaggtttttaatattaattttgggccctagtttttttgggtttttgtttggttttaaaaattcccctaaagttatttttgataagttttccttttttttgttcggtttttaaaaatttcggggtttaaatttatttgtttttcccctggcccaaataaatcccccttttaaaatttttttttttttttttttaaaaaaaaaaaaaaaaaaaaaaaaaaaaaaaaaaaaaaaaaaaaccaaaaaaaaaaaaaaaaaa

SEQ ID NO: 2945 - DNA, 722 bp, Glycine max
  misc_feature (2)..(2): n is a, c, g, or t
  misc_feature (5)..(5): n is a, c, g, or t
  misc_feature (9)..(10): n is a, c, g, or t
  misc_feature (12)..(12): n is a, c, g, or t
  misc_feature (17)..(17): n is a, c, g, or t
  misc_feature (21)..(21): n is a, c, g, or t
  misc_feature (28)..(28): n is a, c, g, or t
  misc_feature (30)..(30): n is a, c, g, or t
  misc_feature (37)..(37): n is a, c, g, or t
  misc_feature (39)..(40): n is a, c, g, or t
  misc_feature (42)..(43): n is a, c, g, or t
  misc_feature (52)..(52): n is a, c, g, or t
  misc_feature (66)..(66): n is a, c, g, or t
  misc_feature (70)..(71): n is a, c, g, or t
  misc_feature (81)..(81): n is a, c, g, or t
  misc_feature (89)..(89): n is a, c, g, or t
  misc_feature (107)..(107): n is a, c, g, or t
  misc_feature (128)..(128): n is a, c, g, or t
  misc_feature (710)..(710): n is a, c, g, or t
  misc_feature (712)..(713): n is a, c, g, or t
  misc_feature (715)..(715): n is a, c, g, or t
  misc_feature (718)..(720): n is a, c, g, or t
  Peptide Sequence Number=SeqID_6511
  Probeset Number=SeqID_12724
cnaantaanntnccccngggnaccaccncncctccgnanngnncgcggatgncagtattgaatcancctnnacatcgttcnatcatttngctgacggttcctgatcnatgtccccggtggtcggaaantcagaacgcacatcgtggctagccggactattgataattcgtcgagaacacgcaacgcgttcggtcgcccaacactagttccagctgcgttgtccaatgaggggatttcatgtctgcgcgtgggcgtccggctgccggaggaggcactgttcgattgctttgagcagccgaaccttcatggcaaggtattcctcctcgtcgatgtcggcctgagtttcccggggcagtgcaggaaggacctgatcccgaaacagtgcccagcccatcaagtcgagtttcgtgctgatgaggcgggtaagttccgcctggcccccaaacagctgaatcaccgatggactgggacagatgccccgggatagcaacagttccaaatcatagatgtcgcgcggggcggtacgacgctcatcgaggagtgctgcgacttgttgtccgccagcgcctgggtcacagcattaagagcaatggcatcattatatgatgctaatgatcttaatcaaacagctcgctactctttgtgatgattccgtaagttgctgatttcattgacgtggttcgtgggctcgagggggggcccggtccatngnncnctnnnct

SEQ ID NO: 2946 - DNA, 1434 bp, Glycine max
  misc_feature (92)..(92): n is a, c, g, or t
  misc_feature (167)..(167): n is a, c, g, or t
  misc_feature (234)..(234): n is a, c, g, or t
  misc_feature (275)..(275): n is a, c, g, or t
  misc_feature (550)..(551): n is a, c, g, or t
  misc_feature (787)..(787): n is a, c, g, or t
  misc_feature (853)..(853): n is a, c, g, or t
  misc_feature (894)..(894): n is a, c, g, or t
  misc_feature (1034)..(1034): n is a, c, g, or t
  misc_feature (1206)..(1206): n is a, c, g, or t
  misc_feature (1325)..(1325): n is a, c, g, or t
  misc_feature (1335)..(1335): n is a, c, g, or t
  misc_feature (1354)..(1354): n is a, c, g, or t
  misc_feature (1395)..(1395): n is a, c, g, or t
  misc_feature (1397)..(1407): n is a, c, g, or t
  Peptide Sequence Number=SeqID_6512
  Probeset Number=SeqID_12725
aatagtgacgaggaatggcagtgaagggatcagcatatatatgtgatgcgctgaggcatacacggacgagatggagagagattgtgtttgantcgagccgtcgcgacggtgtgagtctctcgaatgactgctctatctagacatagtcgcgcgctgattgttgaganctgactatgtcgcgtagagatgtaagcatacatacatttcacgcacgcgactcacagtaagtatgcnaaggaacattacttagtgtcactcatatctggtcgtgagtntgtcgtggcacgctcacatcactctcatgtctgacacatggagtggccacgaccacttatccgtgctgggtgagcgatggaggtgtcgtgctagtgtgttaatgtcggacgtcaaagaaggcaagcatttaagcgctgcataaccgagtaattagcattgtcttacgcgacagatgttgtgcctgcgctgcctccactacttgtgtgagaaggatgcgcgctggcttctcgtggttattcacgagacgactgacgattgagtggtggtgggtgtnntctttttccttttaactcctcaactccatataaatacattgtagcgtggtttctatatagcatgtgtatgtggggggtgttctctttcataacaagtagttatcaggtagagtgagtagttgtgagaggacagtgtaggatgaatgtatttgtagaagctagatcggtacgtcctgcgcgggagtgaggactgtccagcttgcgtgagtgcgacacgtagagggtcgagcgagcgnagtctgcaggcggaatcggagcagtaaatgagaagaaacaaacaaacacgagagcatcgatacatnggataatgtgtgtgaagcttgccccacgaatgagtcgtgtngtctggattgcgtcgggtgatgatggcgtcgtgttgttggtatgttgtctgtggacggttaattgtagtgtgttgggagtgtgcagcgcaaagccgattataaggaagtggggtcgaggataagagtatggtggggtggngtcggggggcacacaagactagaagtatttggacatcgtgtattagttagttgatggatgaacacatagaggaggcagcccaggcgagacgaggtcgctcgctgcccccgccctcttatatatgcagataccgattgtaaagaggtgacggtgttgtttgtcgggatagtgnggagcgggcagcgtggtgggcctgtgttcgaagcgtaagtaggggaggagaggtaggacctggacgacacgcgtgacgcgagagacggttcgcttatatcattggcttgtatcgctctntttcttcttntatattatgatgatcggtnccggacgctctgggtagtatatgagaatgccatgtgtgtcngnnnnnnnnnnncgagcgtgtggctatcctccttttttt

SEQ ID NO: 2947 - DNA, 188 bp, Glycine max
  Probeset Number=SeqID_12726
gcctgcaggagcagcaggtcgatggccaggtagatacgcaccgcggctggatcgaggctttgctggtcgagtactacgatcccatgtacgtgttccaccgcgagagcaaatccggtcggattgaattcgccggggagcagcaggctgtggtggaatacctgcgtaagcgaaacggcgggtgaggtggg

SEQ ID NO: 2948 - DNA, 643 bp, Glycine max
  Peptide Sequence Number=SeqID_6513
  Probeset Number=SeqID_12727
accatccgcacgacattttcgccacccaacccggcaaatcgccaatcgccatcgtcttctttgtctcctccagcgagccacaggaatcctctccgaccaagaacagaagagagaagagatgggagggttccagcgtcaggtgaaggagcggaccatggaggtgaaggtggcggtgctcaagggcgtcaggttcgtcggcgacttcggcaagaagacgtggaacaaggtcaaggacatccagcgctgatcgatccattcatagcatctccccggttgtttgtttcccttcgctccagtacactagttgcttcttgtacaactgcctgataggataaccgactggccttgtgctcccttttttttctctgaatgtggctgtgaattggtttggatggaactgattttgaatcaactttttgttgcgcaccaacccccctgccagtataaggttttatttattctctctttttatttattcatttaaaaagtttaacagacaccacccaactttaaggggtgttttcggtaccccaattctcaccttaatagtgattacttaattatcctgcgcccttcttggtctctcctcttttacaatagcctcagaattgggtaataacccttggtaatttgctcttgttgt

SEQ ID NO: 2949 - DNA, 1851 bp, Glycine max
  misc_feature (13)..(13): n is a, c, g, or t
  misc_feature (24)..(24): n is a, c, g, or t
  misc_feature (28)..(28): n is a, c, g, or t
  misc_feature (40)..(41): n is a, c, g, or t
  misc_feature (44)..(44): n is a, c, g, or t
  misc_feature (52)..(52): n is a, c, g, or t
  misc_feature (60)..(60): n is a, c, g, or t
  misc_feature (73)..(73): n is a, c, g, or t
  misc_feature (86)..(86): n is a, c, g, or t
  misc_feature (101)..(101): n is a, c, g, or t
  misc_feature (126)..(126): n is a, c, g, or t
  misc_feature (128)..(128): n is a, c, g, or t
  misc_feature (131)..(131): n is a, c, g, or t
  misc_feature (134)..(140): n is a, c, g, or t
  misc_feature (145)..(147): n is a, c, g, or t
  misc_feature (172)..(172): n is a, c, g, or t
  misc_feature (226)..(226): n is a, c, g, or t
  misc_feature (255)..(255): n is a, c, g, or t
  misc_feature (268)..(269): n is a, c, g, or t
  misc_feature (271)..(271): n is a, c, g, or t
  misc_feature (277)..(277): n is a, c, g, or t
  misc_feature (347)..(347): n is a, c, g, or t
  misc_feature (360)..(360): n is a, c, g, or t
  misc_feature (461)..(461): n is a, c, g, or t
  misc_feature (511)..(511): n is a, c, g, or t
  misc_feature (569)..(569): n is a, c, g, or t
  misc_feature (576)..(576): n is a, c, g, or t
  misc_feature (638)..(638): n is a, c, g, or t
  misc_feature (707)..(707): n is a, c, g, or t
  misc_feature (791)..(791): n is a, c, g, or t
  misc_feature (848)..(848): n is a, c, g, or t
  misc_feature (947)..(947): n is a, c, g, or t
  misc_feature (969)..(969): n is a, c, g, or t
  misc_feature (996)..(996): n is a, c, g, or t
  misc_feature (1033)..(1033): n is a, c, g, or t
  misc_feature (1132)..(1132): n is a, c, g, or t
  misc_feature (1194)..(1194): n is a, c, g, or t
  misc_feature (1264)..(1264): n is a, c, g, or t
  misc_feature (1343)..(1343): n is a, c, g, or t
  misc_feature (1363)..(1363): n is a, c, g, or t
  misc_feature (1373)..(1373): n is a, c, g, or t
  misc_feature (1392)..(1392): n is a, c, g, or t
  misc_feature (1475)..(1475): n is a, c, g, or t
  misc_feature (1541)..(1541): n is a, c, g, or t
  misc_feature (1549)..(1549): n is a, c, g, or t
  misc_feature (1579)..(1579): n is a, c, g, or t
  misc_feature (1592)..(1592): n is a, c, g, or t
  misc_feature (1618)..(1618): n is a, c, g, or t
  misc_feature (1625)..(1625): n is a, c, g, or t
  misc_feature (1667)..(1667): n is a, c, g, or t
  misc_feature (1696)..(1696): n is a, c, g, or t
  misc_feature (1703)..(1703): n is a, c, g, or t
  misc_feature (1707)..(1707): n is a, c, g, or t
  misc_feature (1715)..(1715): n is a, c, g, or t
  misc_feature (1729)..(1729): n is a, c, g, or t
  misc_feature (1807)..(1807): n is a, c, g, or t
  misc_feature (1813)..(1813): n is a, c, g, or t
  misc_feature (1815)..(1815): n is a, c, g, or t
  misc_feature (1842)..(1842): n is a, c, g, or t
  Probeset Number=SeqID_12728
agagagatgtgtngtttatatgtnatanttatagtgttannganacacagcnaggagaanaaaataatatatntacaataataccnactagatataatganatagcacccgctagttattcacaananaanaannnnnnnccccnnncgccgccgccgcccgcgcagccacngcactatgtgtactactactacttcattatatatattctcaaaatcgcgacggnatactctcgtcacgctcgtgcgttgatcnacaccactcttanntnatggtntctgagtgtatatatctacactcaactgcgcaactactacaccacaccacacatctcacatcatgagtangatgtatgtgaangatgaactgagactacagctgtcacacatcactatatactcatataaattcctttattactactatatacatatgcatatacatataatatgtatagctgnagagtagtgatatagtgtcatatgctagacgacgcacaatcatcacaaangagagcatagtgtgatattatctatgtagcacgcgtcttacgatgaagtgaacacganatatacnatcgcacgtctcgcaattgacgtagtacctaatatatatactcaatacgtcatcatactccntccgtcagatattagactactactgcagcaacacaccccagcgctcattcgagtcgcgccctctactcntgctgtctttatttctctttatccgggtactcgtctcgctgcttgcgtgtctgtgtggtcgtctctgactgactcgacgagatnattgtgcgacgcgcgaatagaagtactgtattatgtgtattcatagtgagtagttanagaatatcattggtactatgatgtatctcattctcacatcactcatacatcacactaaatcgctgcacagatcatatgattatataatattatgagtanttgtgctgtcacgactaaacanacacacgactactcgtagtactgtgtnagtgtcgaagactcttaccgaatatgatggatagtgntagatgcttattgtctcatcatacgaatactgataactatattgcatgtagtacgtataatatatatgacactacttctcacgaactctactaaaaatngtgcgtgtgtgtgtctgttacatataatacgatgagtgatctcatcacactaccacactatnactgatgtaatcagaacatcagattgagatacgaatatactaatatatatcattactacacgctacccantgttgtgtcgtaggtctgtatgcaatactactatcgtacgcactataccgacgcgactacacactgcgtaatcatgccngtgtactacaacgaactgantgcatgctgnacatctcaatagcgatcgntcagaaatactcgagactatatagatatatcgaagtagaactacacacatcgactacactcacactatgtacaacgacaagcntgatacaatgacaagtgagagtgcattgacataactcagccgtaatgcatacactgctgcttctgnctatgccncatgagtgaatgcggccgtgtagatgcatngctggtcagcccngatacagacacatcgatgcagaaganatatatnacatatatgcagatagtcgttagaatctcatcacatcacacncgcatcacgtactcatctaattactacanagtatgntcangttgaganctacgtacatgacnactatcatgcattgtgtgaatcatcgtactatgatctacaatagacaacgatacgctcatactgagtacgactatganatgaananctactcaccacatcgatgatcagtgtncagtctcgg

SEQ ID NO: 2950 - DNA, 462 bp, Glycine max
  misc_feature (83)..(83): n is a, c, g, or t
  misc_feature (432)..(432): n is a, c, g, or t
  Peptide Sequence Number=SeqID_6514
  Probeset Number=SeqID_12729
aaaaaatggttctcctcgtcctatccaccctcccacgggcaccctacggagcagccgcgtccacatcgtcgccgacgccgttntccattcacccgcggccaaggcggcatcctctcgccgtcgcgcgctgctccgctcgtctgacgccgccgcccaccgccgcagccaccggcagggaggccgctgcttcttgggccggcaagctagccggcgccgtgccatggaaggccgccgtctccagcgcgctcgcgctcaccttatccttctcctgctttgttggtttggccaatgccaaggctggggtcaacaaacctgagttgctccccaaggagttcaccaccgtcattgacgtcgccggttttctctcttcaggccaggaaaatcgtttgcgccaagagattgaagacctagagaaggacactgggtataagntgagagttctcgcacaaaattatccggata

SEQ ID NO: 2951 - DNA, 512 bp, Glycine max
  misc_feature (179)..(179): n is a, c, g, or t
  misc_feature (208)..(208): n is a, c, g, or t
  misc_feature (222)..(222): n is a, c, g, or t
  Peptide Sequence Number=SeqID_6515
  Probeset Number=SeqID_12730
gtctccggtgagggaaaagtagtagaagagaagatgtcgaccgtaccaggacagctcatctgggagatcgtgaagaagaacaactcctttttggtgaaagagttcggaaggggcactcagagcgtgcagttcagcagagagcccaacaatctctaacaacctcaacactttcaagtacntcccggtttggcgaacccagaaaactgtncactgttcaacctngctggtaaagccccgtccgggttcctcgcaacagcccggcccaaggacgcagttctgggcctgctgctttgcttcacaaatctgtcatgaaaaagggagtttccgtaaggatgggcaaaaggctggtgccaaaaatcaagggtgagggctcccaaaggcataactactacaggcctgattcttcaaaaggggcagccttctggcaaggattggaagcggctgttcaaataggggagcccttaagaggttagccttaagtcctttttaaaaaaaccaagggaaccaggacg

SEQ ID NO: 2952 - DNA, 1534 bp, Glycine max
  misc_feature (1)..(1): n is a, c, g, or t
  misc_feature (51)..(51): n is a, c, g, or t
  misc_feature (142)..(142): n is a, c, g, or t
  misc_feature (308)..(308): n is a, c, g, or t
  misc_feature (439)..(439): n is a, c, g, or t
  misc_feature (583)..(584): n is a, c, g, or t
  misc_feature (588)..(588): n is a, c, g, or t
  misc_feature (593)..(593): n is a, c, g, or t
  misc_feature (597)..(597): n is a, c, g, or t
  misc_feature (600)..(603): n is a, c, g, or t
  misc_feature (607)..(607): n is a, c, g, or t
  misc_feature (609)..(609): n is a, c, g, or t
  misc_feature (612)..(612): n is a, c, g, or t
  misc_feature (858)..(858): n is a, c, g, or t
  misc_feature (922)..(922): n is a, c, g, or t
  misc_feature (963)..(963): n is a, c, g, or t
  misc_feature (973)..(973): n is a, c, g, or t
  misc_feature (994)..(994): n is a, c, g, or t
  misc_feature (1022)..(1022): n is a, c, g, or t
  misc_feature (1055)..(1055): n is a, c, g, or t
  misc_feature (1120)..(1120): n is a, c, g, or t
  misc_feature (1181)..(1181): n is a, c, g, or t
  misc_feature (1197)..(1197): n is a, c, g, or t
  misc_feature (1255)..(1255): n is a, c, g, or t
  misc_feature (1267)..(1267): n is a, c, g, or t
  misc_feature (1271)..(1271): n is a, c, g, or t
  misc_feature (1290)..(1290): n is a, c, g, or t
  misc_feature (1294)..(1294): n is a, c, g, or t
  misc_feature (1299)..(1300): n is a, c, g, or t
  misc_feature (1326)..(1326): n is a, c, g, or t
  misc_feature (1330)..(1330): n is a, c, g, or t
  misc_feature (1388)..(1388): n is a, c, g, or t
  misc_feature (1433)..(1434): n is a, c, g, or t
  misc_feature (1441)..(1441): n is a, c, g, or t
  misc_feature (1443)..(1444): n is a, c, g, or t
  misc_feature (1446)..(1448): n is a, c, g, or t
  misc_feature (1451)..(1453): n is a, c, g, or t
  misc_feature (1455)..(1455): n is a, c, g, or t
  misc_feature (1464)..(1465): n is a, c, g, or t
  misc_feature (1476)..(1478): n is a, c, g, or t
  misc_feature (1492)..(1492): n is a, c, g, or t
  misc_feature (1496)..(1497): n is a, c, g, or t
  misc_feature (1503)..(1504): n is a, c, g, or t
  misc_feature (1506)..(1507): n is a, c, g, or t
  misc_feature (1513)..(1513): n is a, c, g, or t
  Peptide Sequence Number=SeqID_6516
  Probeset Number=SeqID_12731
ngacgagcatgagtgtcgggcgggtggggtcgtgatacgggacagtgaganctgactaggcgacagggatgtaatgagtggacgatagccacgagcgagatgacgagtcgcgcataagatggccatctataccagatcgttnggacgccactcacggcatcgtccaagcacacagtcactcgcgcagagatgcggagagatgcaaacagaagtcacggtgcatttgagcaggcgtcatgagatgacctagattacgccacgttactcatcattggcgaggagacgctcatggcttgtgatcttttatngactgtggcacgtcttcgtggatgtctatatcatatcatctgcacacttcacgatacgcatcgcgccgactcatcgctgtcccgcgcacgggacctgatcttttattttggttcaatttatttactttctntgatatgggtggatcgggggtgggagcgtggtcggtgcacgcgcaggggtggaggggcggtgttagtgcggtcacggccttgtgatgcatggggtggggtgtgattttcattaataagtgtgtaggaatatttgttgtattgtnntgtnttgtntttnttnnnntttntntancctggtgtggtctcccacattcaattaaatttatatctgacagatagagataggccggccagtccgcgccgcgggtgagagtgacatcgccagcacggcgctacgcaagtcttgacttctcctttatcatctctacataattatcattcattatttcaatttagaaactccgagatacagcaatacttcataagactcacacatagctgtaggcgcatcctatatatgtcagcccagagcccgcgnagtagctagacttctacaatatatggagggggtgagtagtgcgcagtgcagtgaagatgtgtantgtcttatcggattgtcatcgtagccagacatatcgcgtcntgcgtatttncttctttggataatgtccatnagtgagtatatatgccatgctccgctgnctcggaggagcgaggatgtgagaatatagtggnttgtcgttttttgtgctaactatctagaacatgatggttattatcgtggtggtgggtacaggtgncctagaatgttgcggtgccggtatgagcagcatctcaacaactcaccttctaatcgcggtnaggccagacaataaangaaataaagcattcatatacactgtagagaggagccgagcggtcttcctggtcacaangtatcgtcgtgnaccnttcgctctgcgggtgtgtnttgnggtgnnggagtggtgcggtatgtataacctcntatntttatgtgtggttgtactctactcttgtagagtagaggagcatcggctgggtcgacantgtgcgtgtggggtgggggagaacatataggaaggagggataaanntaagtangnngnnntannnanagctgtaannaggtgcgaacnnnggacgcgcccgcangggnngggggnngnnggcagnaccatcaccacctccccccta

SEQ ID NO: 2953 - DNA, 409 bp, Glycine max
  misc_feature (87)..(87): n is a, c, g, or t
  misc_feature (127)..(128): n is a, c, g, or t
  misc_feature (145)..(147): n is a, c, g, or t
  misc_feature (161)..(161): n is a, c, g, or t
  misc_feature (231)..(232): n is a, c, g, or t
  misc_feature (254)..(254): n is a, c, g, or t
  misc_feature (297)..(298): n is a, c, g, or t
  misc_feature (303)..(303): n is a, c, g, or t
  misc_feature (326)..(326): n is a, c, g, or t
  misc_feature (350)..(351): n is a, c, g, or t
  misc_feature (377)..(378): n is a, c, g, or t
  misc_feature (395)..(395): n is a, c, g, or t
  Peptide Sequence Number=SeqID_6517
  Probeset Number=SeqID_12732
ttggtttttcaaaaataataagcaaacacaaacaacacgccaggttcctaatcaggacagaaagagcagcatagctgtggctcgcancatccttctcatagtcgaatttgtgaccaatattttcctnncaaatccctttcactgnnngtttaagagggagnacaaggtggtaaaccaaggaaggagggaggactttgccaccaacgccacaacgaacgctgaagggcaagnntggcgacataaactgttgaggnttgagaagcttcagctctaagaaagtggtgcaaagacacaccnngcagncttcaagctacaaccagcgcccnttgaaggcacggaggcagcactgnngttcgtcaacagggttctcccaagcnncaaatgtgaaccatagnccaccactccgcgc

SEQ ID NO: 2954 - DNA, 231 bp, Glycine max
  Probeset Number=SeqID_12733
gcaataggaactattgtcggcagtttgggagctaacttggcaaaggagaggattgctgcagtggagatcttgttgagatgcatggaagaagatggcactagcaggaacaacattgctgataaagcagagctgacacctcttttggaaaccttaatcgacagcccttcaagatcaatgtccagttatggctggcctcttactccaactcgatcttctggtgtgaaactttga

SEQ ID NO: 2955 - DNA, 698 bp, Glycine max
  misc_feature (1)..(1): n is a, c, g, or t
  Peptide Sequence Number=SeqID_6518
  Probeset Number=SeqID_12734
ncctgccagttcattactcttctcctcgctcccagttttgaatcgagagagagagagagagagaggtgttgggtgcagctagtagctaggagcaagcaagcagatccaggaggagcagagcggagcggagatggcggactgggggccggtcgtggtcgcgacggtgctcttcgtgctgctgacgccggggctgctgttccagctgccggcgcagggccggatcgtggccttcggcagcatgcacaccggcggcctcgccatcctcatccacgccgtcatctacttcgccctcatcaccatcttcctcatcgccatcggggtccacatctacgccggctagaccccacacccactcctcttcgccgcacatctccgccgtgcgtgcctatgaagctttgctgtcccggaggcggcttctcttactattaccgcttgtattgtacttactgtgtagtgggtaccttctattattgtcttcttcatttaggtggccagagaaacaaatatggtttgttgtttgcctggctgggatttcgtttgagatggctgccagtggcatggcgctctccgtctctgggatgaaaatttatccagaaaggctggctggtgttgctgctgccgttgcccttgtgattcctctcttgagttaaccttggacatgttaatttatccatctttttctaaaaaaaaaaaaaaaa

SEQ ID NO: 2956 - DNA, 909 bp, Glycine max
  Peptide Sequence Number=SeqID_6519
  Probeset Number=SeqID_12735
tttgtcgacctagctggtggacaagtcgatgagcgccttccattggacggctctagtcttcatgactaccttgtttcagataaaccaggcaaggatgaggtatttggtgagtacatgggtgaaggcaccgtcacgcccacgtacatgatccgtcgcaaccagtggaagtttacctattctcttgtagacggcccacaactctacaatcttgtggaagacccgcaagagctgcaagacctcgctacctcgacggaacctcaaaaccagaagatgctagccaagtttgaagccgaggcgcgcgagaagtgggacttcaagaccatccacaacgacgttgtgcgaagtcagcgcatgcgccattcttgcttgcagcrmgtawraagattggccgcaaggagtcttgggactaccaaccgccggccaatgacaaagaccgcttcatccgttcccacattcctctggatgagcttgaacgtcgcgcccgcttcccgatcgtggattatctgggccgcgagaagtcagcttcagcatctcatcatggtcttgctggggccaagggccagtgagagtacgctcccgtgttgagcgcgcatgacgatttccttyttcgaccaatttgkgtcgctactggtgctggatgtytccaacatttcaacactactttgtagsgtyttctccttatgtyttctagcgactcatggsgttatgaatttacggcgcgggatgtgtactgccgagcgctytgcatgcagsgtgatcagaatgagccgcattaatggtgtttgggagcatttgaaggcgkgtcgtcttggcgatttatctgatattcatgaggcccagagcgagacmcagacgatgatcagcctggctatctctaacaagtatgataataaaaacttgataagttat

SEQ ID NO: 2957 - DNA, 596 bp, Glycine max
  Peptide Sequence Number=SeqID_6520
  Probeset Number=SeqID_12736
tcgagtcagctacgtaggccccccccccccccatatcattctaaatttacatttccatgcaatcaaattctactaaaatccaaggctttgaagtcctcagctttgaaggtgtcgaacttactcgaaccaaaggtgacaataacttctttgtcgatgtcggaactctctttgttctctacttccaagaaagcgtccgtttcattttaaaccttaatgaatggtcttattgccttttaaaaagactgcctgtgacttcatcaagtcgaaccaatatgaagcaaaggacctatactcttcctgctgaagacgggttctatatgctaaaggtctcaaagatccctcatcctgaagctattcaaaattttgagacgattttagaacattgcacttcattctcgtatcaaggagaagaagagtttggagttcaaaaggatatgagttctcgagagagaattggagaatatttggaagatgcaggatatcatcaattgagtgcttcagaaagaatcaagagaaaattcgctcaaatgactgataaaatctcaagacctttcactaaaggatatcaaggataatatcaatttgaccaataccaa

SEQ ID NO: 2958 - DNA, 2202 bp, Glycine max
  misc_feature (4)..(4): n is a, c, g, or t
  misc_feature (40)..(40): n is a, c, g, or t
  misc_feature (88)..(88): n is a, c, g, or t
  misc_feature (92)..(92): n is a, c, g, or t
  misc_feature (104)..(104): n is a, c, g, or t
  misc_feature (127)..(127): n is a, c, g, or t
  misc_feature (133)..(133): n is a, c, g, or t
  misc_feature (149)..(149): n is a, c, g, or t
  misc_feature (218)..(218): n is a, c, g, or t
  misc_feature (223)..(223): n is a, c, g, or t
  misc_feature (225)..(225): n is a, c, g, or t
  misc_feature (227)..(227): n is a, c, g, or t
  misc_feature (251)..(251): n is a, c, g, or t
  misc_feature (264)..(264): n is a, c, g, or t
  misc_feature (276)..(276): n is a, c, g, or t
  misc_feature (283)..(283): n is a, c, g, or t
  misc_feature (298)..(298): n is a, c, g, or t
  misc_feature (328)..(328): n is a, c, g, or t
  misc_feature (354)..(354): n is a, c, g, or t
  misc_feature (361)..(361): n is a, c, g, or t
  misc_feature (372)..(372): n is a, c, g, or t
  misc_feature (388)..(388): n is a, c, g, or t
  misc_feature (438)..(438): n is a, c, g, or t
  misc_feature (447)..(447): n is a, c, g, or t
  misc_feature (455)..(455): n is a, c, g, or t
  misc_feature (472)..(472): n is a, c, g, or t
  misc_feature (509)..(509): n is a, c, g, or t
  misc_feature (525)..(525): n is a, c, g, or t
  misc_feature (540)..(541): n is a, c, g, or t
  misc_feature (590)..(590): n is a, c, g, or t
  misc_feature (681)..(681): n is a, c, g, or t
  misc_feature (683)..(683): n is a, c, g, or t
  misc_feature (686)..(686): n is a, c, g, or t
  misc_feature (748)..(748): n is a, c, g, or t
  misc_feature (759)..(759): n is a, c, g, or t
  misc_feature (771)..(771): n is a, c, g, or t
  misc_feature (773)..(773): n is a, c, g, or t
  misc_feature (793)..(793): n is a, c, g, or t
  misc_feature (853)..(853): n is a, c, g, or t
  misc_feature (1201)..(1201): n is a, c, g, or t
  misc_feature (1386)..(1386): n is a, c, g, or t
  misc_feature (1488)..(1488): n is a, c, g, or t
  misc_feature (1657)..(1657): n is a, c, g, or t
  misc_feature (2116)..(2116): n is a, c, g, or t
  Probeset Number=SeqID_12737
ttgntcttcatctccttgcatactcatgatgcaacggcanctctcgttcactccttctacagacactcctcgttatacatcatcacgntttntccctatactantgatatttgtcgttcatcatttntcacgnctatcgctatcatcgncaattgtagttccgtccatctactatctctctctacgagtaagtatatttctgtgtccgctatgctgcnctctncncntcgcgaatgcgatcgtcccgcganatgcatcttgctnctgctctctcantcgcgcncatctcgtctcgctncacacgtttactactgctcacatatcagcncgtcatccccttcgttaacatcacanaccatcnctgcttgtatnctacccctcatcaccncactactcccaccccagactgccacctatctcatgcgactactcgtctgnactatccgnctgcactnctatccatctgagtctntacatgccgacgagccgtacactagctgtctacactnctgctgacactgcgtntctgtcctatatcanntttcttgtcctagtctcaccagctctgcgtaagctcattgacagtatanctacgctacctctcttgctttcatatctcactcgcttctatccatcacctgtcactcattttacaaccacgcttgacaattatactatacngntcntgcatatctatatctcatcaccgcatcctctctctcatatactactcgtgagtcatatctanctctctgcatntctcaatagtanantctgtctttagtagcaacantacgtgtgtttcgaccacgtctcctcgtcatcactctcactcacaccagcatctacgctncacacacgcgctgctctaatcgcgtctcgatgcatcacctcacgctatcctccatcacactcgttctctattcactcttacagtacatgctcctcactgttcatagtcctctactccactgcattttccatgctactcttatgctcatctctaccatcctaatctgcctgttcgtacatcatgtatcaccaccgtcgtcctcttctctactctctgcctcgtcagatgcatcatcataccttgttctactactctctcacgtcatgtcgtcactgcatctgctactctcttctcgatctatctgactatcgcgctacctatctccactgtgtcacatgtcacccacantatcccatccgcatctccctctccgtatcccttgctctacatcatacaccatctgtctatcactcatctcactcactatctctactctgactcttctctgcttctcctcctactccgtatagtattcccatgttctcttcgcactctctctcatattcgtctcatatattcctccttcacctgtnctgctttcgatgtcttctctcgtatgcatctcatagcacttcatctctcttcgccctgctctctcatcatcatttcaccgatatatacgcatctacccctgntcgtcactcccactccctctgctctacatcttgtctcgcaggttgaattcatcagtcgtctctgaccgatataagtctacaaccgaccaatcctatcctcagtttctcactgctcacactcatcgaatctctccatatctaatttcgtgtcttctacacgtactcatgntcttcgtcatctccgcatattcatgctcctctcacatcccctatcactactagctttccttcacatattctatatcccatgatatataccatacacacgtgtcgatttcgtcttagacatttccggtaacgttatagctcatccccctctccgcatctaagcttgaatatctcatatcttttatacatcagagggccataaccaaacaacaaacccatctcgcactcgtgcttcgctctactcatccttcactgatcttattcttactttctcatctttcatgatcatgttctatcgtatatttcttctgtttcatcttttcggggaataataatacgcttctcttctctcccctctatcccacttgtgctcattttcctcttataaatacctatctttcctctctgtctctctatactcacaacatccacctgccatggccctccccgccctccctgncgctcgtcaatcgctccgggcgttactactattatactgtatgacctctaatttctctttcaatatctttctttattattattcat

SEQ ID NO: 2959 - DNA, 1869 bp, Glycine max
  misc_feature (33)..(35): n is a, c, g, or t
  misc_feature (42)..(42): n is a, c, g, or t
  misc_feature (56)..(56): n is a, c, g, or t
  misc_feature (58)..(58): n is a, c, g, or t
  misc_feature (61)..(61): n is a, c, g, or t
  misc_feature (66)..(66): n is a, c, g, or t
  misc_feature (105)..(106): n is a, c, g, or t
  misc_feature (108)..(108): n is a, c, g, or t
  misc_feature (122)..(122): n is a, c, g, or t
  misc_feature (178)..(178): n is a, c, g, or t
  misc_feature (185)..(185): n is a, c, g, or t
  misc_feature (187)..(187): n is a, c, g, or t
  misc_feature (222)..(222): n is a, c, g, or t
  misc_feature (232)..(232): n is a, c, g, or t
  misc_feature (339)..(339): n is a, c, g, or t
  misc_feature (347)..(347): n is a, c, g, or t
  misc_feature (352)..(352): n is a, c, g, or t
  misc_feature (452)..(452): n is a, c, g, or t
  misc_feature (562)..(562): n is a, c, g, or t
  misc_feature (566)..(566): n is a, c, g, or t
  misc_feature (569)..(569): n is a, c, g, or t
  misc_feature (572)..(572): n is a, c, g, or t
  misc_feature (593)..(593): n is a, c, g, or t
  misc_feature (904)..(904): n is a, c, g, or t
  misc_feature (912)..(912): n is a, c, g, or t
  misc_feature (927)..(927): n is a, c, g, or t
  misc_feature (1122)..(1122): n is a, c, g, or t
  misc_feature (1270)..(1270): n is a, c, g, or t
  misc_feature (1272)..(1272): n is a, c, g, or t
  misc_feature (1333)..(1333): n is a, c, g, or t
  misc_feature (1335)..(1335): n is a, c, g, or t
  misc_feature (1350)..(1350): n is a, c, g, or t
  misc_feature (1352)..(1352): n is a, c, g, or t
  misc_feature (1356)..(1356): n is a, c, g, or t
  misc_feature (1367)..(1367): n is a, c, g, or t
  misc_feature (1476)..(1476): n is a, c, g, or t
  misc_feature (1527)..(1527): n is a, c, g, or t
  misc_feature (1547)..(1548): n is a, c, g, or t
  misc_feature (1562)..(1562): n is a, c, g, or t
  misc_feature (1650)..(1650): n is a, c, g, or t
  misc_feature (1652)..(1652): n is a, c, g, or t
  misc_feature (1691)..(1691): n is a, c, g, or t
  misc_feature (1701)..(1701): n is a, c, g, or t
  misc_feature (1706)..(1706): n is a, c, g, or t
  misc_feature (1760)..(1760): n is a, c, g, or t
  misc_feature (1762)..(1762): n is a, c, g, or t
  Peptide Sequence Number=SeqID_6521
  Probeset Number=SeqID_12738
tcgacaccgcgaccagtcagaccagtacgggcnnncctcatntcgatgtgatagtncnccncaccncacacacgagaactgtgccactggtcatgcacgatcaanntnctctcttctcacanactataccgactccactcgtcgtcacctgacgagcggcggtgataatcgtcgtgtntctcacncnctccccccccccacctcgcacatacccgctccacnctaacactanatctaggcaacgcctgctacgctggacgtctcctacgtggcatctggtgtagcgcgcgtacgcgcgcggtgagcgtgatcggcgcactggttatgagacgcaacacncacgccanctggncccgcctggtgcaatacacagattatatagcacaggatacagcgtcttgagatagtttctcattatcgtgcaatatacagacatactatgaagtgatatncataaggatactgaacaggcatctgacgcgtgcgacacgctaagactgcgtgaggtgagatgatgggcggcgtatgccgccgaccttatgcccgcattctgtcgcgcttnctanccncantatctcgcgcgcgtcgttttnttatgctcgcgcgctgcgtactgttttgtatctccccgcgcattcacgagtgttggttagattatgtgtactagcgctgtcgttgttaatctaatttattttgtagatgccgtagtgatgcggacgccagcgtcataacgatctattcctatgatcatacatagcatgttgtgtatatacgagattaccgagcgttgtgagagtcttagtcggcgtcttgtgctcagcgtctttcttgcctcgctctctcgttattttctccccgcccgcctcgatagacgaagaaggaatatatgatatgcgagagcganctgcggcnctgcatggtgtcgcntgtagctcgctagcgcactacgtcgttgagcgcgttgatactcagaagaatattatcttacgcacatatcttcaggcggtctcgtaatattcgagctgcgaatgtacgagtgtaggcatcgtatggagacgcagtaggtggacgtgacgtagactcgagctcctcgaagctcgtggctctcgtacgctcgagtgngcataccgttagggtacttgttaggtcagcgacgtgcgacgcgagtaacgtgtgagtgtagtaatcggagagcagtcgcagcgacttagttatcgcttaggagactaacgcaagtatgtgactaagcgcgacgacaccgtcgtagacncncttctggacggcgccgtgtagcgtatctgacagatctactgatggtatatacgcgacgcangntccatagagagaacnantacncatgcgcatantcgcaggaagtgtagtaagcggtgtagtagatatcgtcgtcgtcacagcattgcagctgttggatacggtataatcagcggagaacaagttcggatgagtgtagatganaaaacgacaagaatgagataaatatatgacagacactcggtgagagtatancaagtgtggagacgagcganntattgacgataggnaccgcggtctcggttagcagggtgcgtcgatcggtgcgtcgaggcgcgtcgcgtgtgtgaccggcagccatatctctgcagcgtcgancntcatcgtcggataggtagagagagcgcgagacgagatgncgctaatagntgccnataatgtgagtctcgtgaagatcatgcgcgaaacgcagcatcatcttcacatcnanatcctacagcttgtcggatatagctatctacatgtaatgcagtattatgcactatatcagtgtgtatctagatgatgtgcatgatataatgtagtgtactatcatag

SEQ ID NO: 2960 - DNA, 1063 bp, Glycine max
  Probeset Number=SeqID_12739
cacgagaccattacctagaacatcctaatcgaaaatagccagtgcctcctcctcctcaatttcagcgccacccaaccaaatcacggccagccgagcgccttccccttcctctgccagctcgatcgtcgccggcgcacccagcagatgagcgccttccctgctccttttccttcctcctctgctcctctctctcacactgctcatctctcttccccccgtttctttctctacaggaggaaagcaccacgccatggcctccccaagctctgcttcatccccgtcttgggtccatgaggagacgaccacgccggccgcccttccccatctcgatcgggtccaggaccccgccgcctccagccacctctccgcggtcatggccccgatgggggttacctgccgcgagcctctgtcgtgaccagcacccgaccagcaggtcgccagcgtgcccgatgcctcctcctcgcgcatgcctggccgcgccacctggaccccgcagacaacaccacgccatggcccgcaggttcttctctgagttcatgtcgccctcgttccacgcgcctccggccagattgggcgctccaagcccggccatctccgccgcccttgcccgttctggccggatcccgccggttgggccccgtccccggccaccggtgccctcaccggagaccacctgcaccgtccgccaagtccctttcttcacccgctgcatcctctgcctcgctcgctcgtcccagccttcgttgaccgcgtcctgtctctcctgcgccaagaccaagcctgcgtccaacctccccaccgagccggcctcaaggcccgatgtacaggttatgcgatgatcatgacgcgagagcgatgttttgcttgtgttggcgttcttcttatgcttcttcttcgattaggggataggttccaggtcggcagcctgggctagcagggtggatgtcgtttgagtttctgtttgtgattcattcgtagtcggatggtgctcttttgtaatatgatgttgtattcgtgtggcattgtatgccttttgtatgcatccccaaaaaaaaaaaaaaaa

SEQ ID NO: 2961 - DNA, 1386 bp, Glycine max
  misc_feature (22)..(22): n is a, c, g, or t
  misc_feature (34)..(34): n is a, c, g, or t
  misc_feature (47)..(47): n is a, c, g, or t
  misc_feature (67)..(68): n is a, c, g, or t
  misc_feature (92)..(92): n is a, c, g, or t
  misc_feature (96)..(96): n is a, c, g, or t
  misc_feature (223)..(223): n is a, c, g, or t
  misc_feature (696)..(696): n is a, c, g, or t
  misc_feature (1025)..(1025): n is a, c, g, or t
  misc_feature (1177)..(1177): n is a, c, g, or t
  misc_feature (1231)..(1231): n is a, c, g, or t
  misc_feature (1371)..(1371): n is a, c, g, or t
  Peptide Sequence Number=SeqID_6522
  Probeset Number=SeqID_12740
tttttgggtttcttctattttnctttccctccanaccacccccacanaataacaaaaaaaacccccnncccaccaccacaaaaaccgcggangcgnccctcctcgtctgttgtgtttttgttgtgttctacgatagcgactcacttcctcctagtagggggagagagggattataggaggtgtggctactttccaaattgtgttacgctttttttacccttangtattcgttttgttctcctctctgaaccccgtgacaccacgcctcctttctttctctacattcgcgcccactctcaattcatatctcttttaatgtcttcctctctctccgtcgtacctacatctttcttttttctgcgctccccccgttttattcctatgtttttctgctgtgatttgttttttgatctgagtatcgcagtcaatacgcgcgctttttcttcttcctattgcccttaccactggtgtctgctgttttttgtcttctccgtccttgtggttgattgtgcgggggtctgggggtgattgaaaccatgaggatataaatacaataccactcttagattgttgtcctcactcccctaccccgtctcgcacggcgtctgtctctggtgggtgcgcggagcgtgcgcgtgcccgcgcggcctaggtggcggcgttatgactcacattttatatgtcgcatctataaanagatgagcacgagatgaatgccaccaaggacagagctatacgactcaatctatgccgcgcgcccgtcccctcacgtccgtcctcctataccctatttcttccggcgcgcgaatagttgagagcggctactatacatgtgttgctcttgttttcactctctcctgcgtgctgctctttgtgtctctgttacgtggtggtgttctacgtgcgagaacctgacgcaaacgcgccagcacactacgagcgccacaatcgtgcacgagatagaatagatgctatcttcgcgatactagaccgatccatccccactactgtatactacgtgttgntggcgtacgctccacgcgcatacgacgcccgttactcacacgctagcgcgcgcatcgacctccgcgcctaccgtgcagtcgccggcataccttttacatcgctactaggagacacggtctcacgtacagcgcgcctccggccctcacttccnactcgcatatccacaaacatacgccaactaccaatatcaactctcacactatantgtgtcactcactatatagcacctattccgcatagtatctcttactctgtctgtactgccgcgaggatcgcagtgctcgcaactgctgcgtgtatctctaatatactcgacctaacacacatccactctctacttgctgngacgcaataaggacc

SEQ ID NO: 2962 - DNA, 1410 bp, Glycine max
  misc_feature (10)..(11): n is a, c, g, or t
  misc_feature (18)..(19): n is a, c, g, or t
  misc_feature (21)..(23): n is a, c, g, or t
  misc_feature (25)..(30): n is a, c, g, or t
  misc_feature (45)..(45): n is a, c, g, or t
  misc_feature (67)..(69): n is a, c, g, or t
  misc_feature (112)..(112): n is a, c, g, or t
  misc_feature (554)..(554): n is a, c, g, or t
  misc_feature (916)..(916): n is a, c, g, or t
  misc_feature (1232)..(1232): n is a, c, g, or t
  misc_feature (1278)..(1278): n is a, c, g, or t
  misc_feature (1296)..(1296): n is a, c, g, or t
  misc_feature (1299)..(1299): n is a, c, g, or t
  misc_feature (1403)..(1403): n is a, c, g, or t
  misc_feature (1410)..(1410): n is a, c, g, or t
  Probeset Number=SeqID_12741
ggttgggggnngtggggnntnnntnnnnnnttttttgcttttatngttgtgtttatctttttgtacnnntttccttcctcttcctcctcgcgtgagagttctcttcatctcncacttctcttggttgtgtgcttcgatcgtcgcgttgttgtgtgttgtgtgacgttgttttctttgtgctgttagttccgctcgacacgtgagatgatgacgattctatctctccaagcatacacatatatatgataatatagaacgtcaagaaaacgacaataaattataaacacaaatattatactgagttgtatactatttaattgttatgagtgattgtacttttaagtcgatacatgtattcatacatcgtcccgtgagagttttaatgatcatattatatgactcgcagagtgatatacaacattcacgctaaccgtataacgttagatacggattaaccaagaaaatttgtataattacattttatatttctgattaaattatgtacatgataactatataataaatatgacacttctattatatatctatattcntctctatacatcgtttctattaattatatattatatatttatatttgattgcgtttgttatgtatcgtgtgatgtctaatgtgattgtgtagatatcgaagagaacgcgcgatacgtactctctcgcaacacattcgtgattcgcatctacatgtacactacccacacgtgattctcactccgttgacgcactgagtatattattgttgaatctggctacaggaggtaaagactcttagtattatctacacctcgcattcatctattatattcgtgtgagaaccaacaacctctaacgcgcgtattgatactatgcagagaacaattgtatcatgtgaaacaatcatacgcgccacataggncgagctgctctcatctatctcaatatttacatatgtgctatatatatacttatcttatctaatctctgaacgtcatatcagaagataccggtcatgagtatatcatcatataacaacaagattactcctaatcgtgcttcatgtctaccgtaagatcctgcattccttatcgctctctccttatctatcgactgccgtgcttcgcacgcgttgtgtcacgtcgcgcatccacatacaacttacacatatgtcgcggtctctcgatgtctcaaacattatcgacgttagtgctatactcactcatgctcgtcatccnctgtctcactctcattcatcaatgcgtctcgactcactcacttacntctcaatagcgcctcacnctnctcagcgtctgcaagctacatatatgtccactgacctctaatatatatatctgtcttagtacacgcacgcgactacacacgaatatcacaagatgcgtattatnatgagan

SEQ ID NO: 2963 - DNA, 1688 bp, Glycine max
  misc_feature (37)..(37): n is a, c, g, or t
  misc_feature (67)..(67): n is a, c, g, or t
  misc_feature (78)..(78): n is a, c, g, or t
  misc_feature (86)..(87): n is a, c, g, or t
  misc_feature (91)..(91): n is a, c, g, or t
  misc_feature (93)..(93): n is a, c, g, or t
  misc_feature (147)..(148): n is a, c, g, or t
  misc_feature (290)..(290): n is a, c, g, or t
  misc_feature (331)..(331): n is a, c, g, or t
  misc_feature (341)..(341): n is a, c, g, or t
  misc_feature (442)..(442): n is a, c, g, or t
  misc_feature (467)..(467): n is a, c, g, or t
  misc_feature (525)..(525): n is a, c, g, or t
  misc_feature (626)..(626): n is a, c, g, or t
  misc_feature (631)..(631): n is a, c, g, or t
  misc_feature (659)..(659): n is a, c, g, or t
  misc_feature (708)..(708): n is a, c, g, or t
  misc_feature (714)..(714): n is a, c, g, or t
  misc_feature (736)..(736): n is a, c, g, or t
  misc_feature (743)..(743): n is a, c, g, or t
  misc_feature (749)..(749): n is a, c, g, or t
  misc_feature (767)..(767): n is a, c, g, or t
  misc_feature (770)..(771): n is a, c, g, or t
  misc_feature (775)..(775): n is a, c, g, or t
  misc_feature (791)..(791): n is a, c, g, or t
  misc_feature (809)..(809): n is a, c, g, or t
  misc_feature (850)..(850): n is a, c, g, or t
  misc_feature (876)..(876): n is a, c, g, or t
  misc_feature (886)..(886): n is a, c, g, or t
  misc_feature (912)..(912): n is a, c, g, or t
  misc_feature (922)..(922): n is a, c, g, or t
  misc_feature (938)..(938): n is a, c, g, or t
  misc_feature (941)..(941): n is a, c, g, or t
  misc_feature (958)..(958): n is a, c, g, or t
  misc_feature (963)..(963): n is a, c, g, or t
  misc_feature (977)..(977): n is a, c, g, or t
  misc_feature (979)..(979): n is a, c, g, or t
  misc_feature (985)..(986): n is a, c, g, or t
  misc_feature (994)..(995): n is a, c, g, or t
  misc_feature (997)..(997): n is a, c, g, or t
  misc_feature (1009)..(1009): n is a, c, g, or t
  misc_feature (1019)..(1019): n is a, c, g, or t
  misc_feature (1024)..(1024): n is a, c, g, or t
  misc_feature (1027)..(1027): n is a, c, g, or t
  misc_feature (1055)..(1055): n is a, c, g, or t
  misc_feature (1060)..(1060): n is a, c, g, or t
  misc_feature (1065)..(1065): n is a, c, g, or t
  misc_feature (1068)..(1068): n is a, c, g, or t
  misc_feature (1094)..(1095): n is a, c, g, or t
  misc_feature (1180)..(1181): n is a, c, g, or t
  misc_feature (1205)..(1205): n is a, c, g, or t
  misc_feature (1241)..(1242): n is a, c, g, or t
  misc_feature (1246)..(1247): n is a, c, g, or t
  misc_feature (1260)..(1260): n is a, c, g, or t
  misc_feature (1263)..(1263): n is a, c, g, or t
  misc_feature (1266)..(1266): n is a, c, g, or t
  misc_feature (1275)..(1275): n is a, c, g, or t
  misc_feature (1287)..(1288): n is a, c, g, or t
  misc_feature (1291)..(1292): n is a, c, g, or t
  misc_feature (1305)..(1305): n is a, c, g, or t
  misc_feature (1333)..(1333): n is a, c, g, or t
  misc_feature (1338)..(1338): n is a, c, g, or t
  misc_feature (1350)..(1351): n is a, c, g, or t
  misc_feature (1359)..(1359): n is a, c, g, or t
  misc_feature (1365)..(1365): n is a, c, g, or t
  misc_feature (1372)..(1372): n is a, c, g, or t
  misc_feature (1387)..(1387): n is a, c, g, or t
  misc_feature (1394)..(1394): n is a, c, g, or t
  misc_feature (1415)..(1415): n is a, c, g, or t
  misc_feature (1434)..(1434): n is a, c, g, or t
  misc_feature (1458)..(1458): n is a, c, g, or t
  misc_feature (1461)..(1461): n is a, c, g, or t
  misc_feature (1464)..(1464): n is a, c, g, or t
  misc_feature (1477)..(1477): n is a, c, g, or t
  misc_feature (1482)..(1482): n is a, c, g, or t
  misc_feature (1486)..(1487): n is a, c, g, or t
  misc_feature (1493)..(1496): n is a, c, g, or t
  misc_feature (1499)..(1499): n is a, c, g, or t
  misc_feature (1503)..(1503): n is a, c, g, or t
  misc_feature (1516)..(1516): n is a, c, g, or t
  misc_feature (1522)..(1522): n is a, c, g, or t
  misc_feature (1526)..(1527): n is a, c, g, or t
  misc_feature (1530)..(1532): n is a, c, g, or t
  misc_feature (1544)..(1545): n is a, c, g, or t
  misc_feature (1548)..(1548): n is a, c, g, or t
  misc_feature (1569)..(1569): n is a, c, g, or t
  misc_feature (1598)..(1598): n is a, c, g, or t
  misc_feature (1605)..(1605): n is a, c, g, or t
  misc_feature (1613)..(1613): n is a, c, g, or t
  misc_feature (1619)..(1620): n is a, c, g, or t
  misc_feature (1633)..(1633): n is a, c, g, or t
  misc_feature (1640)..(1640): n is a, c, g, or t
  misc_feature (1645)..(1645): n is a, c, g, or t
  misc_feature (1650)..(1650): n is a, c, g, or t
  misc_feature (1656)..(1656): n is a, c, g, or t
  misc_feature (1659)..(1660): n is a, c, g, or t
  misc_feature (1668)..(1668): n is a, c, g, or t
  misc_feature (1672)..(1672): n is a, c, g, or t
  misc_feature (1688)..(1688): n is a, c, g, or t
  Peptide Sequence Number=SeqID_6523
  Probeset Number=SeqID_12742
cactcgtacaggtgtaatcgtagatggatgagtggtngttatatatatgagtgtatatatatattanagatatttaanagtgtganngggnangataagaaaaatagaacatagtggagaatagagacacatgtgagatagagaggnngtgataagatgaacaaactagcattacaaatatttatatcgagacataaatatatatgtatgtcaatgctttgattgattatgtgtgatgattctagttgtgaattgatagtatattgtttatgcaaacacacataagtgantactagcacatataatgaagataaagtaggagtgaggaagntaggggagtntgaaaatctgcacgatcagttgtgtcgtgaatatgctgcacctgatgtcgagtgcctaaatgtgtgctgtagtggtatacatctgtgaggacaagcggagngagtgcgtgtggacgtggtgtgtcncgagtaatacacgagtatagaagatagagcatgacatcacgaagactatgagagtagnagagatgagagatcgagtgaagagtacgcgagaatagatgtatatcaaatctatattagtgcaagtgactcataggtcatgactcagtgagatagaatganacagnctgggtagtgtgaagaataggagtatanaatagactatggagagagtagagatagtgtgtgatgtgtagtcgtgctntcaggntaggtggtggtatgtaagttgncgctcgntgtcgnacatgcgcatatagactnagnnagtntgcgcgacggagagantgagtagagtggcagagntctgctgtgctgctgtagtgatcagtatgacatctgtgtgnatagggtgcatgtggagacgatgagnacgtagcgantgatgatgacagagtggcgtgtcgtnatgatgacgntagtcagcaccggcgnagnagtgtgatgttcgtcanactanctagtacgatgagnanacgagnncggagtgnntntgacgatcgagnatgggagagnaagtnagncatatgttaacactgtgtagatgagtgnagcgntgagncgnagagagagcaagaattagcggtgtgnntagtgtgagcggaagcatgtgtcggagtagatagacgtgtgcgagagagagagatgagtgtagatgacacttagagtggtgctgnntgatgtgatatgatgttcatgagntgtatgattgtgatgcgtgacgtgtagtggtgatanncagnnatcggtgcgtgtntgntgnttagtcgtncttcacggcgannagnntgttgcatgatgnatgagatgatgagatggtgtggagagancgagnactgagtgccannacagtgtncagtgnagcggantgcatagtgagacgncgagagngatgtgagatgtgagtcgagnagagcaaagagagacgagnacgagatgttagaagagcgttagnagntantcgtatgctgagntgtgntagnnttaagnnnnagnacgntgaagagacgcgncaaganctgnnagnnntgtcatgtagcnnagnagagtcgacgatcgtgtgggncgtgcatgagtcgtatgagtcgtgacacntgacgancacgacgntgagannaaatgtcgagcgnagtgagnagtgncatgnttgtanatnntcggtgtnatgnaatagtgagagagcan

SEQ ID NO: 2964 - DNA, 1764 bp, Glycine max
  misc_feature (153)..(153): n is a, c, g, or t
  misc_feature (495)..(495): n is a, c, g, or t
  misc_feature (731)..(731): n is a, c, g, or t
  misc_feature (902)..(902): n is a, c, g, or t
  misc_feature (928)..(928): n is a, c, g, or t
  misc_feature (1009)..(1009): n is a, c, g, or t
  misc_feature (1020)..(1020): n is a, c, g, or t
  misc_feature (1035)..(1035): n is a, c, g, or t
  misc_feature (1060)..(1060): n is a, c, g, or t
  misc_feature (1077)..(1077): n is a, c, g, or t
  misc_feature (1119)..(1119): n is a, c, g, or t
  misc_feature (1129)..(1129): n is a, c, g, or t
  misc_feature (1171)..(1171): n is a, c, g, or t
  misc_feature (1239)..(1239): n is a, c, g, or t
  misc_feature (1343)..(1343): n is a, c, g, or t
  misc_feature (1362)..(1362): n is a, c, g, or t
  misc_feature (1375)..(1375): n is a, c, g, or t
  misc_feature (1419)..(1419): n is a, c, g, or t
  misc_feature (1494)..(1494): n is a, c, g, or t
  misc_feature (1501)..(1501): n is a, c, g, or t
  misc_feature (1520)..(1520): n is a, c, g, or t
  misc_feature (1562)..(1562): n is a, c, g, or t
  misc_feature (1617)..(1617): n is a, c, g, or t
  misc_feature (1633)..(1633): n is a, c, g, or t
  misc_feature (1698)..(1698): n is a, c, g, or t
  misc_feature (1764)..(1764): n is a, c, g, or t
  Probeset Number=SeqID_12743
tgtgccccgcaccgttctggcgtgccgacgtatatcgcgcctcccacgttttttacgcagccaggtccccccccgcgcccgctttttgcgtggtgggtgtcccgatcgccggatcgtgcggccgctgatatacatattaattttaaatagttnctcgctcgccgcggagatgggtgattgtttaacctatgtatgttacgatctgccgcgctcccacaccattctatacaccttagtcaaccgcagatatttgtctcacaacggacttgtctctcagcctatatttattacgggcccactcaccatttaatagtggttacacgcacggctgccgtcgaacgaacgctcttgatatagttaatatatacgccttcctcccgcctgtgttttttgattttccggaccgcggtatacgcgtctgggtttatctatgcgcgcgttgatatacgaatgcgtcggtgtgtggttggtcgcccgcggcccacacgccacganctggacgggtgtgataacgcatcctcgtactgttttagatatctgcctcgatacattgcgagcgtgctagtgatattcactactaacaaattttgttgacagatacattctagcgcgcgctacactaccgtttcgtgttttcatcccgcccgatattttaattcgccgcgatccgtatgttatattgtgtgaggacgcgtgcgatacacaaacacacgtgtgtcgtgcgacgaaanatatgattacagggcgggtacttgttcgccactaccacatgcctgcgacacgtgataatggaggtggcggagagataataatcacacatgaagagctgcggattcgtagtccgaacttcgagtaatactagcacagataagtgcgtgcgtgtagatgcgcactgagacggngtgatatcatatagtcacactatacngcgcgcgcttcggtgtatgcttgcgtacaatatccactggttattagtcttacacacatcgactatctacttgatgcatgnatcactccagnggcgtgtatataacntcgtgtgactatatgagacgataangatgtgtgacatgttgngtagatacctcgctgacaacgtctaatatatgcgcgcgtagntacgagtagntgtcctgcgccgcggaacgctgcgcgcaccgatactaatacntacacaccgcgagcatatctctgagtactgtagtgcgtgaggcatattgtgagtagtagagatatatnatacaaatcgcgctggctcgaccgcgaatataaatatgacgcgcgcggtgcgacgtcggcgatgcacatagctgggttatgagcatatgcgacgcgacgacagncatgcgcgtccgcgctgcncgcatatatatangcagcaactaatcatgactatcgtcagggtcgcgaatcatatcntctgtcgtgctcgcggcgctgcgtgtgtggtcggctgctgtcgacactacaatacatgacgtcgcgtcgtgtgtngtgtgtngcgtggtaaattgtgaaantcgacgagagcacatgacactgcgcacacgcgcgcgcggatncacatgcgcgcgatcaaatatctactctatcagcatctatgtatcgatgacgtgntcctgggtcgtgtcgnaatttaatatgctgtgtgcacgcgcggcgcgtcgcgctcgcgcgagtattgcgaatgactgtatnatcatgtctgtgtgctaccccacacagactatatactgcaacgatggtgcggtgagcgcgcactgn

SEQ ID NO: 2965 - DNA, 545 bp, Glycine max
  misc_feature (65)..(66): n is a, c, g, or t
  misc_feature (128)..(128): n is a, c, g, or t
  misc_feature (299)..(306): n is a, c, g, or t
  misc_feature (366)..(367): n is a, c, g, or t
  misc_feature (380)..(380): n is a, c, g, or t
  misc_feature (391)..(393): n is a, c, g, or t
  Peptide Sequence Number=SeqID_6524
  Probeset Number=SeqID_12744
aacaaatccccacccaatctcgtctccgatcgacccgaggctcgtcgaacccttcttccccacgnnctcagatgcagatcttcgtgaagacctcacggggcagaacatcacccttgaggtggagtcgnctggaaccatgaacaacgggaggcaagatcaggaacagggaggatttccccggaacaggaaggccttatcttccctggaaaaaacttggggaaagggccaccttttgggaataaaattcgaagggaccccccccccccccggggggtccccccgcgggggggggggggggnnnnnnnnggagaacaatcttcccccgggggagaaaaaaaaaaccccccccctccccccccggggggnncgggagaaaaaanaacacccaccnnnccccccccccggggggggggggaattcccccccccctttttaacaacggggggggggtatatcccccgggggggggggggtttttcccccccgcggaaagggggttttttttttttttaaaaaaaaaggggggggagggggggccccccccc

SEQ ID NO: 2966 - DNA, 1503 bp, Glycine max
  misc_feature (1)..(1): n is a, c, g, or t
  misc_feature (20)..(21): n is a, c, g, or t
  misc_feature (26)..(29): n is a, c, g, or t
  misc_feature (31)..(32): n is a, c, g, or t
  misc_feature (34)..(34): n is a, c, g, or t
  misc_feature (55)..(55): n is a, c, g, or t
  misc_feature (61)..(61): n is a, c, g, or t
  misc_feature (72)..(74): n is a, c, g, or t
  misc_feature (83)..(88): n is a, c, g, or t
  misc_feature (90)..(90): n is a, c, g, or t
  misc_feature (98)..(103): n is a, c, g, or t
  misc_feature (119)..(119): n is a, c, g, or t
  misc_feature (125)..(125): n is a, c, g, or t
  misc_feature (136)..(137): n is a, c, g, or t
  misc_feature (145)..(145): n is a, c, g, or t
  misc_feature (162)..(164): n is a, c, g, or t
  misc_feature (182)..(182): n is a, c, g, or t
  misc_feature (184)..(187): n is a, c, g, or t
  misc_feature (189)..(189): n is a, c, g, or t
  misc_feature (191)..(192): n is a, c, g, or t
  misc_feature (214)..(215): n is a, c, g, or t
  misc_feature (222)..(222): n is a, c, g, or t
  misc_feature (230)..(231): n is a, c, g, or t
  misc_feature (235)..(236): n is a, c, g, or t
  misc_feature (238)..(239): n is a, c, g, or t
  misc_feature (241)..(241): n is a, c, g, or t
  misc_feature (264)..(264): n is a, c, g, or t
  misc_feature (269)..(269): n is a, c, g, or t
  misc_feature (345)..(345): n is a, c, g, or t
  misc_feature (495)..(495): n is a, c, g, or t
  misc_feature (497)..(497): n is a, c, g, or t
  misc_feature (620)..(620): n is a, c, g, or t
  misc_feature (718)..(718): n is a, c, g, or t
  misc_feature (730)..(730): n is a, c, g, or t
  misc_feature (739)..(739): n is a, c, g, or t
  misc_feature (741)..(741): n is a, c, g, or t
  misc_feature (763)..(763): n is a, c, g, or t
  misc_feature (769)..(769): n is a, c, g, or t
  misc_feature (788)..(788): n is a, c, g, or t
  misc_feature (794)..(794): n is a, c, g, or t
  misc_feature (854)..(854): n is a, c, g, or t
  misc_feature (862)..(862): n is a, c, g, or t
  misc_feature (868)..(868): n is a, c, g, or t
  misc_feature (876)..(876): n is a, c, g, or t
  misc_feature (894)..(894): n is a, c, g, or t
  misc_feature (896)..(896): n is a, c, g, or t
  misc_feature (908)..(908): n is a, c, g, or t
  misc_feature (914)..(914): n is a, c, g, or t
  misc_feature (916)..(916): n is a, c, g, or t
  misc_feature (928)..(928): n is a, c, g, or t
  misc_feature (932)..(932): n is a, c, g, or t
  misc_feature (958)..(958): n is a, c, g, or t
  misc_feature (967)..(967): n is a, c, g, or t
  misc_feature (984)..(984): n is a, c, g, or t
  misc_feature (1014)..(1014): n is a, c, g, or t
  misc_feature (1086)..(1086): n is a, c, g, or t
  misc_feature (1194)..(1194): n is a, c, g, or t
  misc_feature (1203)..(1203): n is a, c, g, or t
  misc_feature (1329)..(1329): n is a, c, g, or t
  misc_feature (1388)..(1388): n is a, c, g, or t
  misc_feature (1417)..(1417): n is a, c, g, or t
  misc_feature (1445)..(1445): n is a, c, g, or t
  misc_feature (1503)..(1503): n is a, c, g, or t
  Probeset Number=SeqID_12745
ncagaaaagaggggaggaannaaaannnncnnanaataaggaacatcccctgggncggccncggagaaaacnnncccccccannnnnntntggggggnnnnnngaagagaggaaaatcnaatctntccaatccccnntcccaggngtgcgccaagcgttacnnngaagcagaagggagaganannnngngnnaagaaaagtttttttgcaacannaagagangagagganngcanngnngngaagggggagacaggagggaagnaaacngagagagcaagagacacagacggcccgcaggacagccaggagaaagagggcaggacagacgacgcaagacaggcgncgaggggacaacgcggggcgcgacacgacgcagggacgaaccgaaccggacgcaccaggagaaggcgacgaacacacacggaagagagcaggagaccaggacagagaggaaacacagagaccgacggacgagcgaggaggagagaagaancncggaagggggacacaggaccacgacaggggacagcaagacgcacagagcgacggaagcgggaaacaggcgaaaacggggagcaagcgccgaaccgggcaaacaacgcacagagacagacgagngagaggtatcttttcttctctgtaattgaatgaatgtcggagaataacacagacgatgtaattagggaaacagatatggtgatagtacacaacagcanagatgacattancagggcgcnangacgagcgtagtataataggtntaggangctgacaatcaaaataacnctagtngtcgcgtcgtgtattgacagtgaaggcgaatatagtgtacgaacattgtgtcactgcacngtgagcantgagtntagatgcngtcgactcgcaagcaggngncagttaggaatnaatttntngtcagaatagtnagtngtatacagtagacagacatgataggnaagtcagantgcagagtgagggtttnctctagcagtacatataatattattagcgnacaggacacagtatgatggatgagttgtcatgttatcagacggcacaggttggagaacactctggaggaganctatatatgtctgctagtaatggagtggcgagagaggcggtcgatagagacgacagccgaactgaatacgcgatgcaagacagcagggtgatagcagagctttataangctgaacgntgagactaatcagacatagtgacacaggacttcggatgtgtggcgtggattaacgcatatactcggagttgcagagatctacactctcggcgcgcagcgaaacatatatgtcgggcgagaagtgtnttgtgcgcgggataaggaaagatactgattatcaggacatcaagagactgtgaagatgngaagacacacgtgaaaacgagaagaagtnagagcaaagagttttgtaacgttatgcngcgagcaatcagcgaagagcagacacccttggggagatcgtgggaacattatgtagan

SEQ ID NO: 2967 - DNA, 408 bp, Glycine max
  Peptide Sequence Number=SeqID_6525
  Probeset Number=SeqID_12746
gggaagggtgccagaagtgcttctggacgttttatatgtcatgttttttttaggaggcgtcagaaacctgtttgccaggaaggatccgagggtcgggcggtgtactgcaaggcacatggaggtggcaggcgatgtgaattccttggttgcacaaagagtgcacaaggacgtacagattactgtattgcccatggtggtggcctgagatgcagtcatgaatgttataccccggctgccataaggaaatctggattatgcatccctcattgtcggcgcaatagatcctccatagaaaattgttccaagagtgctcaaagcccatcatgtctttggatctcacatggtggatggcgttaatgccaagttcctgtatgtacaaaagaagcacatggcatcacaatgttttgc

SEQ ID NO: 2968 - DNA, 1360 bp, Glycine max
  Peptide Sequence Number=SeqID_6526
  Probeset Number=SeqID_12747
gacaaagagagctacgagtggatcagctgatgtgtggcgataaaatgacgacacgtgtatcagtcgacttcgtcatctcgtacaattacacgtctacgtgatataactgatgatacagtatgatacgatagtcatgaagggtcgcgcgtgggtcgacccgctacactctctatgcgctctcccggatctttacgcgcagagctgcaaattatggtattgtcgcgtgtagtgagactcagtgtgcgtgagtatgctttctgatgatgtgatgcatgtcttcactgtcatactgtgcaccgtatcaactacgtcttcgccgcacagtctccttgcacttatacgagcacgacgcgtactctataacctgtccaactctacgagtctacataagatatcaccggtactacgctccgacttataatatcctgactatgggtcggcacgactgatcggcgtaaagacacgcactcaccatggctatcagtgaaccgagtgtagctcggttatttattatatctctgcgtctgctacagtatgatgtgtaacgcgcctgcggatacagatctcttgctcatagcgccatctcgtttattagcgatattgaccctccccaggcgacttcacatgctacgtcctaacagctgctactaacagtcacgctcataggcctcttatctcccgcttactcaaatccttggaggaatattgtgtcactagattccgcctcctcgacgactcagatagtgtttttttatgttgacacttcaggcgactcgtactcccaagctatgttagcgttctatatctcaaaagatacttgtctgttactatcgattacagattctaggaattagtgggcgtggacatcatattccgtgcgttatgagcggagcataacatataacgaataaaaacctctattacgatctctggcgccgagcaggaccgcagtaagcacgcgtacgtgcgccgcgccttgctagactctacaccaaattaatggtcggtgagagtatgactctatcctctgtcactgctaactattttttcctcgctgcgggggaggcgaggtatctctgcctttagcatgaagaccgaagagtgaatcagtattccgttcgcggactgggcgcgggttattggcggggatagagagatgattgtagtaaatatgccgcgataatttaagtttggtttagtcagtaaacaggtcaactacagaaaaaacaaacgccgtactacccacacgtttggtgggagagaattcttacgctttcggctcggtactgggatgtctactagggacgaagcgccggggcggcctcccttgcggtgcggttggcggtggtagaaggtaggg

SEQ ID NO: 2969 - DNA, 1370 bp, Glycine max
  misc_feature (25)..(25): n is a, c, g, or t
  misc_feature (96)..(96): n is a, c, g, or t
  misc_feature (125)..(125): n is a, c, g, or t
  misc_feature (192)..(192): n is a, c, g, or t
  misc_feature (354)..(354): n is a, c, g, or t
  misc_feature (994)..(994): n is a, c, g, or t
  misc_feature (1010)..(1010): n is a, c, g, or t
  misc_feature (1234)..(1234): n is a, c, g, or t
  misc_feature (1246)..(1247): n is a, c, g, or t
  misc_feature (1252)..(1252): n is a, c, g, or t
  misc_feature (1255)..(1255): n is a, c, g, or t
  misc_feature (1260)..(1263): n is a, c, g, or t
  misc_feature (1299)..(1299): n is a, c, g, or t
  misc_feature (1326)..(1326): n is a, c, g, or t
  misc_feature (1350)..(1350): n is a, c, g, or t
  misc_feature (1353)..(1353): n is a, c, g, or t
  Probeset Number=SeqID_12748
cgtgcaacataaacaagtatgatgngcatgcggagacatagtatatgtggatattgtgtagagccggcgcgagtagcagtctcgctggagtgacgngacgtgagtagaagattagtgtgtcgagncgctagctacagacacgtgagtcacgtgcacgtagcggtgatcgagagagagtgtaggcttgagagntcgcggagatgtgactgcagtgcgcacgccacgccggcggagcgcagagtgttatactcgactcgagagagcgagcagtctggtgcgtgagggagtgtgagggggtatattgtgtcacgtggtgaggcgtgaaggactagacgatcggttcgctgagctctngcggtgaggcgcataaccacactccgagcgtagaaggccgcggagatcgcgcagcgcgcgcgtgcgagaagggaggtaataagcgtatacgtccgtatacgcaactgacgtaaggagagagagtgcagtggcgaggagagagttgaatataatgtacgatttgtggtgtcggatgtggagttctggtgggcggtagtatctactccacaccagacagagagaggagcgctggtgtatagtataactagtagcctagagagtcgatcgaaacacgaggaggtcgggtgggcgggacgaggtacacaacgagccgagctagtagaggcggaggcgggtgccggctattgaaacggactgtcctggccagccacacacactatatattacaggtggggggtgggttcgaggatgggagggtagacaagtagacaggtgaagagatacgagcatacggcatgcgcacacacacgcgagcaggagagcaggacgggctgctactccgcagtctgatgctatacggggaacactcctcgagatcgtattaactctcattaccagaatagcaggtgggtatggattgctccgtgtacagggtgagagtaacagagcaagattgcaggctgagcaagtgtaagagcantataactctagagagnccgagaacacacccacctccgggaggctacgcgccgagcaatcgatactaaagactatatgttatctcattctctctttgcgaatactgtccggcactgttagaacagagtaatagtgctcctgcgttggtgaaactcttcacagcagagagggaagtggcgatatgccaacctaacatactttagaggccgcgcgcgcctcttcgagagcgggaggacttggnaaaatatcttanncacanggngaaannnnaaataatagagacacacagacgatgagacatagtancgcggtataatatatagaaatataaantgggcgacagcgcgcacacacacncgnccaaacagacacacatt

SEQ ID NO: 2970 - DNA, 1355 bp, Glycine max
  misc_feature (91)..(91): n is a, c, g, or t
  misc_feature (414)..(415): n is a, c, g, or t
  misc_feature (640)..(640): n is a, c, g, or t
  misc_feature (743)..(743): n is a, c, g, or t
  misc_feature (769)..(769): n is a, c, g, or t
  misc_feature (929)..(929): n is a, c, g, or t
  misc_feature (1016)..(1016): n is a, c, g, or t
  misc_feature (1023)..(1023): n is a, c, g, or t
  misc_feature (1089)..(1089): n is a, c, g, or t
  misc_feature (1160)..(1161): n is a, c, g, or t
  misc_feature (1175)..(1175): n is a, c, g, or t
  misc_feature (1238)..(1238): n is a, c, g, or t
  misc_feature (1255)..(1256): n is a, c, g, or t
  misc_feature (1262)..(1262): n is a, c, g, or t
  misc_feature (1265)..(1265): n is a, c, g, or t
  misc_feature (1279)..(1279): n is a, c, g, or t
  misc_feature (1281)..(1281): n is a, c, g, or t
  misc_feature (1314)..(1314): n is a, c, g, or t
  misc_feature (1330)..(1330): n is a, c, g, or t
  misc_feature (1334)..(1334): n is a, c, g, or t
  misc_feature (1347)..(1348): n is a, c, g, or t
  Peptide Sequence Number=SeqID_6527
  Probeset Number=SeqID_12749
cggttcgtgctggtctgcatactctgtatgatctagatgagatataaattcatagagagtgtgcataaatgcttcaatagaagtcataaanagtctcggagaacaatatgcgagtgtatcagtattaatatgaatataacttatacgcacatgtgtgacgcggcagtatacaatatactgtgcgtcgttcgatatcataacgagtctcgtgagatagtgctgagacgaagagccagacggcggatagagcgagtagcacacacgatagacagcgtcgcgcagcgcagtagagaaacgacagcgttgacatagcgagacgacgcgcatcgaacacacagagcagctactgacgtcgtcatccgaccggcgcgtggcgcgcgacgccaacgtcagctgcggcggcgctgtgcgtgnnttgcgtcgtgtctagcatggcgaatgcaagagcgacgcggggcggcatcatcattccacgtgatggcacgactcaactagcaccataatgagacagctgcgtgtggtggtatgtatacgaggagcgctggtctatctcatctacctctacacatcaatatccacaacacaacacacaacacagagcgcggacaccgcgccgcgcagcacacctcgggtggtgagnatatcatacactaacataataacatacgaccgcagcacaagagcgagataaagaagagatagcaaataaataatatgagtgatcgtagtagtattgatgtgtngtacataattacacgctgcgcgtggngtcgtctgcgctgacgggacacctcactgtcggcgccgcatctcctccgcgcatcggtcactgtagggcggtctcgaacgcgctgcgtcgcgaggcgcacacaaagtgaatagcggagacgagaccgcataaaagagaatagcacaagaatagcagacanggtacagcacgcaagagagaccgcagacgcaacctcgatctaatcgacgacacgtcagcccgcgcgcccgctacgtacatgagaacngagacgnaaacgcggagcgagtgggccacgcggagaagtagaagagagaaaagaatagatatatatactgtcnatataattagatctacgttatcaataagatcatacaaatataagcagatatatataataaaagtaactaannttttcgtggcgcgncggtgtgttgtcgcggcgtcgatgtacacattaaatgtgttgtgttgtgtttagtgttatctnatgcccttcgtttaatnntctctnccntctctctcacacantnactaacgtgcaccacccactctctatcctcacntttcatcataaaaaanaaanaaaaaaaaaaaannaaaaaaa

SEQ ID NO: 2971 - DNA, 365 bp, Glycine max
  misc_feature (62)..(62): n is a, c, g, or t
  Probeset Number=SeqID_12750
tcgagtcagctacgtaggccccccccccaagacaccttcatataccgccagaaatcaagatngaaggaagctctgacgctgaagaagccagacaaatgattgtgatgctaaagctgaagctgaagctcaagaaaagttttgaatgaatgcttgcttgcttgattgaagaaactattgaattggaattgactgaaaacattttggaatgaatcaagaggtacatttacgcggtttaatttggaaagaacctatcaatctattgtgaaatgaagaagacaaatgaagatttgctctcgcaggaagaatcaatcaaaattattcgctatcaaataaattaagatgaaagaaaccacaattaaactgtt

SEQ ID NO: 2972 - DNA, 1541 bp, Glycine max
  misc_feature (1)..(1): n is a, c, g, or t
  misc_feature (1239)..(1239): n is a, c, g, or t
  misc_feature (1277)..(1277): n is a, c, g, or t
  misc_feature (1446)..(1449): n is a, c, g, or t
  misc_feature (1452)..(1452): n is a, c, g, or t
  Peptide Sequence Number=SeqID_6528
  Probeset Number=SeqID_12751
nccctcctttacccccccttacattatttcatacaccccgtacgcttaccagcaacacacgcgcacgcaattggcgcaaccgtggttaccaccacatcgcacgcccggcgtggcctccccatccgacccctttcgttttctatattatcctcgatgacgacacaagttatccccttcgtttaatgataactcttgtgtgatcctctctctcgctctgctactctcgttcttactcaggacatggcgactcatttgctctatgcccacctcttaaccgctctggctcccgtccagactcggccatcacatcagccccggcacgtacccacaccccatgaaatctcacatgccccttacactcactatcgctcacccccactcacccaattcctcctaccaacgaatatgaaacactattaacatcatataacaaagaaatctaaaataaacactataaatttaatctacgctccttttcctcttcagcccacactcattgtgcctgtgatgttttttttactcccccctccagcttaccctattctctctcacacctttcttcagaccccacccccaacgcgctcattgtacccgccgctccaccacggacagatcaaccccgcccactttccacgacggctccccggctttcactcgcgccttacatatgacccagcacgtcaacatcctcccgcgcgccgcaacatacatcagacggccgcgcacactcgagcgcctgcggttgccgcccacgactggccccgattatggatcgcatctctgcctttcaccatctccccttaacgatccccgtcatttctcgccataacacacgcctcttctcgctaccacaccctcaacctcatcacgttattctataactccacacatacccatggaaattatgagacgagattatcattttacgtaataattacgagacgcgacaaccgaccgatcatgtgcactactgtattatctctaccgccccctcgtttctcgtcgtaagtataacgttcatacgtatacttaccgtgaggtaggatcatacccgcgcacccactcaccacgtatctccatatcgacacgttatccctcgccgcatccaccgaccgtgtccacgccctatctccacctcgatctctagacagagcctagacgcgcgatgtacgtcgtccttctcactccctcgtctccgccggtcgtcgcccctagtctgacatcaggcgactgcacccnactcttcatatcatatatatatcctctcacagtgtctntatcctcacccccttctcagcacatactatacaacatatattagccgctcgactcgcctctctactattctccactcgtcgccccgcagtccactatgactaaatgcttctccacacacagaccttcactcatgtcaatgcaatcctcgatactcactcgcacactttnnnntanttaacacataacacctagtctctgcatagataacattacccccagcgctgaagtatactatactcaccgactgccgtgactatatgcgt

SEQ ID NO: 2973 - DNA, 1819 bp, Glycine max
  misc_feature (1)..(1): n is a, c, g, or t
  misc_feature (1788)..(1819): n is a, c, g, or t
  Probeset Number=SeqID_12752
nggggcgccacgcgccaatttaggggggggatgaggtcccgtcccgtttgggccgcccgccagggctttttaccattttttggttgatgggtttagggcccccctggggggttttttggagggtttttttaacgccctttattccctgttgaagggaagtctagggggcggaagatttaattttccccccgcccccaatttttttccctcctttttttcgcgggagcccaaaaagatctcggcacttccccagggaaaaaaaaaggggggtccccccccgcggggggtactgggttctccttccgcaggtcgagccaccccggtggccccccggggggcccagcccccccattacctagaacatcctaatcgaaaaaaaaaaactccgattccgagtaccataggacccaacggtaaaaggatggcgaccaaagcagccccaccgaccctggtggtctcgcaccattagaatccccttccccaacccaaatcggccgccgccgagccctcgaccgtcaccggagccgccgagccaaccaccgaagcgcctcgaacccctcgtcctcctcctcgtgcctgccatcctccaccggatcggcgcggatcggaggctcccgcgaagcgattcctcctgtcaggcagtcgagatgtcggagtaccagaacgtcgttggggggaggctcaagctgaaggggaaaccgctggatgtcaaggagggcggagtcaagaagaagaataagaagaagcaccgccgcgaggagtcgtctcaaggcgagcacggcgagctccgcgaaggtggaagctctgaattgccaggtgaccctgacaatgagttcagtgaagctgacaagctgggagaggaagggagtgcgcaagccgattatgatcacctcactccagctgagaggcgttacattgaacagaagcagaagatcgacgtacacaagttggccaaggtggctgacaagtcgcacagggaccgcatccaggacttcaaccagtacctcgcaaatcttagtgagcactatgatatcccgaaggtcggccctggttaattaaggtccgcaagtgctccagtgtgctggacctatgcatgtagctcgtcaatttcgcgtgggtgtgctctgaaacaatggatgattgtgttgtcttcagagataaactgagtatctctgcacttataagctgattgcactttatctctgtttaaagaccatgtttaatatacttccaagtgttctgagtaaaaaaaaaaaaaaaaaagcttatcgataccgtcgacctcgagggggggcctgtttaaacacaataaagttggaacgggaggggggtcccccccctaaaaggggtcgtgtactaccggcgcccgagtttttccgcaccccttcatttccatgtagaaatccccgggccctcgccccacaccctataatttttttatgctcccattaaaccttcacctctttttttccctaaggcccccttataccaaaccctccccacatttgtccccctctcatcttcacttcccctcgaccctccctaaaaaaaaacaactatccacctactttcctaatttttttcaaagtataaaaacttcatcctatacactcatctacccttttccatatacgcctacgactggtccctcccgcttacttccccccgccccccccttctacttccccccgaaataccctagccgcctatagactcccaaaatttatccttatgaatctctcccaaaactaccacataccacctctcactggagcgggcgggcgatgnnnnnnnnnnnnnnnnnnnnnnnnnnnnnnnn

SEQ ID NO: 2974 - DNA, 1492 bp, Glycine max
  misc_feature (1)..(1): n is a, c, g, or t
  misc_feature (124)..(124): n is a, c, g, or t
  misc_feature (575)..(575): n is a, c, g, or t
  misc_feature (624)..(624): n is a, c, g, or t
  misc_feature (783)..(783): n is a, c, g, or t
  misc_feature (932)..(932): n is a, c, g, or t
  misc_feature (939)..(939): n is a, c, g, or t
  misc_feature (1118)..(1118): n is a, c, g, or t
  misc_feature (1247)..(1247): n is a, c, g, or t
  misc_feature (1360)..(1360): n is a, c, g, or t
  misc_feature (1469)..(1469): n is a, c, g, or t
  Peptide Sequence Number=SeqID_6529
  Probeset Number=SeqID_12753
ntatcaggagtattcacatcagtagtgagctgtacgtactcggagcgctctttaatagagtagcgtgatatacaagtacattcaataatcaaacatcatgtcgtactgcgcgacgtgagcttgngcacaaatcagcgtcacagcacatcacgttgcgtctcatacagcactctcactcattcactgaatagcagtgccggcagacacatataaatatatgtgtgcgagacaagcagtagtaagatacatattatgtattcttgcggtagtcaaaccgtaagataatagtcgatgcaatcgatgtaatattagactgagagcatcatacatttagtgtggtcgcagcagctgtgtgatatatattaaattatgtgtgtcatgtgtgtgcgggcgggagaacgcaagccgcaacacgcacacgtatcgctgatcacgattggtgtgctgtttagcaagctcctgtcaagtaataggtggatataacgacatgaacgaagattttataaacaatattcatcggtgacgtcagcgccgtgtgtcgaaacaactatagtataatctgttaattaatccanttctcgagatgcgcgcggcgcgagtgctgtaatgtcggggcacgacatngatacatataagcggcatgacgatcatttatattgtataatataagccgggggtgttcgttatttttaaatacattgctcagacaactatatagtgatgctgcaaaagcgccggaaataaagatgagcatgataatagagcagcgtgaggagatattantaaacagtagttgtgggtagacggtgtcggaatcagatcagttatgatataacgtatactaggtgcgcggacaagaatacggtggtcggatatacttgttacagagtgatatatcaggaagtggcgaatgtataataacacgggtgtgntagtganggtgggcgcggcgtgcaccgagtcagaccactatacaatacgctggtgatgcatacggatattggttctatgagttacatgtgtgtcttattatatgagaccacaatcatgacgagagacgtgtacggagtcatgacgatagatattacgtatatcggatcgtaataaatagatatatnatatctatattgcaataatcaactggctcggcgcgcttcgtcgcgataaccgtaggtaacgtagagaggaggtggtgcgtgggtgtgattcactactgatcgtgttgtttatagttagtcttttattantaggtgttaagtgtgcattagaagcgcatcttatcgccgcattccatagagtattaagagggtgtgagagtgtgttagaacaacactatgaggagcgaagagagaaacgggcncacgacatatgacgcggcgtgatagaaacacagtttaagatagcagtgtggaggtgaggtgtagtagtatgtgagaggagagggtagagaagagatgtggtgcgcgctngattacttattatctacagacaa

SEQ ID NO: 2975 - DNA, 1662 bp, Glycine max
  misc_feature (25)..(25): n is a, c, g, or t
  misc_feature (27)..(28): n is a, c, g, or t
  misc_feature (37)..(37): n is a, c, g, or t
  misc_feature (40)..(43): n is a, c, g, or t
  misc_feature (49)..(49): n is a, c, g, or t
  misc_feature (62)..(63): n is a, c, g, or t
  misc_feature (65)..(66): n is a, c, g, or t
  misc_feature (68)..(69): n is a, c, g, or t
  misc_feature (72)..(73): n is a, c, g, or t
  misc_feature (76)..(79): n is a, c, g, or t
  misc_feature (81)..(83): n is a, c, g, or t
  misc_feature (85)..(85): n is a, c, g, or t
  misc_feature (88)..(88): n is a, c, g, or t
  misc_feature (90)..(90): n is a, c, g, or t
  misc_feature (92)..(92): n is a, c, g, or t
  misc_feature (94)..(95): n is a, c, g, or t
  misc_feature (102)..(102): n is a, c, g, or t
  misc_feature (104)..(106): n is a, c, g, or t
  misc_feature (108)..(108): n is a, c, g, or t
  misc_feature (119)..(120): n is a, c, g, or t
  misc_feature (151)..(151): n is a, c, g, or t
  misc_feature (188)..(188): n is a, c, g, or t
  misc_feature (223)..(223): n is a, c, g, or t
  misc_feature (240)..(242): n is a, c, g, or t
  misc_feature (244)..(244): n is a, c, g, or t
  misc_feature (249)..(249): n is a, c, g, or t
  misc_feature (252)..(252): n is a, c, g, or t
  misc_feature (254)..(255): n is a, c, g, or t
  misc_feature (271)..(271): n is a, c, g, or t
  misc_feature (339)..(339): n is a, c, g, or t
  misc_feature (363)..(363): n is a, c, g, or t
  misc_feature (509)..(509): n is a, c, g, or t
  misc_feature (626)..(626): n is a, c, g, or t
  misc_feature (648)..(648): n is a, c, g, or t
  misc_feature (910)..(911): n is a, c, g, or t
  misc_feature (1333)..(1333): n is a, c, g, or t
  misc_feature (1458)..(1458): n is a, c, g, or t
  misc_feature (1532)..(1532): n is a, c, g, or t
  misc_feature (1567)..(1567): n is a, c, g, or t
  Probeset Number=SeqID_12754
ggggggggggggggggtgggggggntnnggggggggngtnnnnttctanccgtttttgtggnngnntnnccnnttnnnntnnntntcncncncnnccccacncnnncnaccctccctcnnccgggcccccccctcatctcgcgcgcggcgngtctcctgctgcgctggtggtctgctacgctctgcgntggcacatggtgcctgccagcggccggcgcctggntcgggagtggatgtctnnnantcgtngangnngcggcgcacgccccgngcctgaaggagagagagacgagagcgagcgagaacacgagcgagaaagagggagcgcgtagagctagngtgctagatgacgagctctctgangcagtgcgatcactcaatatctcgctatactacactcacacatcttaatctacttactcacgagatcgaggatgaggagagagaggcagagaagacgctgatgcgggcgtcgcggagcggacgacggagggagtggccgcgaacangtatactgtcaagagatgagtgaggacctggcaaagataggaatacgacaacgccgataacagcaaaataggagtaatgatgaaacgatctcaacacaatatagaaagtacatatcncacaaatatagtatatacacangagatctctcgattatgcagactacacgccaactacataggagcacactggcgtagctcactcatgagtctagacacatcgtacgcggagtcgtggtcgacgtagagttaatgatgcatgatggcttaagacgttcagtgtcgctgggccgaagaagagtgtacataatcatgctatagttatcataatttataagaaagcagtgatgtcgtgtgccgatctatgcctgctgcaccttgctagcgatgagatacagttgttnnttttctacatgtagtattgattgtggagtcgcgcgcgttgctgcgttgtagtactcatctcagatgtatgtaatgttataagtcatgcgatactgaatagaccgcgaacacgcaatattctgtgtatgcggctgcacacttccattagagactctacgccactctgtggtcaccgcacgcgacagcatagaatatacgaagaaggatcgacacagaacccatcgcgatgacgcgacgaagcaacgagaacacgcgacaacgagcaacgacccacaccgtccacaggtcgaggtggggcagctgcgacgtgacaccggagagaggagcatatgtgactgtgcagctaccacactacatctcacgctactaaccgctgatagagtatagcgcgccgcagctcgtgtctctcagacatcggtatnttccgtatcgtcatctgtcatcatactctccaccaccgcactcagctcgacacgctagacaacctgtacgacagtatactctctctgtcagcaacgtcgccgagatcagcgcaactcattctatnctggtcagtaatatacgcgcgcgctctgctgccactactgtgttgataggctatatcgtatgcacgctcacacncgctcgcccacacgccgactcttctcatgctatgntcttgcacagactcacgtagactgtgctgtatactatacgaaatctgcatcgcgaccaccactagcgtgatattataagactgtcgcgccgcgcg

SEQ ID NO: 2976 - DNA, 1720 bp, Glycine max
  misc_feature (1)..(13): n is a, c, g, or t
  misc_feature (18)..(42): n is a, c, g, or t
  misc_feature (52)..(53): n is a, c, g, or t
  misc_feature (57)..(57): n is a, c, g, or t
  misc_feature (60)..(71): n is a, c, g, or t
  misc_feature (77)..(77): n is a, c, g, or t
  misc_feature (82)..(83): n is a, c, g, or t
  misc_feature (87)..(87): n is a, c, g, or t
  misc_feature (93)..(93): n is a, c, g, or t
  misc_feature (100)..(100): n is a, c, g, or t
  misc_feature (109)..(109): n is a, c, g, or t
  misc_feature (136)..(136): n is a, c, g, or t
  misc_feature (146)..(146): n is a, c, g, or t
  misc_feature (161)..(161): n is a, c, g, or t
  misc_feature (317)..(317): n is a, c, g, or t
  misc_feature (319)..(319): n is a, c, g, or t
  misc_feature (327)..(327): n is a, c, g, or t
  misc_feature (335)..(337): n is a, c, g, or t
  misc_feature (339)..(340): n is a, c, g, or t
  misc_feature (352)..(352): n is a, c, g, or t
  misc_feature (396)..(396): n is a, c, g, or t
  misc_feature (489)..(489): n is a, c, g, or t
  misc_feature (529)..(529): n is a, c, g, or t
  misc_feature (640)..(640): n is a, c, g, or t
  misc_feature (949)..(949): n is a, c, g, or t
  misc_feature (1088)..(1088): n is a, c, g, or t
  misc_feature (1229)..(1229): n is a, c, g, or t
  misc_feature (1444)..(1444): n is a, c, g, or t
  misc_feature (1666)..(1666): n is a, c, g, or t
  misc_feature (1701)..(1701): n is a, c, g, or t
  Peptide Sequence Number=SeqID_6530
  Probeset Number=SeqID_12755
nnnnnnnnnnnnnttttnnnnnnnnnnnnnnnnnnnnnnnnntttttttttnnttanttnnnnnnnnnnnnaacacnaatcnnaaancacaantaaatgngacgccgcnaccacaagctccacgcgacggacgcgngccaggagcncgacgcgccgacggncagagagggagccgcgagaccaggcgccgcgtggagacgcgcagaggacggagaataggtgaaattgatggtattcagggtcggtttgttatcgcgcggaggttgtcgcccgtatcaccaaaggaagagaaactaaaagctcataccacctcaacnanatatatangagtattnnntnnattgaggtgtcngctacaaactgacccgacccaccgacaacatgcataatcgtctnttgatagcctattatgcttgatatgatatggtgtgtggtttgttatcgctgggtgcgcatcgttagtggtgttacgcggtttttcacttcccnccaccctttgttctctcatcaactgttatgtgttcggttntttgtgtgtttgatatagttatattcgtggttcggcgatcggtgtggtgaccctccgatcagaaacgcgcataaacaaacataacgatttacagtaattggcgtcacgcgnctactaagtgatactatcattaaaattgtttattttcattattcgcactataccttgagtggtgagtaatttaatgaataatatcacttataaaacaaagagagcgctcttgtagtgttgtgtgctcgggcggaggcgatccagacggcgaatagactctgtttttctgttcgtctttccgcctgactgtggagcgttcactggcgtagaagtatgaggtggagcgaactcacaacatagtaatatatacacgttgataggtcagtcgtgaatatgatctataatgcaagagtgtgtgggtgttgtctnaattatattcctgcgcctgcgcgagcgatcaggcgggatacatctggctacgtggcgactatagatttgtttagtgtattgaaggagtgaggaagaagcttgttcgtcactacattatccccggtgtttgtcaacgatngcagactgatattctcatacgcacatcgaagcgtaactatgatgaggtaaaggtatgattgacgctgtttggtatgattgattgtcctctcctctgttgattaacagcacatatcccagttgtcagcataggacgcgtatnattattattaattatatacaacagacaaaaacgaccatgagtacactggcggatgtggctcctgctgtggccgatgtctttgtgtgcgtatgaattcttacacacctctgctttagtgtaggagggtctacgtcagatgaatcgcttgctgctcgtcggtggtgtgtcagtaacaggatgagcgtagcggcgtgggagaggaaggagaaaaatangatatgatatctgtgcaagaaccacacccaaacgacggatgatagcagggttccacctaagtctcactatgtcgatggacagtagcacacatctgacggagagggggtagagatatagcgtggcggtcgatatcagatgttaagcggagagaggaagcaacgtatcgtaatatatgaaggcggtgagagtagagtctgtgcaggcggcagtgagaaggaaangtgcgtaaaggcttacagtaagtatgttatatgtngatgcgctgctatgtaccc

SEQ ID NO: 2977 - DNA, 1673 bp, Glycine max
  misc_feature (1)..(1): n is a, c, g, or t
  misc_feature (35)..(35): n is a, c, g, or t
  misc_feature (104)..(104): n is a, c, g, or t
  misc_feature (107)..(107): n is a, c, g, or t
  misc_feature (113)..(113): n is a, c, g, or t
  misc_feature (115)..(115): n is a, c, g, or t
  misc_feature (245)..(245): n is a, c, g, or t
  misc_feature (247)..(247): n is a, c, g, or t
  misc_feature (253)..(253): n is a, c, g, or t
  misc_feature (267)..(267): n is a, c, g, or t
  misc_feature (338)..(338): n is a, c, g, or t
  misc_feature (340)..(340): n is a, c, g, or t
  misc_feature (356)..(356): n is a, c, g, or t
  misc_feature (410)..(410): n is a, c, g, or t
  misc_feature (430)..(430): n is a, c, g, or t
  misc_feature (523)..(523): n is a, c, g, or t
  misc_feature (703)..(703): n is a, c, g, or t
  misc_feature (707)..(707): n is a, c, g, or t
  misc_feature (1043)..(1043): n is a, c, g, or t
  misc_feature (1251)..(1251): n is a, c, g, or t
  misc_feature (1347)..(1347): n is a, c, g, or t
  misc_feature (1488)..(1488): n is a, c, g, or t
  misc_feature (1529)..(1529): n is a, c, g, or t
  misc_feature (1531)..(1531): n is a, c, g, or t
  misc_feature (1534)..(1534): n is a, c, g, or t
  misc_feature (1540)..(1540): n is a, c, g, or t
  misc_feature (1559)..(1559): n is a, c, g, or t
  misc_feature (1563)..(1563): n is a, c, g, or t
  misc_feature (1572)..(1572): n is a, c, g, or t
  misc_feature (1653)..(1653): n is a, c, g, or t
  Peptide Sequence Number=SeqID_6531
  Probeset Number=SeqID_12756
nagctatcgagatgcatggagttcgtctatactancagtcgtggcattcattcttagtgagcgtgacatcagagattatcaccgcacgacacgctcatcagcgntgngcatgncncactgctatcgcgtcacacatatgtactatgctatcttctcgcgctgatgatgacgtagcgtcgttcagcatgacattcagatataagatcccgcagacaagtcaatcatcgcgtatctatatcgatcgngnacacgnatcaacagcgactnatcatcatatgcatcgcgatgcctctctctgtatactatagatgatcgacatactgaagtagcgctcagtncnattgatcgatcgaganatgagcactgataccgacgtgcgccgtcaccacatgaatggtcccgcacgcgcncgatcacttacatcgtgtgncacagctatgatacgtttgtcatctcatccatatacacgccagtgccatagttctcatcatcatcaacggcgcaattatacagctctcacacnttacttgagctgggattgtcacaagcgtgagctatcggcgcgccgtaagtatatcgtgatatacctacttctatataacgtcgtgccctgcgagtatatatcttctctaacctcctcgcacagacgcatcgcgttcgactctatctcaatatgatcagaacagcgactcacgtatatcanttcntatcttcgctctctgcgcgtatcgacttataccgtcgacatatagtagtcacatctctccacatcttcttctcgatctcatatatactagtgcgtcttatgctggtatcccctcatatactacggacgagcaatatgagttcattcgagtcatagagtaatcattactcatatgtctcatcatcgcgttctgagtgtcgcgcgcacgaagtgcatgcggctctattattacactaacatacctgcaccactcacgaagcacaatacatatacataattctctagcgtgttagcgataagacttaatacacactgcatcaatatactcttgtcgcgnctctgttcggttttgagtcctctgatgtcactatctcgcgtatctctgttatactctataattcctacatctctttctcaccgcttaggagtggctcctctcttccccgcgtaatccttaatacacccccagacaatgcggacggtgactgccagccctcaccgttcatattctccgacccacctatcctgaagcttaatgcgttgtncgaagacattagacgcactgagataaatgtcctctgtcatcacatgcttggtctgccatctcatttgatattagtcactgatagccgtccattcancattacaacacacaatctaacagacgcgcctctcagcctgcatgacacagacccaccaccaacgatcgcacaccacgctctgcgatgtgcgccgcgggcggtgtggcggcccatgcttgtatagcttggtgcttgttatgntaataggggtgcgtcccctcactctcacacctatcgttgcngnggnggcgcnggcaataccatctactcanaatntctctcctntccactcagcaggcgcatccctcccacggccgcgccccactcacccgccgtgcacctctttaacctcttcttcctcccccncctctaccaccctatctctc

SEQ ID NO: 2978 - DNA, 591 bp, Glycine max
  Probeset Number=SeqID_12757
tctcccagcgcagagcaccgcagcaattcgatcccaagcatccccccaccaacctcaccatcctcgtaccgcacgtccaggcagctaatcagtcaagctcaagcatccaagccggcctcggattgaaggcatccatccgggagggaggggaatggggttcgtgctggtgatctcgctgcccttcatattcttcaccatcctgctcggcttcggctgctacttcctcggcaagcacaagggccgcgaggagatgcgcgccggcgtcggcgcccagatctacggcacgccgctgccgccgcctggcgtggccgggcagtccccggggccgtacccggtcccggtcccgatgaagaaggagggccccgacgccgtctgatcggtcgagcttcctcctcctcctcggctggagcgttggtgttgtttgtttactgggtttgattattaccgtgtacatggagtcatttgttgctcgtttcttgtgtggtgtttactgtgaaggaggaagggatgttgatccggtgtgatgatttgtgatcacagttgcgtttctatgagatgcgcaaatcgatgtaatgaatattagtttgtgac

SEQ ID NO: 2979 - DNA, 2092 bp, Glycine max
  misc_feature (18)..(20): n is a, c, g, or t
  misc_feature (26)..(26): n is a, c, g, or t
  misc_feature (28)..(28): n is a, c, g, or t
  misc_feature (30)..(30): n is a, c, g, or t
  misc_feature (32)..(32): n is a, c, g, or t
  misc_feature (34)..(34): n is a, c, g, or t
  misc_feature (38)..(43): n is a, c, g, or t
  misc_feature (49)..(49): n is a, c, g, or t
  misc_feature (70)..(70): n is a, c, g, or t
  misc_feature (81)..(82): n is a, c, g, or t
  misc_feature (85)..(85): n is a, c, g, or t
  misc_feature (90)..(90): n is a, c, g, or t
  misc_feature (93)..(94): n is a, c, g, or t
  misc_feature (97)..(97): n is a, c, g, or t
  misc_feature (99)..(99): n is a, c, g, or t
  misc_feature (107)..(107): n is a, c, g, or t
  misc_feature (114)..(115): n is a, c, g, or t
  misc_feature (206)..(206): n is a, c, g, or t
  misc_feature (267)..(267): n is a, c, g, or t
  misc_feature (285)..(285): n is a, c, g, or t
  misc_feature (327)..(327): n is a, c, g, or t
  misc_feature (334)..(334): n is a, c, g, or t
  misc_feature (426)..(426): n is a, c, g, or t
  misc_feature (510)..(510): n is a, c, g, or t
  misc_feature (555)..(555): n is a, c, g, or t
  misc_feature (585)..(585): n is a, c, g, or t
  misc_feature (627)..(627): n is a, c, g, or t
  misc_feature (635)..(635): n is a, c, g, or t
  misc_feature (652)..(652): n is a, c, g, or t
  misc_feature (722)..(722): n is a, c, g, or t
  misc_feature (881)..(881): n is a, c, g, or t
  misc_feature (927)..(927): n is a, c, g, or t
  misc_feature (981)..(981): n is a, c, g, or t
  misc_feature (999)..(999): n is a, c, g, or t
  misc_feature (1004)..(1004): n is a, c, g, or t
  misc_feature (1013)..(1013): n is a, c, g, or t
  misc_feature (1042)..(1042): n is a, c, g, or t
  misc_feature (1069)..(1069): n is a, c, g, or t
  misc_feature (1238)..(1238): n is a, c, g, or t
  misc_feature (1291)..(1291): n is a, c, g, or t
  misc_feature (1370)..(1370): n is a, c, g, or t
  misc_feature (1602)..(1602): n is a, c, g, or t
  misc_feature (1697)..(1697): n is a, c, g, or t
  misc_feature (1727)..(1727): n is a, c, g, or t
  misc_feature (1753)..(1753): n is a, c, g, or t
  misc_feature (1874)..(1874): n is a, c, g, or t
  misc_feature (1893)..(1893): n is a, c, g, or t
  misc_feature (1895)..(1895): n is a, c, g, or t
  misc_feature (1919)..(1919): n is a, c, g, or t
  misc_feature (1927)..(1927): n is a, c, g, or t
  misc_feature (1947)..(1947): n is a, c, g, or t
  misc_feature (2089)..(2089): n is a, c, g, or t
  misc_feature (2092)..(2092): n is a, c, g, or t
  Peptide Sequence Number=SeqID_6532
  Probeset Number=SeqID_12758
ttttaaattttttgtttnnntttttntntntntnttcnnnnnntcgtgntattcgcgtgtgtgctttttnctgcgctgcanncgntgganctnngcntnacgacatntgtcctnnctcgccaccttcgccacctcgcgcgccgtgacgcaggcgtgtctgcgacggtgtgaatcgcgcggcctacttgttgtctcgctcgtctccnatgtgcgcgggctccggcgtctgcgagaggctcatgatcattgtcttctcccctctattgnactggtgagatatgtacnctagtgtcagtattatttctatgtagatattcgactaagctncatatcntgcataaatacgcaccgcgccgctctgatgctactcgcatccacttcgcacgcgacacagctgctcgacgcatagtggctgtgcgcacttcntcgtgatgtctatgttcgtccctccgcggtccgctggagacccgcgcgccgcgactgcgtcagatccgcttctgtctcgctccntgctcccgctgtgcatctcggcggacgcgagcagtcgaagacagnattatgcacgcagagggcgcgctatatagnagactctatcacaccagagagcaacataatatgcagacgtgngacaagtntaatacacgtactatanatacacactctctcaaccacacactgcctccatcatacagatatctgtataggcatgatatgacatcatngagtatagtctatcgtgcttatgtgacgcactactactctgacctgtcatgacacatctacgtgagatactcggacgtctgaatagtgaacaccaataggagtgtgatatgatcatctatatatctcttatcgttgacagtatggtaatacacacgtgntgactacatctctcagctcacgcatgctgcgacgtgtcgattgtanactgtcgagtatagagtcatactcgcataatatgtaacgactatgagtataccngtcatctgatgacgatcnacgcncacgcgctnacgtgagagatgtatgacacactcatacnctacgacacgctagcatgctcgatagnatatagtattatgtacgtgacgcactgagacgtatgtcatacacatcatactgatgagtagtcacaatgtattaacagcgcacgctctctcttttcacctattcgcgaactgcatactatttctgcggtgcctctgctgtctgcgtgagtgttgaacagctggctgctntataactgcgacagctgtcgacgcgctcgccgcgacacgatctgataacatanctagtatagcgatcagcacgcgccgggcggttattctgcgatcgaggcgtgtactggatcccgagcgattctctcgtgntgtctactgactcgacctctatatcgaccagcacggcagccggcgtatcacgctaatacactgcgagcgcgagcatacggcagcgcgcaagagatttgacagcgcatgcgtgcgtgcaccggctgtcgacagtattcgatgtgctctacaggctgtgtcgatcgatcgacgcagcatcggcgatcgtcgcgctgcagctgtgccgacagcgcactcagacagacgctcatgncgctacttggactcgataatcaccgtcgcagactgctctactcactacccgctactatcaccgtcacacgtatatcagtataataggacgatatngcgacatatcatagcgatttgctcagcctntgtgtatctatgtttgactcgccgcnaacgcgcgagcgtcactatagatgtatacagcgtgtgcgtcgttcaacaactaataattgacacactagtctcatgtctgcgagatacacaatctgtatacgtgagcgccagttattacgngatgtgagtgcgacgtcgngncgtgccgacagtgcacacaatgangatgcgcngcacagtctactcgactcangactacgcgacatcgagtgtactaaggcgttgagtgatatgcgactctcgtgtcgtcagctcgccgcgtaggtagatgtcgtctgcggctctctcatcactagtattacgtcacgcccacgctgtactatacttcgacatcnatn

SEQ ID NO: 2980 - DNA, 1431 bp, Glycine max
  misc_feature (4)..(4): n is a, c, g, or t
  misc_feature (155)..(155): n is a, c, g, or t
  misc_feature (193)..(193): n is a, c, g, or t
  misc_feature (250)..(250): n is a, c, g, or t
  misc_feature (349)..(349): n is a, c, g, or t
  misc_feature (451)..(451): n is a, c, g, or t
  misc_feature (1227)..(1227): n is a, c, g, or t
  misc_feature (1313)..(1313): n is a, c, g, or t
  misc_feature (1355)..(1355): n is a, c, g, or t
  misc_feature (1400)..(1400): n is a, c, g, or t
  misc_feature (1415)..(1416): n is a, c, g, or t
  Probeset Number=SeqID_12759
agancgagatgcatcacgtacacagctgttcggggtagacgctgtgcgagagaactattggtgattcgtctcggatggagacgtgtgggctatagcgcgatacagtttgttatagtatcatctcgtttgagtatcggtcttgtcactcgtcctgntcatgcacaggtgatgtacgcacgttgtagagacagtncctgccgcgatacaatgtataagtatattgtgcaggcgcactcgtatgcgatcaccnagtgacgtgagatatgatgtgtcgaggtagcggagtctatgtacgcatcgctctgttaatgcatggtgactctgtatctatcagcatgtctaatggtcnacatacatcgtacggcagcgcgctagcgtcactggtgatgagactatggagtatagtatcggaggaggcgtagactgcgtccgagtggagtgagcagtgcancgtgtatgtccgtattacgagtgggcaggtaggggacagatctacgacgacatctatacacacgcacgatggtaggccatgacagagtgcgtaaagatatacgcgaccgacgcggccaggcgtccagagatctcatcgtcgttcgtgctctcgagtgctccgagccgcatccaatctaagtgttgttcagtagtgttgatagaagttggctattccgtctgcacgcctgttagactatgctaccgctcaactacttatatgtggttagcgacggacataataagacgcatcacaaccaatccatgtttctcgatcatttgtgaggttttgttctatgtattactaattaaaggggagtaggacattgatcggtaagagagccacaggagagaactcacggcacaagaagcgagcggggtgagaataaaggacgggggacaacgcatcaacgaccacagcacactcttggcgggtgtgctggcgtggaggaggggttaatactgctggcgtggtcaccagtagaatgggagaggaagccgcgctgcctttgttgtctatgatattatatttgtgtctctaaatagtggtgactagtggcagactaacacgttcatctgttgttttttcgtggtggtgtaggagaaggggcatagagggagcaagggcggtaataggagggggtagactggggtcactccctcgcgcggtccgcattcagcggtatcagaggtgcaggataaatggcagccttggcacgatcgcagagcaccagaagnagggaggaaaacactatcccctacaattagctacgccatttgggagggggggtggttctcatctacacactagactagggccgcgntccgctctgggggtattattaaatcgctctacactctttaanggctatctggcgtccacgagaatggggggggggtatgagtgtganaagaggaaaaaaagnncaaacccacaccgac

SEQ ID NO: 2981 - DNA, 1593 bp, Glycine max
  misc_feature (16)..(18): n is a, c, g, or t
  misc_feature (21)..(21): n is a, c, g, or t
  misc_feature (23)..(24): n is a, c, g, or t
  misc_feature (29)..(29): n is a, c, g, or t
  misc_feature (31)..(32): n is a, c, g, or t
  misc_feature (35)..(35): n is a, c, g, or t
  misc_feature (95)..(95): n is a, c, g, or t
  misc_feature (103)..(105): n is a, c, g, or t
  misc_feature (109)..(111): n is a, c, g, or t
  misc_feature (113)..(113): n is a, c, g, or t
  misc_feature (115)..(115): n is a, c, g, or t
  misc_feature (117)..(118): n is a, c, g, or t
  misc_feature (269)..(269): n is a, c, g, or t
  misc_feature (272)..(272): n is a, c, g, or t
  misc_feature (277)..(277): n is a, c, g, or t
  misc_feature (456)..(457): n is a, c, g, or t
  misc_feature (1064)..(1064): n is a, c, g, or t
  misc_feature (1268)..(1268): n is a, c, g, or t
  misc_feature (1400)..(1400): n is a, c, g, or t
  misc_feature (1485)..(1485): n is a, c, g, or t
  misc_feature (1593)..(1593): n is a, c, g, or t
  Peptide Sequence Number=SeqID_6533
  Probeset Number=SeqID_12760
gtgttgaagttgtctnnnaantnngattntnnccntccaccacactactcgatattaaaacgaaaaataccagaatatataatccaactcaattnaaatatannnaaannnananannctggttacgcaccctcccactttcataaatactacacatacacaccccataccacaccgcatacaccaccgctccgccttctcctcacctatcatctctcgtgattatctctaccccgcaaagcgtgttatcattactagaggagataaanttnaatgnattagtgatgttttttactgtgcactactgatatttagagaacacttagcgaacacaacatacatctataacactacccattaaataaatacatctcaacgcgcgatgtcaccaacatcacctctatcacgtcattcgttacgttgagaggggcatcgttcgctctatgcgctgtttgnnttcatatatatctgtcgtttctttctattctatgactttatacacagcgtctaaccacactcatttatggcacgcgccctcccgcatcacacagcgataacaaatcatcacaagatactgtgtaatattaagatttcaatacatcatattacatccctataagagacaccactatctcacatctattactaaatactaaacacccatttataaattcaatatccgcttatttgtagatagggcatgattctgtaatacattctcatttcttcctctccatccaccaatactcataccacctctacttactaactatcaaagatctgtaacacctacacagcaccatacattattcattccctactcaattgatcaattgaaaaaaatgctctgcaccttgaacatcttttgtacacacgtgtgctgttgagcaatcattatcctattctgatatgctgcggcttgatgattcagtcgcgacctctaactatcatagttgtatcgctcactcgaggtggtatatgaactatcacaagacacaaatctactaatcatacacctaattaacgtggttcactgcacagactctcgcctagtagctagttgntgatatcacatctctggtcacgtgcgtacttaacacgattgctacaatacacaccacacatcaacatatgataccacacgacaacagagttagtaaatacctctacacatccaccacacacaaacatgagtcaatatacatgacattactgacagcacacctctcgcctcacacatactaatataccatcaacaataacgccantaatcattagtgcagacactctcacataaatagtttcgactgatgtcacaacatctactaaagaaataataatactaatactatatcgcgcacgctgtgtccgataccacacagcagcttctcctcacagtntacgtcaagtatcttgatcagtcagcgtgcacgtaccgctcacctacacgacgaggatgctgctctatatatcgtagatgtagtncactaacaacctcaaacacttctaacactcaactctctataatactatgcatcaattaatcatgtctataatccagagctacaacattccctagatctactataactn

SEQ ID NO: 2982 - DNA, 1497 bp, Glycine max
  misc_feature (23)..(23): n is a, c, g, or t
  misc_feature (33)..(33): n is a, c, g, or t
  misc_feature (38)..(38): n is a, c, g, or t
  misc_feature (42)..(43): n is a, c, g, or t
  misc_feature (80)..(80): n is a, c, g, or t
  misc_feature (83)..(83): n is a, c, g, or t
  misc_feature (90)..(90): n is a, c, g, or t
  misc_feature (97)..(97): n is a, c, g, or t
  misc_feature (100)..(100): n is a, c, g, or t
  misc_feature (103)..(103): n is a, c, g, or t
  misc_feature (155)..(155): n is a, c, g, or t
  misc_feature (191)..(191): n is a, c, g, or t
  misc_feature (380)..(380): n is a, c, g, or t
  misc_feature (445)..(445): n is a, c, g, or t
  misc_feature (882)..(882): n is a, c, g, or t
  misc_feature (932)..(932): n is a, c, g, or t
  misc_feature (1489)..(1489): n is a, c, g, or t
  Probeset Number=SeqID_12761
tgagatgctcccacccggcgggntgggccgggnccggnctcnntagaaacctaggtggggatccccccgcggggctgtgnagnggaacgnacatatntcnatnaagacggtggcgcgatgtggtcgtatcgcctcgtccccgtctttcggagccngcttgcggaagtagccccccgaggcgcttcctgagnacaagagccctatgctgggcggcggcgccgcgcggcagcggcggcgcgcgcgcgcgggcggcgcgccgcgcgctcctccgcgcctgcgatcgagcgcgatgtcacacgctgcgcgcggccgcgacatacggaccatcagcgcgcggccggccgacgcgcggggcgcggggcggggtcgcgcggcgtggngggcgcgcgcgacccggcgagggagcgcggggagcgccggcgcggccggggccgccctgccggcncacggcggtgcccgcgagcccgcggccgcgccaggcggagccctcgccacgcgcagcccaccgaccgcgccctcggcgcctgccggcgcacctcgtgagacacgggctggagcggagagccgcgcccacgccacgagcgcgaccggtcgcgccgcgcagcacggccaccgcggcgcggcgggagggccgcgcgcaaggggtagtgcgcgcgggcaccgcgcggggcccgcgctgggacgccagaacgcgagggatgcgcgagctcgccccgcgccacctcgagagcagccggcgtccgggagtgggagcgccccgggggcaggcggcgcgaaacgcagggcggacgcgtgggccgaggagcgcgggcgccgtcggcgcagttgccgcgcgccgacctcgtcgcgcgcgcgacggccacgtgtccgacagccagtgangggcacaccaccgcgcgcacgagtctcgcgtgcaggccagggtggtgcgncacacgcgccagagcgtcggagccgcgcgactgtcgacgcgtaccgctgcgctcaggtactggcccccggccccggcgtgcacgcgaatcgcgccagcgatccgcgcggccgcgcaccgtacacgcacaacgcgtacgcgcgagtgcggccggagatcgtatcgccggcgcggacggacgcaccgagtgtcacggcagacgtcgtagacggcgtgcggccggcgtcacgcacgcacagagcgtggtcgacacaaccgagccgcggcgagccgcgcgcgggaccgcgtcgtactgcacgggacgcagcgtagcgacgcgtggtcgcggagcctgagcgcgcgcggcgcgcgacgaggctctcgctcgctacaggggaggctcacaccacccgccacgcgcgtggagtgaggcgaggaagccgcggaatcgcctaccgcacgcgacactagctcggccgcgccgagctgagagcctaggctgagtgctagtctagcgtcgcggcgcgagcgtcacggtgcgccacgcctggcgcgcgacgcgagccgctgccgcgcgcntagcgcgg

SEQ ID NO: 2983 - DNA, 1713 bp, Glycine max
  misc_feature (1)..(19): n is a, c, g, or t
  misc_feature (24)..(36): n is a, c, g, or t
  misc_feature (47)..(48): n is a, c, g, or t
  misc_feature (55)..(55): n is a, c, g, or t
  misc_feature (66)..(66): n is a, c, g, or t
  misc_feature (69)..(71): n is a, c, g, or t
  misc_feature (89)..(89): n is a, c, g, or t
  misc_feature (102)..(102): n is a, c, g, or t
  misc_feature (105)..(105): n is a, c, g, or t
  misc_feature (134)..(134): n is a, c, g, or t
  misc_feature (154)..(154): n is a, c, g, or t
  misc_feature (194)..(194): n is a, c, g, or t
  misc_feature (208)..(209): n is a, c, g, or t
  misc_feature (216)..(217): n is a, c, g, or t
  misc_feature (236)..(236): n is a, c, g, or t
  misc_feature (253)..(253): n is a, c, g, or t
  misc_feature (255)..(255): n is a, c, g, or t
  misc_feature (281)..(281): n is a, c, g, or t
  misc_feature (288)..(288): n is a, c, g, or t
  misc_feature (299)..(299): n is a, c, g, or t
  misc_feature (327)..(327): n is a, c, g, or t
  misc_feature (349)..(350): n is a, c, g, or t
  misc_feature (370)..(370): n is a, c, g, or t
  misc_feature (389)..(389): n is a, c, g, or t
  misc_feature (435)..(435): n is a, c, g, or t
  misc_feature (442)..(442): n is a, c, g, or t
  misc_feature (516)..(516): n is a, c, g, or t
  misc_feature (554)..(554): n is a, c, g, or t
  misc_feature (574)..(574): n is a, c, g, or t
  misc_feature (690)..(690): n is a, c, g, or t
  misc_feature (783)..(783): n is a, c, g, or t
  misc_feature (830)..(830): n is a, c, g, or t
  misc_feature (850)..(850): n is a, c, g, or t
  misc_feature (926)..(926): n is a, c, g, or t
  misc_feature (1140)..(1140): n is a, c, g, or t
  misc_feature (1162)..(1162): n is a, c, g, or t
  misc_feature (1330)..(1330): n is a, c, g, or t
  misc_feature (1367)..(1367): n is a, c, g, or t
  misc_feature (1397)..(1397): n is a, c, g, or t
  misc_feature (1423)..(1423): n is a, c, g, or t
  misc_feature (1444)..(1444): n is a, c, g, or t
  misc_feature (1458)..(1458): n is a, c, g, or t
  misc_feature (1462)..(1462): n is a, c, g, or t
  misc_feature (1486)..(1486): n is a, c, g, or t
  misc_feature (1554)..(1554): n is a, c, g, or t
  misc_feature (1590)..(1590): n is a, c, g, or t
  misc_feature (1638)..(1638): n is a, c, g, or t
  misc_feature (1691)..(1691): n is a, c, g, or t
  misc_feature (1713)..(1713): n is a, c, g, or t
  Peptide Sequence Number=SeqID_6534
  Probeset Number=SeqID_12762
nnnnnnnnnnnnnnnnnnnaaaannnnnnnnnnnnnaaaaccaaaannccacccngccaacccaangcnnnacaccaacccccgcacanaactcgcgccgancancacaccaatacacgcgccgccccaacgcncgcacacccaccatacacancgaccagcaacacacataacacgaaccacacacaaagagngaaaagaatatagnntagttgnngtgctactgctgtctggtnccacgcagctacctcanancccctcatgacactctctctactccngccacgntcagcacacancccacacagccacacacacctcgcgcanacgccacacactcctagtcacnnccactcgatcacacctctcncataacacagatgcaacancgacgactgagagagaccgacaaatagcagcacacacaagcatcancgattcnatcgtccacaaccaacacatacacacgcagcgaagcaaacgcagcacaacagaaatgcgatacccatctacacnccagcgacgcaccgctcacacagcgatcaacaaactanagtgcagcacacgtccggancactcccgcgagcatagagtagtcactacaacaatcactcactctatatgactaacacaacaaaagacaacatcaccactcatctaacgtatctgcgctacccatcattatctcanttcatagattgtgctctaagttcattaactatatccttgttatgcagctagtgctgtgtgtggtgctctcgtgtgctcgtgtctcgctgtganttgagctgatgctgctctgcacatcctctctcattcggcgatgcccnttcccgaccagcttcacccnaccgacgctcgacacactccgtcgcctaaatgactgatatgagtagatagatatactactgagtactggacgacancaaacacagctagcgtagcatacgatctacatcacacatgagatgtacgtctgcctcgctgcacgctgctatctctatactctccatactgactacgacactatcgagcatgcttgcggtaccggccggctgggagagcagccacatgctagacaccgtccgttcgcagcagtagcgatgctgtactctgctgacacagcacacgtgagctaanctacactaaacgcagcgactcngctagtcgactcatgtctcgacgtgctatgcgccgtactgacgctctatgagactactagcgcagactgacgtctctactctcatacgctactcctcattatctccgtccgactctcccctccatcaatagcagtcactatgactacgtgtttgtaatacagtatcantctatctatgatacaaactcagacatcacgcgctcangcccgcgatacactcgccgccgacgccgcngccccggtctcgctggacgcgcgcgntgcaccggactcacccgactngctgtcgatgcttncatncactactcgatgatcacactctgncgcgacatctgctgtactcatgtcactcatcatgatgatcttactctcctatactctgtccagtattntgcgatacaccacttctctacgtctgtctatcatcnctacactcgctagactaactcagtctcacacagcacgtcacgctacgngcctcgttagtgcgtcagcagctcgtgggtgcgatggttgagtgaccacgtgncgtcgtgagctgtgtctgcacn

SEQ ID NO: 2984 - DNA, 1856 bp, Glycine max
  misc_feature (1)..(1): n is a, c, g, or t
  misc_feature (69)..(69): n is a, c, g, or t
  misc_feature (81)..(81): n is a, c, g, or t
  misc_feature (83)..(83): n is a, c, g, or t
  misc_feature (98)..(98): n is a, c, g, or t
  misc_feature (109)..(109): n is a, c, g, or t
  misc_feature (137)..(139): n is a, c, g, or t
  misc_feature (178)..(178): n is a, c, g, or t
  misc_feature (185)..(185): n is a, c, g, or t
  misc_feature (220)..(220): n is a, c, g, or t
  misc_feature (224)..(224): n is a, c, g, or t
  misc_feature (226)..(226): n is a, c, g, or t
  misc_feature (250)..(250): n is a, c, g, or t
  misc_feature (288)..(289): n is a, c, g, or t
  misc_feature (291)..(291): n is a, c, g, or t
  misc_feature (308)..(308): n is a, c, g, or t
  misc_feature (312)..(312): n is a, c, g, or t
  misc_feature (355)..(355): n is a, c, g, or t
  misc_feature (359)..(359): n is a, c, g, or t
  misc_feature (380)..(380): n is a, c, g, or t
  misc_feature (384)..(384): n is a, c, g, or t
  misc_feature (407)..(408): n is a, c, g, or t
  misc_feature (422)..(422): n is a, c, g, or t
  misc_feature (441)..(441): n is a, c, g, or t
  misc_feature (466)..(467): n is a, c, g, or t
  misc_feature (507)..(507): n is a, c, g, or t
  misc_feature (515)..(515): n is a, c, g, or t
  misc_feature (534)..(534): n is a, c, g, or t
  misc_feature (544)..(544): n is a, c, g, or t
  misc_feature (574)..(574): n is a, c, g, or t
  misc_feature (577)..(577): n is a, c, g, or t
  misc_feature (580)..(581): n is a, c, g, or t
  misc_feature (584)..(584): n is a, c, g, or t
  misc_feature (597)..(597): n is a, c, g, or t
  misc_feature (631)..(633): n is a, c, g, or t
  misc_feature (636)..(637): n is a, c, g, or t
  misc_feature (642)..(642): n is a, c, g, or t
  misc_feature (650)..(650): n is a, c, g, or t
  misc_feature (691)..(691): n is a, c, g, or t
  misc_feature (693)..(693): n is a, c, g, or t
  misc_feature (733)..(733): n is a, c, g, or t
  misc_feature (745)..(749): n is a, c, g, or t
  misc_feature (765)..(766): n is a, c, g, or t
  misc_feature (782)..(783): n is a, c, g, or t
  misc_feature (797)..(797): n is a, c, g, or t
  misc_feature (800)..(800): n is a, c, g, or t
  misc_feature (804)..(805): n is a, c, g, or t
  misc_feature (829)..(829): n is a, c, g, or t
  misc_feature (842)..(842): n is a, c, g, or t
  misc_feature (864)..(864): n is a, c, g, or t
  misc_feature (867)..(867): n is a, c, g, or t
  misc_feature (870)..(870): n is a, c, g, or t
  misc_feature (891)..(894): n is a, c, g, or t
  misc_feature (899)..(899): n is a, c, g, or t
  misc_feature (905)..(905): n is a, c, g, or t
  misc_feature (915)..(915): n is a, c, g, or t
  misc_feature (920)..(920): n is a, c, g, or t
  misc_feature (927)..(929): n is a, c, g, or t
  misc_feature (934)..(935): n is a, c, g, or t
  misc_feature (937)..(938): n is a, c, g, or t
  misc_feature (948)..(948): n is a, c, g, or t
  misc_feature (954)..(954): n is a, c, g, or t
  misc_feature (957)..(957): n is a, c, g, or t
  misc_feature (971)..(972): n is a, c, g, or t
  misc_feature (1067)..(1067): n is a, c, g, or t
  misc_feature (1095)..(1095): n is a, c, g, or t
  misc_feature (1108)..(1108): n is a, c, g, or t
  misc_feature (1127)..(1127): n is a, c, g, or t
  misc_feature (1156)..(1156): n is a, c, g, or t
  misc_feature (1197)..(1197): n is a, c, g, or t
  misc_feature (1228)..(1228): n is a, c, g, or t
  misc_feature (1296)..(1296): n is a, c, g, or t
  misc_feature (1354)..(1354): n is a, c, g, or t
  misc_feature (1385)..(1385): n is a, c, g, or t
  misc_feature (1388)..(1388): n is a, c, g, or t
  misc_feature (1443)..(1443): n is a, c, g, or t
  misc_feature (1467)..(1467): n is a, c, g, or t
  misc_feature (1560)..(1560): n is a, c, g, or t
  misc_feature (1611)..(1611): n is a, c, g, or t
  misc_feature (1623)..(1623): n is a, c, g, or t
  misc_feature (1696)..(1696): n is a, c, g, or t
  misc_feature (1702)..(1702): n is a, c, g, or t
  misc_feature (1704)..(1704): n is a, c, g, or t
  misc_feature (1780)..(1782): n is a, c, g, or t
  misc_feature (1785)..(1785): n is a, c, g, or t
  misc_feature (1791)..(1791): n is a, c, g, or t
  misc_feature (1793)..(1793): n is a, c, g, or t
  misc_feature (1818)..(1818): n is a, c, g, or t
  misc_feature (1826)..(1826): n is a, c, g, or t
  misc_feature (1856)..(1856): n is a, c, g, or t
  Probeset Number=SeqID_12763
ngtaggcgccatacgtagtagctgtcagagcgcgtaggtcggtatgcatgcagtcgttgctgacagccncaaacgattatnangttgcgacagtaacntactgagtcgnccactatctgggcgagatagtgtgtgtnnngtgtctgctgtacaagtggtgtagtgcagcactcatgtnagctatntgtcgtactgtacgctacgacgagacgatagagangacngngtcgtcatgatagtcagacagcancgacacacggcatagtatatcgcataaagcgatgcatnncncacacatcgccgtgtantttntataatatgatacatcccgtaacacgacagcgacaactcgcgncagngtgtgcatggtttcacgtatnaacntagtcagtatagtagtgacgatnngtatcgatatcganttacgctagtaatgtgttnccactcgagctatcgagccgagcanncgacgatgctgtcgtcttgctagttgagtagtagcgtagntagatganacatgtcgacttgcgaacncatactcggntgcgtgcacgcagagtagtttactagtgcntgntgnngcntgattatcatgtnagtagttcgatatgttatgagtgatgatcgacgnnnggnngatanaggcgcgngtgcgtatgcggagtgcgtgcagctagggaggagacaggangntgagtgatgctgtacgtagtagtgtgtgtgcgggtcctcncgtgctgtgagnnnnntatgcttggtacatcnncatcgtggttgtatgnngtgctcgacgcgtntcntgtnnttgggtggagaaagaaaagcatcncgtacaatagtantacatataatatctatatgtantcnctntatctcgttcgtttttcttannnnttacnttttgnggtgggtctngtctngtgtccnnngcgtnntnntttatttctnccccgngantcccctatcaaaanntaaatataatataatatacattactacaatccatacaactccatcacaactatgtccgttatcgagtcgtctagacgagtcatgcagtacgcaancgcacgtgtacgcgcacatatgtacgcntggcttgctgctncctctatggtctggtacangtatgagagacatatatgagtcagcggcngtgcgcggtaagacgtgccggctaccgtcacactatgaagnagacgatgcatgagtgcggcggagccaggcngtgctatgccactcgcatctgatagctatgcgtagatgaaacgatcgttatgtatgatcatggtatcncctcctccagtacggccgttcctgtcgtagagaggagcagcttctatactctcattgnttgtgtatcttattgtgaactactgtactcnacntctaggctcatggtgagcatatttcatatcttacactgattatattaagctacanactaacttctcagcggtatgtcanaagtctatctgttccagctaattattactctatatactagcgacggtgtgtgccacgcgcgtgtgtgtggagatagcatgcgagtatagagancgagttccgtatagagagcagagtgcatagtagagaagtaggttattaganagcatggctacnatatatgcgcatattgtcgtgcttcaagcgttcagcgagacgggctgtcggccgagtgcgagtcctagtgtgntgttgngntatgtaggattagtattatgtgttgttgtatcgctctccacttatctatcatatcactcatcagaagtaaataacnnnccncttacntngaggtagtgtgatagcgaggacacncggagganggaaaaggtaggaaggagagaaaaaaaaan

SEQ ID NO: 2985 - DNA, 1876 bp, Glycine max
  misc_feature (25)..(25): n is a, c, g, or t
  misc_feature (205)..(205): n is a, c, g, or t
  misc_feature (224)..(224): n is a, c, g, or t
  misc_feature (363)..(363): n is a, c, g, or t
  misc_feature (379)..(379): n is a, c, g, or t
  misc_feature (401)..(401): n is a, c, g, or t
  misc_feature (537)..(537): n is a, c, g, or t
  misc_feature (617)..(617): n is a, c, g, or t
  misc_feature (640)..(640): n is a, c, g, or t
  misc_feature (658)..(658): n is a, c, g, or t
  misc_feature (800)..(800): n is a, c, g, or t
  misc_feature (837)..(837): n is a, c, g, or t
  misc_feature (873)..(873): n is a, c, g, or t
  misc_feature (875)..(875): n is a, c, g, or t
  misc_feature (921)..(921): n is a, c, g, or t
  misc_feature (1023)..(1023): n is a, c, g, or t
  misc_feature (1026)..(1026): n is a, c, g, or t
  misc_feature (1033)..(1033): n is a, c, g, or t
  misc_feature (1087)..(1087): n is a, c, g, or t
  misc_feature (1105)..(1105): n is a, c, g, or t
  misc_feature (1171)..(1171): n is a, c, g, or t
  misc_feature (1184)..(1184): n is a, c, g, or t
  misc_feature (1187)..(1187): n is a, c, g, or t
  misc_feature (1284)..(1284): n is a, c, g, or t
  misc_feature (1310)..(1310): n is a, c, g, or t
  misc_feature (1314)..(1314): n is a, c, g, or t
  misc_feature (1316)..(1316): n is a, c, g, or t
  misc_feature (1333)..(1333): n is a, c, g, or t
  misc_feature (1408)..(1408): n is a, c, g, or t
  misc_feature (1411)..(1411): n is a, c, g, or t
  misc_feature (1491)..(1491): n is a, c, g, or t
  misc_feature (1528)..(1528): n is a, c, g, or t
  misc_feature (1535)..(1535): n is a, c, g, or t
  misc_feature (1542)..(1542): n is a, c, g, or t
  misc_feature (1554)..(1554): n is a, c, g, or t
  misc_feature (1561)..(1561): n is a, c, g, or t
  misc_feature (1571)..(1571): n is a, c, g, or t
  misc_feature (1577)..(1577): n is a, c, g, or t
  misc_feature (1591)..(1591): n is a, c, g, or t
  misc_feature (1593)..(1593): n is a, c, g, or t
  misc_feature (1601)..(1601): n is a, c, g, or t
  misc_feature (1629)..(1629): n is a, c, g, or t
  misc_feature (1640)..(1640): n is a, c, g, or t
  misc_feature (1690)..(1690): n is a, c, g, or t
  misc_feature (1693)..(1693): n is a, c, g, or t
  misc_feature (1698)..(1698): n is a, c, g, or t
  misc_feature (1704)..(1704): n is a, c, g, or t
  misc_feature (1739)..(1739): n is a, c, g, or t
  misc_feature (1760)..(1760): n is a, c, g, or t
  misc_feature (1765)..(1765): n is a, c, g, or t
  misc_feature (1788)..(1788): n is a, c, g, or t
  misc_feature (1808)..(1808): n is a, c, g, or t
  misc_feature (1824)..(1824): n is a, c, g, or t
  misc_feature (1845)..(1845): n is a, c, g, or t
  misc_feature (1876)..(1876): n is a, c, g, or t
  Peptide Sequence Number=SeqID_6535
  Probeset Number=SeqID_12764
accctcactccatacctttctcttnctcttctacgttggtatctctctcgcacaccgagcgctattgccaccctctcacgcctcgtacatatgcgtatgaaggcctctccctcgctcccgcggagacggcgcgccgcgatcctcagcatgacatatgcttgagaatcctcccctacgcgcgtcttcgactcgagcagacatcccntgtctctatattacctgtntctccactaagcgacacctatatgttggctatgttctacatagtccatatttcgctctatgctcttgcccgcgcggccatcggactagcgcgagcactaatgaggttgcatctatgacaacgagagctactatatactntacatcatgagacaantcagacgcgagcgagatgtgantacgcatgtcctcgtatccattccattacaacctacacacacatagacaaatgaatatgaatctatctcacgcgtgatctcgtatcatatagacattcatgtctcatatactgtctatgcagagtgagatcggtantatagcttactctgatgcatctacactcgtgtatcgatatggtagcgctgtaagatactctgcgacatctgctactaccnacatgacactgaacgaagaatcncatcctatgagttcagancgctccttacttgtctgatgtgtgtagtacctatgtgctcatcgtctacgtggtgtcgccgatcgctgatacttctgttgattggtatgtacgcgtatcccgtatcagcttcgctcgttactactgtactcacattcctctnctactatatcacatatacattagtaacactctctatnttaacatatcactacgatacaccatgctactgtcgntncgtgtatcgctgtcgtgtgagtactatttcccgacgagtacgcganaacacacgtgacaccgagatctcgtgaccgctatgtatagatgtatcgctaccagtatgtacgcatactctcgcacttcacgtgcctaacctaccctattgntantgccatncttacacatagccgagtgatctcctcggatactctcgcagtactgcatatactncaatatacattacactcnatgcgccctgctatcacgatggatgttcactcgatcatacttcacatatatcgaactctacatganacatcgtacagtngcnatcactcgcgcgcagcgacgtgatagtcacatctctatcgtgatagcacgtctctatttgcgcagctcgtactactgttataatatattagacatantgccgcgccgcttcactactctcccnaccncngcgcagcgagatatatncgatcacgactacatatagtcatcatatacagcacactagacgactctatcgtgctacctgtccgtatgatatanggnatcatcgtctactctagcgctctgtctctgctagacgactatcacattcacactgtatgtaccgtcgtttgcaacgtcanctgatacacgcatatctagtgactagactgacgtatntatcacntcctacnactatatgacantatgttngtatcatgcnactgantgacgacgactcantnctcatgcnatatgatcgtattgacacacgtgtgaangttacagtcgntgacatatataccaatcaaactttcatagtagtctattagtccttcgagnctntcacnatatanagtaatctacgctgcatagcagacgcttctactcncactccgccgtctctgtcgtncttcncgtccgagtctctgcgaacattncttgcttcgtcgtagagctngtgtgttaattacttnacgctagtcgactcactccangtcatcgtcatgtctagagtactgacatatn

SEQ ID NO: 2986 - DNA, 1352 bp, Glycine max
  misc_feature (24)..(25): n is a, c, g, or t
  misc_feature (29)..(29): n is a, c, g, or t
  misc_feature (31)..(32): n is a, c, g, or t
  misc_feature (48)..(48): n is a, c, g, or t
  misc_feature (58)..(59): n is a, c, g, or t
  misc_feature (66)..(66): n is a, c, g, or t
  misc_feature (443)..(443): n is a, c, g, or t
  misc_feature (754)..(754): n is a, c, g, or t
  misc_feature (803)..(803): n is a, c, g, or t
  misc_feature (852)..(852): n is a, c, g, or t
  misc_feature (855)..(855): n is a, c, g, or t
  misc_feature (867)..(867): n is a, c, g, or t
  misc_feature (886)..(886): n is a, c, g, or t
  misc_feature (943)..(943): n is a, c, g, or t
  misc_feature (945)..(945): n is a, c, g, or t
  misc_feature (990)..(991): n is a, c, g, or t
  misc_feature (1024)..(1024): n is a, c, g, or t
  misc_feature (1029)..(1029): n is a, c, g, or t
  misc_feature (1065)..(1065): n is a, c, g, or t
  misc_feature (1101)..(1101): n is a, c, g, or t
  misc_feature (1104)..(1104): n is a, c, g, or t
  misc_feature (1119)..(1119): n is a, c, g, or t
  misc_feature (1131)..(1131): n is a, c, g, or t
  misc_feature (1133)..(1133): n is a, c, g, or t
  misc_feature (1199)..(1199): n is a, c, g, or t
  misc_feature (1212)..(1212): n is a, c, g, or t
  misc_feature (1220)..(1220): n is a, c, g, or t
  misc_feature (1257)..(1257): n is a, c, g, or t
  misc_feature (1259)..(1259): n is a, c, g, or t
  Probeset Number=SeqID_12765
gttttgtgtgggcgtttttttttnntgtncnnctcgtagttttctttnttagcaattnnttctcanacgtggcggagggtgtgttgatgttgtttttgtttgacgcccccccccatccgatcgttcgcctccgtcatagggtggggccgggggccccctccccttcctgggtgcagggaatacggaaaagggacccaccacctccccaggggaggtcgtttgctagggaacagtgggatggtgattgttgcttatgtgccttatccccgtattccttctcgtagtctctataaggatcattacatgcagccttgtaaacaaagctactgagttagtaatttattattaataattcttgtattgagagagttcgaagatgtttaacctgtgttgcgagcgctccgcgctgggggtcagtttcgctggagctgaatgcgcattgntgctgactaggcaacgcgaggtggggagtagcctagctgattagtgacaaagagagagtctatagtatagtggtcgcggtgattcgcaagcccttattatgaaacctgttattgcatttcagcactcacagctaacagacattatattgattaccacttgtgtgttattacctgagcccgggggcgggcgtggccatggcgagagcgtatgcgcgactagtcgtttgtgtgttgtgtgtataagataagtgtccgcgagcggttagtgtttcttcacattatctagaacatagtttagcgcgacgcggagngactggagcacggggtggcgtgagcgaccccaggagtgtatgcgttacnacgcggctgagcctagcacacgcggcttggcgtcgtgtgcttgaggggngcntcaccaccttgnatgacgccgtcgcttgtgngtgtattgctgtctacagtcatatccggtgccgatatgtgacagacactcgtgtggngncggtgttgggcggactggtctcccgcgcgtgtgtttgcgccgcgnnggcacgggtctttctccactgatcgcgccgttnccctntctttattgacgcgctcgccggccgcgtgtgtgctntcgcggtgcggccgtggtggcgcagcaaaggagttnttnatcagagccgacctnaagagcgcatcncntgcgcgcagcgaggtcgttgtcactccggcctgcctgttgtgtacctggccaggtagcttgcttcntttcctttgtggncatgtatntgtttgtgcacgcctctgcggagtgggtagatactgncntcaccatttacgatggttcagtagcaggcggagagacctgagatcactcctgatagactgtacacgtcttatgtattgtaaatggactatagg

SEQ ID NO: 2987 - DNA, 1464 bp, Glycine max
  misc_feature (1)..(1): n is a, c, g, or t
  misc_feature (49)..(49): n is a, c, g, or t
  misc_feature (75)..(75): n is a, c, g, or t
  misc_feature (138)..(138): n is a, c, g, or t
  misc_feature (163)..(163): n is a, c, g, or t
  misc_feature (384)..(384): n is a, c, g, or t
  misc_feature (443)..(443): n is a, c, g, or t
  misc_feature (483)..(483): n is a, c, g, or t
  misc_feature (505)..(505): n is a, c, g, or t
  misc_feature (568)..(568): n is a, c, g, or t
  misc_feature (590)..(590): n is a, c, g, or t
  misc_feature (752)..(752): n is a, c, g, or t
  misc_feature (827)..(827): n is a, c, g, or t
  misc_feature (1446)..(1446): n is a, c, g, or t
  misc_feature (1448)..(1448): n is a, c, g, or t
  misc_feature (1464)..(1464): n is a, c, g, or t
  Peptide Sequence Number=SeqID_6544
  Probeset Number=SeqID_12766
ncaagacatctcgtattctgtggtcgaacatcacgacaacgacgctctntgactacgatgtgcgttcggttgagntggctcgtcggtcggcgtgtggatggcagtgcggacgagtaatcctcgcgcccatgctcgcgnggcgcataggtttgcgctcgctatncacgcccgaccacactcgcacatcctagcgcatatagcgcacgcacggcgcgtaatcgtacacagacactcgcatcgtccgcgagacactccatattactattcctctatactatggtcacttataattaatactgcatgtctcatatacggtaacgcacgctatatgagaatagtagacagagacgaaatgtagagcagcgctaatctctattgcgattngatactcgtgttgtaagtgtgtgtgtaaggtgatacatattatgctgcatatccagtantacgcaacgaaacagggagagcgcgtaccgcagtaatagncagaatgcgtatatatcgcgtngtgtatcgttatgtgttgtgacgcgtcgagttagtagcgctttccatctgtgcgttgtagcgnagtgtcgcggtgtcgtattgcngtcgcgtagcgcgaacaagaacacgtcgagtcgaactgcgttcatcaattcatatttatcataatgcgcgtctatttcaatttgaattatattcgatttctggctcgctctacattcatcttattagtctctgtatcgatatactcattatatatatatatncgagcttgtgagtgagtgttaagtatgtttattgttattgtgtctttctgtgaatatatcgtatgactgtccttnttctatacattacttatacgatacaccaatcacaacaaactgacgtagaagagtcaggagcgcgtcgaaagacgacgcgaatgcccgaacacggtgaacaaacgagacgcaaacaacaataacctacataacactctttccaccaacacaccgtcgcgtacgatgtattttagaatatctacatttctgcattcgcgcttgctctttattcgagtatcatcatttctcgctgagcgtaggagggtgggtcgctggatctatcggctgtcctgtctggattgcttttgtcttttagtggattgttaatatggtatgtctcgtgagttatcttgtgtaccttcctactctcaccccaacactaagacatgcgccgtcctctcatccagcctatcacttaattccaaactgacggcccctgcgctgtctcggccaacgacggagagacattctattatatagtcttggtgtgttattagtgtgtttgctgagttaagttgttttgtgtattcgtggagtggtgtggagagggggaataatatcacaaaacaaaaataacaacaaaagagatgaagtgcaaagaagtagagggcggtgtggtcggcgtgggacgggagacganangaaagggaaaataaan

SEQ ID NO: 2988 - DNA, 801 bp, Glycine max
  Probeset Number=SeqID_12767
acattttctttacactgaaccatcacttagagagtgcgcttcacacaagaaacaaaacaaaatggctaggcgatttgccattgttgcgatctgcatcgtcctcatcgccggcgtcggaggtcaagctccgtcgtcaccaccaaccaccacaccagcaccacccaccacaacaacccccccgccagcagccactcctcctcctgtctcagctcctccaccagtcacaacttctcctcctccagccaccaccgctcctcctcctgctactcctcctccagttgcttctcctcctccggccactcctcctccagtggcaactcctcctccagcaactccccctcccgtcgcttctcctccaccagcaactcctccacccgtcgcatctcctcctccagcaactcctcctccagctcctcttgcatctcctcccgctcaggttccagctcttgctcctacgacgccagaagctccctctacatctccgtcgtctagcccgcctctcccggcgactgatggccctggaccgagcgtcgaagggccaggaccttccacagattcgaatgaccagaatggagcaagcaagacagtttcaagcttggtacttggatctgttctcgtttggtttatgatctaagcgtgggagcctttcgctcggtgttccttgcatttgttttcatgttgatgtttgtttgttccattgttattactttcggaaccgtattcttttggattattatcttttggagaggatattattgaggagttgagatggagatatcaggatatatttcgtttggagac

SEQ ID NO: 2989 - DNA, 1666 bp, Glycine max
  misc_feature (1)..(1): n is a, c, g, or t
  misc_feature (21)..(21): n is a, c, g, or t
  misc_feature (33)..(33): n is a, c, g, or t
  misc_feature (61)..(61): n is a, c, g, or t
  misc_feature (68)..(68): n is a, c, g, or t
  misc_feature (159)..(159): n is a, c, g, or t
  misc_feature (198)..(198): n is a, c, g, or t
  misc_feature (231)..(231): n is a, c, g, or t
  misc_feature (262)..(262): n is a, c, g, or t
  misc_feature (365)..(365): n is a, c, g, or t
  misc_feature (636)..(636): n is a, c, g, or t
  misc_feature (705)..(705): n is a, c, g, or t
  misc_feature (804)..(804): n is a, c, g, or t
  misc_feature (824)..(824): n is a, c, g, or t
  misc_feature (844)..(844): n is a, c, g, or t
  misc_feature (879)..(879): n is a, c, g, or t
  misc_feature (908)..(908): n is a, c, g, or t
  misc_feature (1072)..(1072): n is a, c, g, or t
  misc_feature (1121)..(1121): n is a, c, g, or t
  misc_feature (1369)..(1369): n is a, c, g, or t
  misc_feature (1409)..(1409): n is a, c, g, or t
  misc_feature (1415)..(1415): n is a, c, g, or t
  misc_feature (1473)..(1473): n is a, c, g, or t
  misc_feature (1517)..(1517): n is a, c, g, or t
  misc_feature (1589)..(1590): n is a, c, g, or t
  misc_feature (1592)..(1592): n is a, c, g, or t
  misc_feature (1595)..(1596): n is a, c, g, or t
  misc_feature (1598)..(1598): n is a, c, g, or t
  misc_feature (1608)..(1608): n is a, c, g, or t
  Peptide Sequence Number=SeqID_6553
  Probeset Number=SeqID_12768
ncgcgtcgcggagagtacgcngacgtatgctcnattaaacgtagtgaaagatgtatgaganagatgtnggagtagaactcactagacgtagcgtagcggtgacatcatattcacgccatacggcatacactagacaccgtcgatcttgcgctcgtcagngattagacgatcgaccgtcgtactctgatctttactctnttacaaatagcatgagtccgacgtatagacgtnactgtacccgatcgctccatccaaaacgatnaatatacgtaggaggagacgtagcgcctatactatcgctgtgatatggagagaggagagtcagctgcacggcctcatattatatgatgagactgccatctatnacatataacgcgacagtatgcacattatgtcgtaggtgtcgtgtagtgtacgtagcaggccactaggagagtatctatgccgcttcacaccgccacgctgaagataatcgccacgcataggcgtaagtctcagccgagccggtcataggtcgccctcatgcgacgatcgaacaacgcagcgtagcgtattataggcaaggaacacacactacactcactctctcatagtagcacgaatcattatgtattgatactagttgcacttagtagntgcactaggtcccggcggtatagtgatcttgtagcgatgatgaggagagatcgcagtagcgtgatgagntgggacagtatcatagacatcatctagcgcacagaggtgctgatagagcagatcaagatacacacaaacaccgtatgcaggagaggcgcatatgcatantccatctcatcgtgacacantgtgcgtcgcataacgtcangcgagcgagacgacgtcgacacgacgcgaggcganctagtgcgaacagactaattactctctgnaacagtcactctgccatcaccgcgcgtgcatggcgctacgtcatcacagtatgcactaccagatcgtccaacccacccatgcctcatcgacgcagtattgtgcattgcatacactgtgtgtctcctctgcacatcctcatcatagaacatatatgggtatgganggaggtcggcgacagagaggagatatgagacagagcatgtcataggtgntacgagcaaacaaagtatctacatagtaagagagatgacacaccggctatatactaagcgtgaacacggagagtacatcgacagcacgcgctccacctggaagtaagtcacagcgaggatctgaatctacggtctactgatatagagaggaagcatgtaccgtgacagggcgctgatttagtgaagggagtatagctactcgacagttacacgcccctagcgctccaactcctactcacttatatatnaagtgaagcagtgagacttcactctctccctcatagtagnctagcngagatatgtaaaaatagcgccggagtagcactgcttcacagactacactctggtcgangagtctacgaggctgtggtgttcatataccaacttatcttcgtngctctcgtcgctctcctgcacactgagagaaacgcacacgtgatatatacatatactataaaattctaggannanggnngnggggctgcgngggggccggtgagcctgttagtaagtcagtgtagcagagaagatgtgcagtcgcgtct

SEQ ID NO: 2990 - DNA, 658 bp, Glycine max
  misc_feature (15)..(15): n is a, c, g, or t
  misc_feature (34)..(34): n is a, c, g, or t
  misc_feature (58)..(58): n is a, c, g, or t
  misc_feature (62)..(62): n is a, c, g, or t
  misc_feature (64)..(64): n is a, c, g, or t
  misc_feature (658)..(658): n is a, c, g, or t
  Probeset Number=SeqID_12769
gcgatgtgtctggtnaattccgttaacgaacganacctcagcctgctaaatagctatncggntnccacccaccggtccattggccaggatcagacctcttgtgggaagatatgtgccccctgaagttgttgctgttcgggtgccgcttttgaatctgtcaaattttcaaattaacgattggcctgatatttcagcaaagagctatgcaatcatggttctcatcctccctactgacagtgttagaaaatggcgagaccatgagttggaacttgttgatgttgttgcagatcaggtagcagttgccctttcacatgctgctattttggaggagtctatgcgtgcccgtgatcaactcatggagcataatgttgctttagatttagcccggcgagaggcagatatggcgatacatgctcgcaatgatgttcttgctgtcatgaatcatgaaatgaggacacgcatgcatgcagttatagcgttgtcttcacttcttcttgggactgacctgctccctgagcataggtgtatgattgagacagtgcttaggagtagtcatgtgttggctacacttcattcgcgatgttctaactctctttcgactttatctcgcggtctggactttatgtatggaagcttccatctccatggaatcttagcn

SEQ ID NO: 2991 - DNA, 2460 bp, Glycine max
  misc_feature (1)..(4): n is a, c, g, or t
  misc_feature (13)..(13): n is a, c, g, or t
  misc_feature (17)..(17): n is a, c, g, or t
  misc_feature (24)..(27): n is a, c, g, or t
  misc_feature (34)..(34): n is a, c, g, or t
  misc_feature (45)..(45): n is a, c, g, or t
  misc_feature (47)..(47): n is a, c, g, or t
  misc_feature (61)..(61): n is a, c, g, or t
  misc_feature (82)..(82): n is a, c, g, or t
  misc_feature (108)..(108): n is a, c, g, or t
  misc_feature (113)..(113): n is a, c, g, or t
  misc_feature (144)..(144): n is a, c, g, or t
  misc_feature (147)..(148): n is a, c, g, or t
  misc_feature (217)..(217): n is a, c, g, or t
  misc_feature (232)..(232): n is a, c, g, or t
  misc_feature (290)..(290): n is a, c, g, or t
  misc_feature (304)..(304): n is a, c, g, or t
  misc_feature (313)..(313): n is a, c, g, or t
  misc_feature (340)..(340): n is a, c, g, or t
  misc_feature (344)..(344): n is a, c, g, or t
  misc_feature (355)..(355): n is a, c, g, or t
  misc_feature (372)..(372): n is a, c, g, or t
  misc_feature (375)..(375): n is a, c, g, or t
  misc_feature (377)..(377): n is a, c, g, or t
  misc_feature (381)..(381): n is a, c, g, or t
  misc_feature (397)..(397): n is a, c, g, or t
  misc_feature (426)..(426): n is a, c, g, or t
  misc_feature (481)..(481): n is a, c, g, or t
  misc_feature (550)..(551): n is a, c, g, or t
  misc_feature (559)..(559): n is a, c, g, or t
  misc_feature (566)..(566): n is a, c, g, or t
  misc_feature (573)..(573): n is a, c, g, or t
  misc_feature (575)..(575): n is a, c, g, or t
  misc_feature (579)..(579): n is a, c, g, or t
  misc_feature (582)..(582): n is a, c, g, or t
  misc_feature (593)..(593): n is a, c, g, or t
  misc_feature (602)..(602): n is a, c, g, or t
  misc_feature (731)..(731): n is a, c, g, or t
  misc_feature (747)..(748): n is a, c, g, or t
  misc_feature (775)..(775): n is a, c, g, or t
  misc_feature (782)..(782): n is a, c, g, or t
  misc_feature (803)..(803): n is a, c, g, or t
  misc_feature (819)..(819): n is a, c, g, or t
  misc_feature (861)..(861): n is a, c, g, or t
  misc_feature (868)..(868): n is a, c, g, or t
  misc_feature (872)..(872): n is a, c, g, or t
  misc_feature (879)..(879): n is a, c, g, or t
  misc_feature (884)..(884): n is a, c, g, or t
  misc_feature (886)..(886): n is a, c, g, or t
  misc_feature (888)..(888): n is a, c, g, or t
  misc_feature (901)..(901): n is a, c, g, or t
  misc_feature (914)..(914): n is a, c, g, or t
  misc_feature (948)..(948): n is a, c, g, or t
  misc_feature (952)..(952): n is a, c, g, or t
  misc_feature (954)..(954): n is a, c, g, or t
  misc_feature (966)..(966): n is a, c, g, or t
  misc_feature (1008)..(1008): n is a, c, g, or t
  misc_feature (1037)..(1037): n is a, c, g, or t
  misc_feature (1042)..(1042): n is a, c, g, or t
  misc_feature (1079)..(1079): n is a, c, g, or t
  misc_feature (1120)..(1120): n is a, c, g, or t
  misc_feature (1134)..(1134): n is a, c, g, or t
  misc_feature (1151)..(1151): n is a, c, g, or t
  misc_feature (1165)..(1165): n is a, c, g, or t
  misc_feature (1169)..(1169): n is a, c, g, or t
  misc_feature (1185)..(1185): n is a, c, g, or t
  misc_feature (1192)..(1192): n is a, c, g, or t
  misc_feature (1212)..(1212): n is a, c, g, or t
  misc_feature (1244)..(1244): n is a, c, g, or t
  misc_feature (1259)..(1259): n is a, c, g, or t
  misc_feature (1351)..(1351): n is a, c, g, or t
  misc_feature (1363)..(1363): n is a, c, g, or t
  misc_feature (1374)..(1374): n is a, c, g, or t
  misc_feature (1377)..(1377): n is a, c, g, or t
  misc_feature (1384)..(1384): n is a, c, g, or t
  misc_feature (1386)..(1386): n is a, c, g, or t
  misc_feature (1405)..(1405): n is a, c, g, or t
  misc_feature (1414)..(1414): n is a, c, g, or t
  misc_feature (1426)..(1426): n is a, c, g, or t
  misc_feature (1446)..(1446): n is a, c, g, or t
  misc_feature (1472)..(1472): n is a, c, g, or t
  misc_feature (1480)..(1480): n is a, c, g, or t
  misc_feature (1483)..(1483): n is a, c, g, or t
  misc_feature (1487)..(1487): n is a, c, g, or t
  misc_feature (1503)..(1503): n is a, c, g, or t
  misc_feature (1505)..(1505): n is a, c, g, or t
  misc_feature (1523)..(1523): n is a, c, g, or t
  misc_feature (1531)..(1531): n is a, c, g, or t
  misc_feature (1539)..(1539): n is a, c, g, or t
  misc_feature (1548)..(1548): n is a, c, g, or t
  misc_feature (1571)..(1571): n is a, c, g, or t
  misc_feature (1592)..(1592): n is a, c, g, or t
  misc_feature (1601)..(1601): n is a, c, g, or t
  misc_feature (1608)..(1608): n is a, c, g, or t
  misc_feature (1618)..(1618): n is a, c, g, or t
  misc_feature (1627)..(1627): n is a, c, g, or t
  misc_feature (1629)..(1629): n is a, c, g, or t
  misc_feature (1632)..(1632): n is a, c, g, or t
  misc_feature (1651)..(1651): n is a, c, g, or t
  misc_feature (1657)..(1657): n is a, c, g, or t
  misc_feature (1670)..(1670): n is a, c, g, or t
  misc_feature (1675)..(1675): n is a, c, g, or t
  misc_feature (1681)..(1681): n is a, c, g, or t
  misc_feature (1717)..(1717): n is a, c, g, or t
  misc_feature (1751)..(1751): n is a, c, g, or t
  misc_feature (1755)..(1755): n is a, c, g, or t
  misc_feature (1758)..(1758): n is a, c, g, or t
  misc_feature (1784)..(1784): n is a, c, g, or t
  misc_feature (1787)..(1787): n is a, c, g, or t
  misc_feature (1789)..(1791): n is a, c, g, or t
  misc_feature (1810)..(1810): n is a, c, g, or t
  misc_feature (1818)..(1818): n is a, c, g, or t
  misc_feature (1838)..(1838): n is a, c, g, or t
  misc_feature (1855)..(1855): n is a, c, g, or t
  misc_feature (1867)..(1867): n is a, c, g, or t
  misc_feature (1882)..(1882): n is a, c, g, or t
  misc_feature (1892)..(1892): n is a, c, g, or t
  misc_feature (1914)..(1914): n is a, c, g, or t
  misc_feature (1917)..(1917): n is a, c, g, or t
  misc_feature (1928)..(1928): n is a, c, g, or t
  misc_feature (1944)..(1944): n is a, c, g, or t
  misc_feature (1947)..(1947): n is a, c, g, or t
  misc_feature (1949)..(1949): n is a, c, g, or t
  misc_feature (1961)..(1961): n is a, c, g, or t
  misc_feature (1967)..(1967): n is a, c, g, or t
  misc_feature (1969)..(1969): n is a, c, g, or t
  misc_feature (1999)..(1999): n is a, c, g, or t
  misc_feature (2004)..(2004): n is a, c, g, or t
  misc_feature (2028)..(2029): n is a, c, g, or t
  misc_feature (2056)..(2056): n is a, c, g, or t
  misc_feature (2076)..(2076): n is a, c, g, or t
  misc_feature (2090)..(2091): n is a, c, g, or t
  misc_feature (2095)..(2095): n is a, c, g, or t
  misc_feature (2112)..(2112): n is a, c, g, or t
  misc_feature (2122)..(2122): n is a, c, g, or t
  misc_feature (2131)..(2131): n is a, c, g, or t
  misc_feature (2135)..(2135): n is a, c, g, or t
  misc_feature (2138)..(2138): n is a, c, g, or t
  misc_feature (2151)..(2151): n is a, c, g, or t
  misc_feature (2172)..(2172): n is a, c, g, or t
  misc_feature (2177)..(2177): n is a, c, g, or t
  misc_feature (2223)..(2223): n is a, c, g, or t
  misc_feature (2237)..(2237): n is a, c, g, or t
  misc_feature (2266)..(2266): n is a, c, g, or t
  misc_feature (2274)..(2274): n is a, c, g, or t
  misc_feature (2283)..(2283): n is a, c, g, or t
  misc_feature (2298)..(2298): n is a, c, g, or t
  misc_feature (2300)..(2300): n is a, c, g, or t
  misc_feature (2311)..(2311): n is a, c, g, or t
  misc_feature (2341)..(2341): n is a, c, g, or t
  misc_feature (2348)..(2348): n is a, c, g, or t
  misc_feature (2351)..(2351): n is a, c, g, or t
  misc_feature (2373)..(2373): n is a, c, g, or t
  misc_feature (2397)..(2397): n is a, c, g, or t
  misc_feature (2402)..(2402): n is a, c, g, or t
  misc_feature (2445)..(2445): n is a, c, g, or t
  misc_feature (2460)..(2460): n is a, c, g, or t
  Peptide Sequence Number=SeqID_6554
  Probeset Number=SeqID_12770
nnnnttttttttncctnttgtgtnnnntgtgttntgtgttgtgtncngtgtgtctcgtgtngcggggtgtagtgcttttatntagtgtagttatgggatggtgctggngctcngcgtagcgtgggcgtgtcccctccggtgtgnttnngttgtgcgaggtgggtgaggataggacacaactgcgaccatgtacaataatacataacacagacataanaagtgagggagaagntacgcacgcatcatatcatacaaccatctatcatagtgagtagctcatgatgacaganacgactacgctgcnccgccgtgngatggtgtgttgtatgtggtggatggnattnttcgtagacgncgcacaccaccactctnatngnaggnaggagagatgagcganactgtatcgtaataactgcacgaagatgncgagcggatgtaggatggagcgaacgcgtactatcacacgccgtggtgcaattantgacgacaagatacggacacatagctgatagacagtaatgatagagcacgcaatgacgcagtacgatanntgcagagnagtcaanactcatnanacanacncgcaacatccnatatataantacagctcatatctgcatatgtgacgcgtgcgcactgtgctgacatgtactgacagtgtggagcgctgtgtgtgctgtacacgctccagcttctcgtcgctctccctactcatgactgtaaactagtanatgtagctgactgctnntagtgatgtgatcagtatgtctgtatnactgtcngaacataatccgtacatatgngcacacgattatcatngtacgacgatcatgcgtcgatatgtgtgcagcgtgtgtacantatctcntgtntgtaganaggangngngcactcgtcaaancatcgtcatgaangtgcgtacagtaccattgactaccatatctcttnatcncntctacccacacngcctctacctcgacgatctacatacagtcttcctgctacganatgtgctatcatactctgctatcgacgtnctagnatgcactcgcgctacgtctgattactcatcagtatcntactacacatcgactatctcgtacgcatctctctactacgnctcacgtgattgcngactgatgtaatatatnacatgagcgctctntgtncatcgcgacgcatctnaattacngctggtatcaatctcacgangatgatcactaaatatactacgaaacacgaantcgagggctagagancgtacacgacgccacactgactctggtatgtatgagagactgagtcgctgatgtcacatgacacgagactcgactcatagcagcatctacantgatgatatagnatcgaaaactnacnactcgtntntgactgcagcacatcttantatgacacnacaccccatctncacgacatagtactactcgnctctgcactgcactcgacaaacgtantagcacgnagntgancgtgaggtcgtgacgnantggtgatgatgcacgacntgaccgantctgatgnagaagctcnactgatcaaccgatcgacgtccntacgggaacgctgatagactnatgacgtancgtagtnatgccgaatncaaccacanancantacacgacagtcacagatncatggncgctgctgcgcgnatggntgagancgcgacacgacgacgcatcgtcgagtgatgatgtancgtagtcgctgatggctactcatccgtaagaacngtangcnactgcatgcacgacgactgactgacngtnannnagctcgacttaagtagagnacgctaangtactgtagccatcgccganctgctcagatctcaacncagtgatcatangaatgcagtgcgacnagcatcgaantactagtatatcgacgatgacngtngtagcgctgcnagtcgacatgatttgntgngnactgagtagcangtgatnanaaccgatgagactatgatttactatcaatncacgnacggatgatagtagacttactcannatcgggtatcatcatcaccatgaattntagcagacgacatcaatacntagatgtagctgtnncatnaacgacgtatatgttgntactgtcaantcactaacntacnacntacgtagtaaacngagctatgtaatcaagctgtncgaangatgcagatcgataggtcaatgacgtcagactacccgatgatcagngatgtaggatacgncactatactgagatagaattatgaagatncggatatncatcatacngctcacccgcgccgntngtcgataatcntatcggactgctcgactactgatgcactcngtacagnacngacagcaagctaataaatctantcagtgcgtgatggtacgagcagntaatncgtagtgactgccggacgagtggctcatactgatcatacgtcngactcgcgacagatn

SEQ ID NO: 2992 - DNA, 1808 bp, Glycine max
  misc_feature (53)..(54): n is a, c, g, or t
  misc_feature (62)..(62): n is a, c, g, or t
  misc_feature (650)..(650): n is a, c, g, or t
  misc_feature (661)..(661): n is a, c, g, or t
  misc_feature (1086)..(1086): n is a, c, g, or t
  misc_feature (1126)..(1126): n is a, c, g, or t
  misc_feature (1147)..(1148): n is a, c, g, or t
  misc_feature (1152)..(1152): n is a, c, g, or t
  misc_feature (1169)..(1169): n is a, c, g, or t
  misc_feature (1349)..(1349): n is a, c, g, or t
  misc_feature (1380)..(1380): n is a, c, g, or t
  misc_feature (1397)..(1397): n is a, c, g, or t
  misc_feature (1460)..(1460): n is a, c, g, or t
  misc_feature (1766)..(1766): n is a, c, g, or t
  Probeset Number=SeqID_12771
aacgccattgttaccatgcccgtggcgctgtaacccgcaccctccgctgctcnnccgaacgnatatgggagtaccgcgtgccaccgccctcgcatggtccgattcccgatgcgcttcccccgcctcctcccgccgcatactgtgtttgcctcctgacggcaatcgccgatcgctcgactcccacttcttcgctccctcgatactctattgtatctcttccctgctattgacagtgacctcctccatccgcgcccgcgacccgtagatcgttaaacttcagaattcaccgcccgttcgtctgtttttttatacaccccccttctatcttatccggtgtgcctatagcctgccgaccaggtcgcgcaccaaatctaactctctctgcctctcatctcgctgggtctgttcactattcctatcttgagactaaaattgatttcgggcgtccaacatctgttctctcactgtgacctgtgtccagtcaaaccatccgacatttgcactaccgcgtatattagtgtttcttggaataatagtagacggggaggaggtcactgctaactccgactctggatctcagcataagggccgacacgcactgtcactcccgacgtcaactacacatctccctctctctacttcatcacacnctgcgatcgtnatctgtgtagcttctccgtctctgccctccgcgctctacttgggtcacagcactagaactaattgctctagcgtaccacactgggattgaccgcgccaatcacaaccggtgatactactggccatgcgtctaccctagcccgcacctcctcacacgcactaattatatatacatatcttcttcattccctcataaatattgaatacgtgtcactgcttttctatccgccggactcatagtgatattcaaccaatacggaagatcgtctctcctttctaggtagctccttaaagacgtatatgggttctcgtctgcgctgtggtcgatctcctcaatatgaaccacagcgtacagcgctctctctgtctgtatcacccgcgccctagctcaacacggcatctctcccttcacgtgtgccgtacagnagggcgcacatggacgactgttatttgcctcatgatgacntatcggcgggcggggcgcggnncggncgggtgtcctctcgctntgttctctcggcctccccaatatctcctaccgttctggcgtactacggtgcctcgtacgtgtgtgtagaggttgtcagctacttctccgtcaacagagcgtatgcgcgaattcgtcatctcgcgcgtcgagcttctcactccctacgtcgtcgtccacccgcccacgcatcattctcggncgactatacagcacattctgccgctagcgtnttagaacgctctctcgncgcgactatagctatatcacactatctacacgttctattatacatcccactactgtcctagtncaactcctctcacactgctcgtgagtgcatcgctcagtcgcccaacgtgtagccaccactctgtgcacaacattcacggatgtgtcgcgactattataacatgacgctcgtgacgagcactctatacataaccctatagcgactctgactacacacgactcgtgactctgctcgatttagtccgtctcgacgcatttactctatcacgtatacatggcatgacttgcatccttacctcatcgccatcggaggatcgacttaacgccctacattcctcctgatccctatggctacgttgaccaaatntcatggctgatagacagtctgcatcttcctctgccgacttag

SEQ ID NO: 2993 - DNA, 1573 bp, Glycine max
  misc_feature (6)..(6): n is a, c, g, or t
  misc_feature (17)..(17): n is a, c, g, or t
  misc_feature (20)..(22): n is a, c, g, or t
  misc_feature (25)..(25): n is a, c, g, or t
  misc_feature (28)..(30): n is a, c, g, or t
  misc_feature (32)..(34): n is a, c, g, or t
  misc_feature (48)..(48): n is a, c, g, or t
  misc_feature (63)..(63): n is a, c, g, or t
  misc_feature (69)..(69): n is a, c, g, or t
  misc_feature (139)..(139): n is a, c, g, or t
  misc_feature (162)..(162): n is a, c, g, or t
  misc_feature (174)..(174): n is a, c, g, or t
  misc_feature (234)..(235): n is a, c, g, or t
  misc_feature (289)..(289): n is a, c, g, or t
  misc_feature (404)..(404): n is a, c, g, or t
  misc_feature (446)..(446): n is a, c, g, or t
  misc_feature (493)..(493): n is a, c, g, or t
  misc_feature (532)..(532): n is a, c, g, or t
  misc_feature (609)..(609): n is a, c, g, or t
  misc_feature (630)..(630): n is a, c, g, or t
  misc_feature (683)..(683): n is a, c, g, or t
  misc_feature (687)..(687): n is a, c, g, or t
  misc_feature (692)..(692): n is a, c, g, or t
  misc_feature (794)..(794): n is a, c, g, or t
  misc_feature (813)..(813): n is a, c, g, or t
  misc_feature (815)..(815): n is a, c, g, or t
  misc_feature (858)..(858): n is a, c, g, or t
  misc_feature (926)..(927): n is a, c, g, or t
  misc_feature (977)..(977): n is a, c, g, or t
  misc_feature (1057)..(1057): n is a, c, g, or t
  misc_feature (1181)..(1181): n is a, c, g, or t
  misc_feature (1205)..(1205): n is a, c, g, or t
  misc_feature (1224)..(1224): n is a, c, g, or t
  misc_feature (1226)..(1226): n is a, c, g, or t
  misc_feature (1232)..(1232): n is a, c, g, or t
  misc_feature (1271)..(1271): n is a, c, g, or t
  misc_feature (1310)..(1310): n is a, c, g, or t
  misc_feature (1321)..(1321): n is a, c, g, or t
  misc_feature (1416)..(1416): n is a, c, g, or t
  misc_feature (1538)..(1538): n is a, c, g, or t
  Peptide Sequence Number=SeqID_6555
  Probeset Number=SeqID_12772
taaaanttcgtgaaagnttnnnggngannnannngtttgtatcggcgnctgtacgtctatatncgctcncgcccagcgcgtggacacactcccacccgctgtatatatgattatgtgcctatcacataggtaggcagtnagtaagactgacactgccgatanacttatctcacnatcaatgggcgcgaaacgatatatgatctacatgatgttatatcttatatatgctagcgnngcgcgctgcggccttcccagctcgccgctgcggctgcgtctggctaatgttctngttgttcatgcgctgtgtgtgcccctctcctgcatctgcctgtgtggatcgctgcattgtaggtgtgcttggcctcactcacgcgctgtctcttgcgcgcgcgtggcgtggtggnggtggtgggtggggaggaggtaaaatatagtaatatatacantctactgtctatctctatagtttataatatattcttatattcatctngctggaggtcatactcgctctcccgtcggcctgccgtcntacgtgaatgatagattacgcgtgacattcgccctgactcagtatacaatatacaagacgctgctcgaaccatcgangaggcgcggtgtgcaattatntagaattattatacatataaggtggagtggaagaagactagtgagaagaaaanatangtcgntaaatatgtatgagtcgccatgacccagctagagatataactacacactcacaacaacttacagtacactatactaccatatgcgtctagtgttattattanagagtgagtgtatgtatcncncactcacaatctacgtcttgctttcttgtcgctcggccccacncatctctgtgacatagaatcacatacggattatgtgcgcgctctgatactgcgcatcacacactgcannaaactaatctcttgagacgagaaggatgatgagggatatatactacagangagactagtagaagctagattcaagatgctcgtgtgctcgtggtaatatcggagtctgttgtgtgtgacgtgatgatcangacacgcgtactacggctgatgcgtcactcatcgctgctctagcggacgctgcatctgcgcttattcgtatcgcgtacgagtctgcttctgatctatcatgctggctgtgttatgctctcgcgngtcgctgccgcacgcggtagttantcgtgtgcttctattatcngnctgtgntcactgtgactttgtgtgatgttatctgcacttatatgngttactcattatgtcttgcgtcagcatctcgtactctcncgttgttactntgctgtctgctaggcgtgtcgatctgctacgtgcgtatagtcttctctctccatagtcgctcgtgtcgtcgcatataacatcgcatgtgcgtganctgcgcacacgacgcgtggctcgatcgctgtggcgttgaatatctatctgcgctgatcatcgtgatgacatgacatgactgtatggtacagcggagcatgtctcagtccactagtgcagacntgatacgggagttcatgatataatacatactctag

SEQ ID NO: 2994 - DNA, 1008 bp, Glycine max
  Probeset Number=SeqID_12773
aacattttcgaaataaagatattagagcaatgaaggttcatgagttttccaatgggttttcgtcctgggaacaacatgattcgccatcatcccttagcctaagctgcaaacgcctccgtcctctcggccctaagctctccggcagcccttgctctccttcttcttcctccggcgtcacttccgctactttcgacctcaagagcttcattaaacccgatcaaaccggtccaagaaaatttgaatactctattgaacaccaacgagaccttcctcatgtggggacgcaccagggagggacaaggtggaacccaactcaagaacagatagggatacttgagatgttatacaaaggtggaatgcgcactcctaacgcgcaacagatcgagaacatcacttctcaactcggtaaatacggaaaaattgaaggaaagaatgtattttactggtttcagaaccacaaagcccgcgagaggcagaagcagaagaggaacaacttcatcagcttaagttgcctaagcagcttcaagaccactaatatcaataacgcaagtgtaacaacgaagacaacaacatcgtcaaatgacgtgatcaggagagactcaatggttgagaagggggagttagtggaagaagctgagtacaagaggacatgtaggagctggggatttgagaacttggagatagatagcagacgaaacataaatagtagtaaaaatgctacaatggcaactactttcaacaaaatcattgaaaatgtaacgctcgagcttttcccattgcaccctgaaggtaggtgaagaagatgaggaagagaatgtggaattcttatgtagatctggtttaggttcagactaagtatttggtatctagaaattcaatattaatataattaaatattagaaaataacagaatctacttaagaattcccttgtactctgcgaatctgatgtacactatgtacatttttattgctatgtattcttaattatgaatttttagtttagcac

SEQ ID NO: 2995 - DNA, 188 bp, Glycine max
  Peptide Sequence Number=SeqID_6556
  Probeset Number=SeqID_12774
ccttgtccctggcaatactatgacatggccacgattggctaaaccctgctttacccagcttaatcggttagaacctcatgcttgtttaaacaattggcgtaatacaaaaaaggcccttgcccgatcgtccttcttaacacatatgcaacatcaatggccaatgccacctgatgcggcattttctaact

SEQ ID NO: 2996 - DNA, 1507 bp, Glycine max
  misc_feature (20)..(21): n is a, c, g, or t
  misc_feature (26)..(26): n is a, c, g, or t
  misc_feature (55)..(55): n is a, c, g, or t
  misc_feature (61)..(61): n is a, c, g, or t
  misc_feature (70)..(70): n is a, c, g, or t
  misc_feature (77)..(77): n is a, c, g, or t
  misc_feature (195)..(195): n is a, c, g, or t
  misc_feature (1075)..(1075): n is a, c, g, or t
  misc_feature (1351)..(1351): n is a, c, g, or t
  Probeset Number=SeqID_12775
gtttttatcgtttttgtttnnttttnttttttttggcccacgatgtgacaacggngcggangaagtaggngttgggntgaaatgtaggggagatgtgtagacattcctttaacaataagatatttttctctcactttgaaaatattttaaattttatgagagcgtattttttcttacttgacgggactacgatgnatatgatgatggtacaagcgacgcagcgtcccgacccaacctgcagggaccttcgccgcgccccgggaccacacctaccgagagtcacggcctaaaatcggcgcatacagccgactcagaccgtttcttttcttttttactttacttaatgttagattgtcacttgctcgatcgcacggacctcacatccattcctctcccactctcggtgcacgctccacgacctgaagtcaatccagacgccccagcgcgaagcccacacaacgaaagatgtccttaaacgaagcacagcgtcccttccgctttactcgcactatattttaccatgttcattacgttcgcagacagtaggaatcacgctggcacgtttatgagattggttgtgagtgtctctctatggtgtatctttgcgtacgtcgcagcttcccgaagctttatacattgttttattgtgtattctcctccgtaccggtccttgttcgctccccctcctgcgtcgccccgcgatgtccacctctccccactcctgccctccctgccgtctcgccgcccgccacactccccccctcccgcccgccacacgctcgcctattccgcgggtgcgctcttcagtcctgcccgtggcctgtgcctcgctgtggggcaggttggatgacacagtccaggagaaatctatgcccgccattgtatcgcacaacgtatcgccttgctcacctgcatccacccctttcacgtcccgcccccgctctactagccttgcctggcggcatcctcctcttcttctgcccgcgcctccctccccctccgctctactcacgcctttcttctctcccattatacgtttttgaagctgtacttacaatcgccctcctcctcatcncctgacaatctcaccgtacacccactcgacctcctgtacaaccttctacaacccctcgactactcacctcgcactccaccgcgacatacgcggaacaacctcacacactatcatgtccaacgcgccacggcagtacgctgtgttcatatcttcacgtcatctttactcgagagggcagtaccagactcttacgttcccgtctcagcaccatacaccgacacaagcagagatcttatgccacttgaacacctcacatatgcatctactctgaaatcnttttgtagcggatagagcgtgaccgttcctctccatatgccggccagcacacacacgactgtccgtgcagagcctgcacaacgacacacaaccccaaacgtccgaggcgctggacatgcgtcaccggccgagggtagtgagaacagaatggtgagg

SEQ ID NO: 2997 - DNA, 458 bp, Glycine max
  Peptide Sequence Number=SeqID_6557
  Probeset Number=SeqID_12776
ctttactaatacatatttagatttagccaaaatactctgttaatcttctctgtcttatctctttatctctctgcctcttgcatttgcaggttgtcccagagaccttggaaccaagtcttcaactagcagccgccgtgcttgctcaggtaactatcatgttatttgagcagatatattgtccgaatgaactttttaacgtcttagcattttattattactctcacctgatgataacaacaccatttattgtggtaaaatattatgttcgtttcttgttgtagctgaatctgtcacattgcctgaacttttgtttattttctcttcattgcgtaaataatttacagagtttctggttaatttttctcagaaatagtatgagtctacttttgctctttatgccatggtaaaatttggtcatacatctcaatgaaaaaatgaagacacttgatgttcttaca

SEQ ID NO: 2998 - DNA, 2292 bp, Glycine max
  misc_feature (23)..(23): n is a, c, g, or t
  misc_feature (47)..(47): n is a, c, g, or t
  misc_feature (93)..(93): n is a, c, g, or t
  misc_feature (109)..(109): n is a, c, g, or t
  misc_feature (129)..(129): n is a, c, g, or t
  misc_feature (206)..(206): n is a, c, g, or t
  misc_feature (225)..(225): n is a, c, g, or t
  misc_feature (239)..(239): n is a, c, g, or t
  misc_feature (333)..(333): n is a, c, g, or t
  misc_feature (337)..(337): n is a, c, g, or t
  misc_feature (339)..(340): n is a, c, g, or t
  misc_feature (358)..(358): n is a, c, g, or t
  misc_feature (388)..(388): n is a, c, g, or t
  misc_feature (443)..(443): n is a, c, g, or t
  misc_feature (484)..(484): n is a, c, g, or t
  misc_feature (548)..(548): n is a, c, g, or t
  misc_feature (550)..(550): n is a, c, g, or t
  misc_feature (671)..(671): n is a, c, g, or t
  misc_feature (765)..(765): n is a, c, g, or t
  misc_feature (777)..(777): n is a, c, g, or t
  misc_feature (791)..(792): n is a, c, g, or t
  misc_feature (800)..(800): n is a, c, g, or t
  misc_feature (803)..(806): n is a, c, g, or t
  misc_feature (809)..(809): n is a, c, g, or t
  misc_feature (824)..(824): n is a, c, g, or t
  misc_feature (851)..(851): n is a, c, g, or t
  misc_feature (859)..(859): n is a, c, g, or t
  misc_feature (893)..(893): n is a, c, g, or t
  misc_feature (907)..(907): n is a, c, g, or t
  misc_feature (1007)..(1007): n is a, c, g, or t
  misc_feature (1242)..(1242): n is a, c, g, or t
  misc_feature (1245)..(1245): n is a, c, g, or t
  misc_feature (1381)..(1381): n is a, c, g, or t
  misc_feature (1396)..(1396): n is a, c, g, or t
  misc_feature (1572)..(1572): n is a, c, g, or t
  misc_feature (1626)..(1626): n is a, c, g, or t
  misc_feature (1628)..(1628): n is a, c, g, or t
  misc_feature (1674)..(1674): n is a, c, g, or t
  misc_feature (1817)..(1817): n is a, c, g, or t
  misc_feature (1824)..(1824): n is a, c, g, or t
  misc_feature (1829)..(1829): n is a, c, g, or t
  misc_feature (1841)..(1841): n is a, c, g, or t
  misc_feature (1938)..(1938): n is a, c, g, or t
  misc_feature (1943)..(1943): n is a, c, g, or t
  misc_feature (1945)..(1945): n is a, c, g, or t
  misc_feature (1980)..(1980): n is a, c, g, or t
  misc_feature (2027)..(2027): n is a, c, g, or t
  misc_feature (2093)..(2093): n is a, c, g, or t
  misc_feature (2122)..(2122): n is a, c, g, or t
  misc_feature (2131)..(2131): n is a, c, g, or t
  misc_feature (2184)..(2184): n is a, c, g, or t
  misc_feature (2191)..(2191): n is a, c, g, or t
  misc_feature (2243)..(2243): n is a, c, g, or t
  misc_feature (2246)..(2246): n is a, c, g, or t
  misc_feature (2276)..(2276): n is a, c, g, or t
  Probeset Number=SeqID_12777
tctatcgcacacacgggtgacgnatcatagtcatgctgttgcactgnatcgctatctatcctatgatatcagctgtatcatccgtcatgtcanacgcagtgctgcgatngtaaatgatcactagtacanaacatcattgacgatagagacccgatcacgcctagagacgagattgataacaacgtcagtcactgacccatcttcgnatcttgctgatctgagatnctacacgtgcgagnatactcctcgctctggcgagagacatgtgatgagaacatgatagcgcgacgcgtgtgagcacttatatacgctagcgcaactaggcgagcgagnacgnannggccgaagagagaatganctcataccttatgttcgtctcgactcgtcngacctcactacatcgtcgtctcgctgtctttcgtccacattcgtccatctctcgnatcatctctcgcatcgtcatgtgtagcatcatatagagagnaggggacagcgtgatagtcagtctgcgctgtctcagagtcgacatacaacgagatatgcagtgngntggacgtgctgctctgatcttatcgtctcgtagaactcagagaacacaggacgagcagcactacgatctatgacacaacagcgagcatctagacgcataacatcatatagtgtgtatgacnagactgcacattacgacatgacgtagcgacgtcgctgatgcgagagcgagtgtagatcgcatgcctgcttagtacatacgtgaactataatgtnttagtcagatantctgtagtgtgcgnngggcgcgngannnnganagctgcgatatacanagacgagccgtcgtgcagcgtatgtanccgcgtcntcacgtgcgtaacgcatcactcctcgcgagtcanatggtgctggactnctcggatatgataagagcgcgtactgtatccgtagtttactgctgtgtacttgcactctgtatacatagcatcacgtggctacgctccaccatccgatcntacgcgtacaacgaaacacatatagacgatggcgatagagttcacaacacactcgcagcgcacatcgtgcgtcgtgatctcaacacactatggtgcatatggtgccgcttattcatcatcacggtatattactaacagatattgatgaggcatatacattcggtgagcgtgcacacactggcgacggtcaaacatatggtgataggcgtccctcgtccacatctcgtgtcgaggngcnccgctcgtcgagatagtactatgtgtatcatttatggactcgtatgatagtcgttttcgtagcagcatatgatctaactctactaacatacactatatacaacgaaggcagcgacagcggagcgagtgtgtcgagncacatagagtgacgngaagaaagaggatggggtgagccggtcagaggcactcatgcacgctcttctgcctcgtgctcgtctctatctcctgatctatgggacgatcgtagagctcagatatcacaggagtacagctgcatagtagcgcttcggatcctgtatatgcactatatgtagagtagtagataatnttgtgtagagtagttatctgatcacatcactgtcagacaggctgatatatatangnacagccgcatagagcatctagaagtatagtgcatagtctctatatnatagtatgagtatgttattactatatcgtgatgtggtggtgtgtgcggccgattatacaggggtacgatgagcgtgtgctgtgtcagtggtggggttgtacatacgcgagcctgcacatcatgcgatatagcactactccgancgcgagncgtgncggtggtgtatnggtcgcgttgtgtgatcgtgatgtcgtgtcgcgatgactatcacagccgtacacacaacatgatagtgcagctgtcagtgtactcactccatatacnaacananagagagagtgctggagaccgcacgtcggagtccgnagagtagagacgtgtacagtagttagacataggtataaggctcaganggagagatggagttcgtggcgcgacgcttataggatcgtgcgcatgctgtgcgcactatctccatntctgcacacgcctgcatatcacatagtanacacgtagnatcacgcgctacttgcatatagtgtgccatctgcctgctgtctcgactactantctgttncctcacacaacgcacctctacacgagtgtaacgagtgtaagagatatatcgntgngagcgctacaaatgcagagagtaaggtagnagaggagagtaaagaa

SEQ ID NO: 2999 - DNA, 1560 bp, Glycine max
  misc_feature (16)..(16): n is a, c, g, or t
  misc_feature (19)..(19): n is a, c, g, or t
  misc_feature (27)..(27): n is a, c, g, or t
  misc_feature (42)..(42): n is a, c, g, or t
  misc_feature (78)..(78): n is a, c, g, or t
  misc_feature (91)..(91): n is a, c, g, or t
  misc_feature (119)..(119): n is a, c, g, or t
  misc_feature (149)..(149): n is a, c, g, or t
  misc_feature (159)..(159): n is a, c, g, or t
  misc_feature (163)..(163): n is a, c, g, or t
  misc_feature (179)..(179): n is a, c, g, or t
  misc_feature (185)..(185): n is a, c, g, or t
  misc_feature (204)..(204): n is a, c, g, or t
  misc_feature (217)..(217): n is a, c, g, or t
  misc_feature (221)..(221): n is a, c, g, or t
  misc_feature (227)..(228): n is a, c, g, or t
  misc_feature (232)..(232): n is a, c, g, or t
  misc_feature (235)..(236): n is a, c, g, or t
  misc_feature (239)..(239): n is a, c, g, or t
  misc_feature (241)..(242): n is a, c, g, or t
  misc_feature (249)..(249): n is a, c, g, or t
  misc_feature (253)..(255): n is a, c, g, or t
  misc_feature (269)..(269): n is a, c, g, or t
  misc_feature (276)..(276): n is a, c, g, or t
  misc_feature (283)..(283): n is a, c, g, or t
  misc_feature (291)..(291): n is a, c, g, or t
  misc_feature (293)..(293): n is a, c, g, or t
  misc_feature (335)..(335): n is a, c, g, or t
  misc_feature (338)..(338): n is a, c, g, or t
  misc_feature (345)..(345): n is a, c, g, or t
  misc_feature (347)..(347): n is a, c, g, or t
  misc_feature (349)..(349): n is a, c, g, or t
  misc_feature (351)..(351): n is a, c, g, or t
  misc_feature (364)..(364): n is a, c, g, or t
  misc_feature (367)..(367): n is a, c, g, or t
  misc_feature (388)..(388): n is a, c, g, or t
  misc_feature (390)..(390): n is a, c, g, or t
  misc_feature (393)..(393): n is a, c, g, or t
  misc_feature (395)..(395): n is a, c, g, or t
  misc_feature (402)..(404): n is a, c, g, or t
  misc_feature (424)..(425): n is a, c, g, or t
  misc_feature (427)..(427): n is a, c, g, or t
  misc_feature (431)..(431): n is a, c, g, or t
  misc_feature (437)..(438): n is a, c, g, or t
  misc_feature (456)..(456): n is a, c, g, or t
  misc_feature (458)..(458): n is a, c, g, or t
  misc_feature (472)..(472): n is a, c, g, or t
  misc_feature (481)..(481): n is a, c, g, or t
  misc_feature (486)..(487): n is a, c, g, or t
  misc_feature (502)..(502): n is a, c, g, or t
  misc_feature (513)..(514): n is a, c, g, or t
  misc_feature (519)..(519): n is a, c, g, or t
  misc_feature (532)..(533): n is a, c, g, or t
  misc_feature (537)..(537): n is a, c, g, or t
  misc_feature (548)..(548): n is a, c, g, or t
  misc_feature (578)..(578): n is a, c, g, or t
  misc_feature (591)..(593): n is a, c, g, or t
  misc_feature (596)..(596): n is a, c, g, or t
  misc_feature (598)..(598): n is a, c, g, or t
  misc_feature (623)..(623): n is a, c, g, or t
  misc_feature (634)..(637): n is a, c, g, or t
  misc_feature (645)..(645): n is a, c, g, or t
  misc_feature (650)..(654): n is a, c, g, or t
  misc_feature (662)..(662): n is a, c, g, or t
  misc_feature (665)..(666): n is a, c, g, or t
  misc_feature (669)..(670): n is a, c, g, or t
  misc_feature (674)..(674): n is a, c, g, or t
  misc_feature (732)..(732): n is a, c, g, or t
  misc_feature (789)..(789): n is a, c, g, or t
  misc_feature (817)..(817): n is a, c, g, or t
  misc_feature (870)..(870): n is a, c, g, or t
  misc_feature (911)..(911): n is a, c, g, or t
  misc_feature (1109)..(1109): n is a, c, g, or t
  misc_feature (1179)..(1179): n is a, c, g, or t
  misc_feature (1213)..(1213): n is a, c, g, or t
  misc_feature (1255)..(1255): n is a, c, g, or t
  misc_feature (1258)..(1258): n is a, c, g, or t
  misc_feature (1303)..(1303): n is a, c, g, or t
  misc_feature (1375)..(1375): n is a, c, g, or t
  misc_feature (1404)..(1404): n is a, c, g, or t
  misc_feature (1552)..(1552): n is a, c, g, or t
  Peptide Sequence Number=SeqID_6558
  Probeset Number=SeqID_12778
tcccgtcacctgctcncgnagttcacnatagactcgtgccgncgctctcatcagtgacgcagtttgagcgctaaagtncagtatgtcgtanatgacacgttctgctcgtacatgtcgtnctacaactaatactcgtccgatgtgatatnatattactgncganatagcttacgctagcnctgttnatctcgactatcagcgcgncgcgccgcgtgcncggntggganntggnctnnctncnngcatcancaannnatatacactactanctaactnctcgtcngcacgccngncgccggtgcgctttatttaccgatccgcgacgtttggcgcgnccncttagtnanananttattatgaccgncangattgcagcgtgggattcgangnggngnagagggnnnccggcaccgcgctgactagnngnggtncgcgannggaggagcgcgcaagcgngnccagcgccgtcccncaacagtgngaagnnaaaggtagaacaaanaggcggagtgnngccanagtgattggcggnngcancagcggcacgnccggtcgtgtggcgcgtcggccagaacgangcggacgtgtaannntanancgagagcggcgcggcgcagagcggngcgacaccgcnnnnggccgagnaactnnnnnaatacatncannggnngggngggggcggcgacgaacggagaacaacacacaacacgacacccaacacccacacccacngcgcactaatgagcgcgccaccaccgcccgcatccgttctacgacaacacaaggcanagcgcgcccggcgagctgtcgcgtccgncgcctagggcgcgcccggcgctagcagctgacgtgtgccgcgctgttcctcanacatcctcgcgccatctacctataccctctactactgcgantgtgatcgcgtgagcgctcttacgccgctgcgagctgtgatttatcgaatgttcgcgttataacggagtcgtggctatcctagcaatatccacttctccatagtcgaggagattcaatactcattgagccgcgagcagaaggaggtctcacatctaagtgtctctcatcgcacaatgagtagcgtgttccgcttattngagtcggattgttcgtcgatcctctcctgtgcgcgcagctgcactagtgaataggataacgcaggatctncgtatcgtgtcatattatgtagcgtacctcttcnatgttagtgtatatgtcaattgacagacgaccgcgtcgtgcngcnacgtatgagtcgtgcactgtattagcgatctatttagcttgtggntgtagtgtgtcgttagtcggtctattataaatagatgcatatatcctaatttacatgatactgatattgtcncaccatgtggtacacatatagtatgaatnatatatgctctctctcactcactacttatatatactgcatttatgcctaccgcgcgtgataagagaggaggtgcgagtcatcaatgtagtatcagtgatgacattaattatgttattatatcaattgagatatatacaactctgctcnctcctcac

SEQ ID NO: 3000 - DNA, 562 bp, Glycine max
  Probeset Number=SeqID_12779
ggcagggggggcgggggggcctaaatgacctgacctaaactcccattacgttgcgtgggcgcttcactgccccgattttcccaggccggaaaaaaacctggtcgacgcccagctggaaattaatggaaacccggcccaaacgcggcgcccgcagaaagggcggcctagggcgtaacgtgggggcacccccctcttccgggctttccctcccgccctcactgggcaccccgccttgggcgcccaccgagaccggatcctcgtcatgcccccacaaagcccgcaaaaaccacgcttcacccgccacaacaggcgccccaacattccccggataacgcccaccaacaaaaggcccgggcaacaccacggcacgcgaaccgcccggcggcggatcccacgacggggcctcccccaccgccctcacgaaccctttccaaacacgccctcccactcccgcggcccatccctacccacgacccgccggctggaatcggtcccgctacctcggcactaacccatgccccgcccgcccgctggttgccttaaggccctcgcgcacttttaa

SEQ ID NO: 3001 - DNA, 1849 bp, Glycine max
  misc_feature (11)..(12): n is a, c, g, or t
  misc_feature (17)..(17): n is a, c, g, or t
  misc_feature (22)..(22): n is a, c, g, or t
  misc_feature (834)..(834): n is a, c, g, or t
  misc_feature (951)..(951): n is a, c, g, or t
  misc_feature (1199)..(1199): n is a, c, g, or t
  misc_feature (1241)..(1241): n is a, c, g, or t
  misc_feature (1363)..(1363): n is a, c, g, or t
  misc_feature (1456)..(1456): n is a, c, g, or t
  misc_feature (1487)..(1487): n is a, c, g, or t
  misc_feature (1531)..(1531): n is a, c, g, or t
  misc_feature (1605)..(1605): n is a, c, g, or t
  misc_feature (1680)..(1680): n is a, c, g, or t
  misc_feature (1713)..(1713): n is a, c, g, or t
  misc_feature (1792)..(1792): n is a, c, g, or t
  misc_feature (1849)..(1849): n is a, c, g, or t
  Peptide Sequence Number=SeqID_6559
  Probeset Number=SeqID_12780
ccccctttgcnncggtntccgntgtggccccctcatatccgctgactcctgcctatgcgacgctaattaactctcccgttttctcgctgtggacgtacgaatcatacgtgtcactatagatgataagtatcatattattacatattactacgccgcactccatatcaacactacgaagtctagttatgatagaacggtcaacgcttgacacgccaccacgccagctctgatgttcactcccagcgcgctcacgcataactcatatatcactccaccctatattcgctacacgtacaaaattatctatactttattactgactatactatccctatctatacacacgttgccgcaatgctaaatagatacgacgagctggagtgcacacgcagacacataccagtaggccttctgcttattctcttgttggtttatgcgacactgcttgcacgcatcatcaggacatcgtttctcctcatatatactcaattgttcggcatcactcgtactgttattgtaactttgttgatcgcgctacccacatcgtaacgatctaagttgcgatggcatacgtagatacttcatcagatccatgtaaccagttagaccctctctctctatcaatccgcgcattggagtcgagcggtgacgagcgaagttcgacgcactgcaggcgcctctgttgcgcaccttatgttagcgggactggcgttaacggtgatttatgttcataccttagagctctgtgtagttgttgtatgtatgtaccgtcgattagtcgatgacgtgagtttctgtcggtcgtgtcagactccctacgcgttagagatcggntctatgatgctgtacctagatggacgcgcctcttgtatctcgcgtgagatgttattacagcgtcggtagcatagtatcgttatgcatactcctaacgcaccaccagtgagtggtatnctgcgctgtatgtggcacggcaatctgtacgtctgcgcgatgctatatctgcgctgatgctgctgcgtgtgttgcgtggtattgttaagatctgtgatccagaaagagctacgatgtgcgcattggatctttacttctgcacatctatcctcttatccgagcaaccatcggcgtagtgagcagataacgcgtgcacgcaacacgatcgtaatactgatatgttaggtgagacgaccgagtacgcagtnttatactcgttcgcgtccgccctctcgatattgctatttatnctcttattgtcacggccccgtttctgtctcatgttagctgccgtggtctctccctcatcgtctccactctctaccaccatatctatctatatcatacgtctcacactgacatatgagtattnatgtcgctatgaacgtcgtacattcacggagacagagaggttagagagaagcgtcgcgatattagtctgccgcgaacatgtatatgagctagntaccgatatgatgggcgtcacgactcgacanctcgcgctactgtaccgtgtcggcgagtgctatagtctagatcncgcgcgtggctactgagactgtactgctgataatatagtgtagtagcatcgtttgagcgtatatgccgatcatntatgatgatgcgatgcgattacgtattacacatatcgtgcgctacatgtcatctctgtgctcatcaatagtcctnatctccacacgccactgcgcatgcttgactatntgtctatactgcgagctatgccttcccgtcgatatgtatagcatgtatgctattacgcacactgactgacgctgaactngcacgtcgtgtagatatccgtgtgtgcgtcgactcggcatctgagatgcgattgcgn

SEQ ID NO: 3002 - DNA, 274 bp, Glycine max
  Probeset Number=SeqID_12781
gaggtgttgatccgtcctgagaagcgccgctcatatctgcgctgagcaacaatcatttaaatttgacgtacagcatgagccccaacccccatcctgattacattggtgagattgcagagttgcaacacaggtatggggcaaaggtcagtggttcattaatagccaagccatgagtccattgaattgatatctattatagataaattgaaatattaatgtattatagtcatacagtgtacaaattgccagccccaggactgattccaggccacat

SEQ ID NO: 3003 - DNA, 1559 bp, Glycine max
  misc_feature (10)..(11): n is a, c, g, or t
  misc_feature (26)..(26): n is a, c, g, or t
  misc_feature (29)..(29): n is a, c, g, or t
  misc_feature (150)..(150): n is a, c, g, or t
  misc_feature (627)..(627): n is a, c, g, or t
  misc_feature (647)..(647): n is a, c, g, or t
  misc_feature (1039)..(1039): n is a, c, g, or t
  misc_feature (1135)..(1135): n is a, c, g, or t
  misc_feature (1157)..(1157): n is a, c, g, or t
  misc_feature (1173)..(1173): n is a, c, g, or t
  misc_feature (1272)..(1272): n is a, c, g, or t
  misc_feature (1343)..(1343): n is a, c, g, or t
  misc_feature (1401)..(1401): n is a, c, g, or t
  misc_feature (1512)..(1512): n is a, c, g, or t
  Peptide Sequence Number=SeqID_6560
  Probeset Number=SeqID_12782
ttccttgttnnttgtgtgtgtggatngtngtgcgtccagtagtaggagcaggtactacagcgaaaaacatattagatgattatgctgtattggtgtgtgactccctcacccgcagcgcgccgccccccacccacccgcacacaacacacnacaccaaccgactgagagagcacacgaaacgcaacaaattatctctcacaataataataaaactacatataacacccgctcgccccacgatgattttcccacgcaataagtagagaacagaccggacggctacgactatctgtatatatacgtatccgacgtattgaatgatagatagtgaaagggtatattatatgttctttgcacacacgaataaatcaaatattgaatagaagacaacaaataaacgagagaaaaccgcaccatgatatgacggtggagaatgtagtcaggttgcccgacggtgatattataagtaatcattgctaatatattacagcgctgtatcgcatatatgtacactcatacatgcgtgcatcccgtatataagtagtcgtgtcgcgttgttcgccggcgaccgcgtgggcggcacgtggagggcgcgcgatgtgaagagtcgacggtggcgggccgccncgcagcttcgcgtgcgctgnagcgatttgtgggtgtatggtgaggcgtggtgatctgctaccaactagtagattagaataatggcatcaagcgcgctcgaagctatactcaacacagtcaagaggattcgacgctaccatacatatactatagcgcgcacgatgcatgacagcgacgaggtcaggatggacggagacacgcacgcgcccaccagatcgtcatcgtgatcaacacataagtgaacacgttagaaatactgtgtgaatatattcgcctctcgtccgtagttatggtgagttgactggagctgaaccagagaatactgtctacataagtctgcggcagtgtcacacgtggtataaagatagagtggaggatattatctaattatcacttgagccccactgctatngctcgacgcggagacgagagtcggactatgaacggcacgaggcagacaagacgcggagcgcgcggaaccaatgaatagagatgtgacgagtgagantcatacagagcggagagaaacnacaacaccctagcgantgtgactatatagaacctaacagagcgatgcagacggattgatgagggataagaggacaggagaagcgtacgcatacgacgaacgcgaagggctggcangtaatgcgcgatataagtagctgtatcacgatcttgcgcgtcgagtgaagatcaatgatagtatagagtgngcgtcgcagagacgacacatcgcacgacacatattattatctatgtgttattgtatgnagatgatgcgacaacgcaggtgtgtcgaacatgagttaagtcgtggcgcgactatacacaatgagacggcgattctcgcgtaacgcgcgcagtcgaatggtacacactcancgcagggtatgactgattggtatgtgggctacgcgagtagctaagta

SEQ ID NO: 3004 - DNA, 797 bp, Glycine max
  Probeset Number=SeqID_12783
acactgaggttgtctcttctcttgctctctgctatatatagtactaatacaagctagctagctagctaagctgccccttgcaagtaagcaatggcgccttcacaaagtagcagtgcaactgtgttagcggtgatggttgtccttgtgctgctggggatgggatgcccggcggcggccatgacggcatgcaaggactgcatgccgcagtgcaactcgacgtgcagcgccgccaactttgccggagccgggccatgcggcgccgactgcagtccgactccgggatgctcgggctgcctctcctactaccaaggcaagtgcatgtcggggtgcttgagggcgtgcaaatcccaaacaccgggtgcatacgactgcgaaaccacctgcaaaggcaattgcagcaaccaaagtagcttgtgcggagtcgtctgcggcgagtcgaagacgtgcaccgcctgcaaggacaactactcccgtgggtgcacatcctgctgcaccgcctactgcaagtgccactgcgtctagctagctccatcgattcaaggttttagattcctctgcaatgtaactaaggattctgctgctcactcatcggcgcctcaccaacgacccacatgtcagtgaaataagggtgccgagtgcaaatccttaattacgtgctataaggttgtgaaacttaggagcttcattttcttcaccaaataatcattaggggcaacatgttttccctttagcatcttgataggttttaccattgtgttcttaatttctcgtttcgagtagccgggttactaattagg

SEQ ID NO: 3005 - DNA, 1633 bp, Glycine max
  misc_feature (31)..(31): n is a, c, g, or t
  misc_feature (276)..(276): n is a, c, g, or t
  misc_feature (338)..(338): n is a, c, g, or t
  misc_feature (1281)..(1281): n is a, c, g, or t
  misc_feature (1503)..(1503): n is a, c, g, or t
  misc_feature (1523)..(1524): n is a, c, g, or t
  misc_feature (1526)..(1527): n is a, c, g, or t
  misc_feature (1540)..(1540): n is a, c, g, or t
  misc_feature (1562)..(1562): n is a, c, g, or t
  misc_feature (1599)..(1599): n is a, c, g, or t
  misc_feature (1601)..(1601): n is a, c, g, or t
  misc_feature (1606)..(1607): n is a, c, g, or t
  misc_feature (1610)..(1610): n is a, c, g, or t
  misc_feature (1613)..(1614): n is a, c, g, or t
  Peptide Sequence Number=SeqID_6561
  Probeset Number=SeqID_12784
caatagtatattacatacatttgtctctgtntcagtgttcactcgctgattgcgccgcgtgcccacgttgacgttcgttatgttcagtgcgcgttctgtctgtgtcgatcattatgtaagcagtaatagtgatgtatgtagtcttgcgcgcaccgtgtgttctctcgtagtacaattggactctgccatcctacacacgcgacagtgttagacgaagtgacgtgatgagcgttccagtagcgtatcgaattctctgcatgccaggccggggccctncgcatctctcctcccgcgtccagtgtcgtgcgtcagcgtcaagcgtgcttcattcacgatcnatcatcttaccaaagcgttcgaacgaacttagcgtcgctgtccacttctagacacatctaccgcctcagccgtgatgcgtgtgtctcgtgatcatccttctgtgattgcggttaggtgtgtatcttcacgaacacctccgcgcacctctctacaccactctgctctatgatccacaccatgtgaacattaacgcactctcttcgtcgcgtcgcaggaaacctgtgtcgacgtcctcagtgtgtgcttcgcagatcgccgccgtgcgtgtgacacgcttctgcgttcgatattatgtggcgaagcgcgcacgtgcgtcgcggcggttcgggcgtgtgcaatgatgcgtacatgacgagggtgatcgacgcagcgtagtgtgtcctgttcgtggccgagcgcgcgctcttgccctcagtgataagcccggcgcgctaagtctctgcatcaattgctacgtgatcagcgttgccgtgtactgtgaatgccgccgacctatatatatatattgccgtgctgtctgcggtgcgtgacgagactcggaatttctgccagtcgcggctcgtggactgagtatcgctacacagactaatcatcttttcttataatgtgtgctcgcgcggcatatacgcagatcggtaacaggagtgtagaagagcgcgggtggttgtcgatcatgtgcaattatccagaacaacgcgctgtcacacaaactagacacacactcgcgccgcaacacaggtcgtggacacttatcatttatagatcggcctgcctgcacagccgtcccacgccgcccaacacgcggcgccgacgccatacgcgcgcaaccacacctcgctctgcacccacgccgtcgaagctgacacatcactcttcatcgcacctcagaatatgatacatatattatttattgggcatgtactatcgttgatatactatctnctgtatacaaaaattagctgtgtgctccataattggtaagtaatgatgacgtgtgacgacgtgcttcgttgggtggtagggttatggagtggggtcttagagagcatgtctctgagtactcgcttatgtgtcgccctcgctctgcgcgtcgagcgcctcacacactaatgataagcgtgtctttcataagacctcatactcgagtgttgtctgcgtgtttgnggtgaggtgtgaacaataannannaacgtgatggcgngccgtgcgcgccgcgtcgccgntgccggcacgcgcgagcgcaagtggctaacatgaggngnaggannagnaanncggcgagaagcaaagggcc

SEQ ID NO: 3006 - DNA, 2072 bp, Glycine max
  misc_feature (11)..(11): n is a, c, g, or t
  misc_feature (20)..(20): n is a, c, g, or t
  misc_feature (33)..(33): n is a, c, g, or t
  misc_feature (57)..(57): n is a, c, g, or t
  misc_feature (84)..(84): n is a, c, g, or t
  misc_feature (102)..(102): n is a, c, g, or t
  misc_feature (135)..(135): n is a, c, g, or t
  misc_feature (163)..(163): n is a, c, g, or t
  misc_feature (205)..(205): n is a, c, g, or t
  misc_feature (371)..(371): n is a, c, g, or t
  misc_feature (420)..(420): n is a, c, g, or t
  misc_feature (422)..(422): n is a, c, g, or t
  misc_feature (452)..(453): n is a, c, g, or t
  misc_feature (507)..(507): n is a, c, g, or t
  misc_feature (551)..(551): n is a, c, g, or t
  misc_feature (870)..(871): n is a, c, g, or t
  misc_feature (886)..(886): n is a, c, g, or t
  misc_feature (923)..(923): n is a, c, g, or t
  misc_feature (1007)..(1007): n is a, c, g, or t
  misc_feature (1119)..(1119): n is a, c, g, or t
  misc_feature (1171)..(1171): n is a, c, g, or t
  misc_feature (1238)..(1238): n is a, c, g, or t
  misc_feature (1365)..(1365): n is a, c, g, or t
  misc_feature (1498)..(1498): n is a, c, g, or t
  misc_feature (1627)..(1627): n is a, c, g, or t
  misc_feature (1704)..(1704): n is a, c, g, or t
  misc_feature (1710)..(1710): n is a, c, g, or t
  misc_feature (1768)..(1768): n is a, c, g, or t
  misc_feature (1808)..(1808): n is a, c, g, or t
  misc_feature (1812)..(1812): n is a, c, g, or t
  misc_feature (1831)..(1831): n is a, c, g, or t
  misc_feature (1900)..(1901): n is a, c, g, or t
  misc_feature (1939)..(1941): n is a, c, g, or t
  misc_feature (1944)..(1945): n is a, c, g, or t
  misc_feature (1969)..(1970): n is a, c, g, or t
  misc_feature (1973)..(1974): n is a, c, g, or t
  misc_feature (2019)..(2019): n is a, c, g, or t
  misc_feature (2030)..(2030): n is a, c, g, or t
  misc_feature (2033)..(2037): n is a, c, g, or t
  misc_feature (2042)..(2042): n is a, c, g, or t
  misc_feature (2046)..(2046): n is a, c, g, or t
  misc_feature (2051)..(2051): n is a, c, g, or t
  Probeset Number=SeqID_12785
ccgctacacantatgcagcnacctcgtcgtgcnccgccgcgacgctccgcaccacantctccctacgtcctcacatgctggtcncagcatcagacgcgaagngacaccacataacgaggacaccagcacacagcnatcatcgccatcctgtatcagcaatgtnatcgcccggcgtgtgtttaattcttgattgccttctcatctnatatcgagtagtgcggttgggccggcgccgctcagaagcgctcagagttatggaaccataacatagaggccgcgaggcgcgcgtagactcagtcctaaactacggctgtagtcacaatacacacgcgtagacagaacatcacataatcgaacagtatgccacgtcntacacgtcacagacacatcagcatctagcagagagtggaggcagcggcngnggatgtgcaggcgtgtcgggtgcacgaggnncgtgtaggaattcagatcgcttcgatagtctcgcagacggtacggacggcacangagcgtgcacacgcacagacgcgcgcgtgtaatgtacataggcncacgcacaacgcgcacgtccacacacgagacgagaggagaggatgcggcagccgacacgagacgacagagcaagcagatcgagtttaacatgtgcctacaacatatctcgttcctggtcgtgagcgtccctgcgtctctcgtcctatcgcggtgccgcgtgaggtcgcgtgcctctccgaccacgctcttgcgcgcgtcggcggcgtgcgcgtcgcggcggtgagtggcagcggcgagtcgcgcgtgagcgtgaccgcgagtgacgggagagagatggagagagctaggatgcgagtgagtgaggctagagaagatcannaagagaagatgagcnctgtcatgcggagcgtagtactatgcgtcacgagctncctcgctactccgtagctactactctagcggcgcgcgacacgccacgcaccacgggcgagcggatcactctcgaatcgatctcntggcgcaagatgataggcacaggaactacgggtcggcgtgtgagtgataccacatgtgtgtcgttgtgttgaagactcgacatgtcaacacccaacgactctatgcgatatnaagttgctagtgtgtctatgagcatacatatatattagttgtaggcacgacnacgtccctcacacgagcacagcacgcagccacgggaacgggggcggcgagagcagacaacaacaccnagtgcggcgggcgattccggtagtctacacccgtgtagcactctctcaccccacccttgtgtcgcccgccgtgtcgcgcgccgcatctctggtgtgtcgcttgttctactataactgaacagaaatnatgtgtgtggtgtacagagagtgttagtggtagagtgtgtgtgagtagatgagacagtacgagggcagcgtagagcaagatcatcactgtgacacatagcgccacgcagaggcagtgcgcgcgcgcggtgagncgcggagagggagatatcgcgatgtgtctggcgatagctgggagagcatagcagagcgtagagtgcgagaggagtagagaacgagcaggtggtaggtgaggagagaagatgtgagcaggaggatacatntggaagataagtggcaccaccgcacacccgcctcacaccctctcactccccagcaccgctcacgccccactcgctgnccgtgnctctcctcgtcagccgcgactacacgcgcagtcgagaagagacaacagaggtgagatnacagtgttagcgagaataagcgtctccaacaccccactcntgtnggcgacggcgagcagcgcngagagcgacaagccacgcgcacaccgtccctccccgcagcgcgctgcgacggagcggcagcgcaagagnnatgaacagaaacttcgcctaccctccctccgccggcgnnntgnncgaacaatataatataaattaagnnatnnatattccgcacgcgcccagcgactccgcacggacgtcacaacacnaaacacaaccncannnnnttctnctcntctcnctgcgttcatatttcgctata

SEQ ID NO: 3007 - DNA, 1586 bp, Glycine max
  misc_feature (1)..(20): n is a, c, g, or t
  misc_feature (25)..(33): n is a, c, g, or t
  misc_feature (36)..(37): n is a, c, g, or t
  misc_feature (47)..(48): n is a, c, g, or t
  misc_feature (50)..(52): n is a, c, g, or t
  misc_feature (56)..(56): n is a, c, g, or t
  misc_feature (59)..(60): n is a, c, g, or t
  misc_feature (63)..(63): n is a, c, g, or t
  misc_feature (95)..(95): n is a, c, g, or t
  misc_feature (105)..(105): n is a, c, g, or t
  misc_feature (130)..(130): n is a, c, g, or t
  misc_feature (178)..(178): n is a, c, g, or t
  misc_feature (180)..(180): n is a, c, g, or t
  misc_feature (361)..(361): n is a, c, g, or t
  misc_feature (769)..(769): n is a, c, g, or t
  misc_feature (860)..(860): n is a, c, g, or t
  misc_feature (914)..(914): n is a, c, g, or t
  misc_feature (1002)..(1002): n is a, c, g, or t
  misc_feature (1179)..(1179): n is a, c, g, or t
  misc_feature (1181)..(1181): n is a, c, g, or t
  misc_feature (1193)..(1193): n is a, c, g, or t
  misc_feature (1195)..(1195): n is a, c, g, or t
  misc_feature (1227)..(1227): n is a, c, g, or t
  misc_feature (1281)..(1281): n is a, c, g, or t
  misc_feature (1481)..(1481): n is a, c, g, or t
  misc_feature (1504)..(1504): n is a, c, g, or t
  Peptide Sequence Number=SeqID_6562
  Probeset Number=SeqID_12786
nnnnnnnnnnnnnnnnnnnnaaaannnnnnnnnaanntcagttgatnnannnattnatnnctnaattatcataataggatgtgccctggtggggnctaccgaggncgacttggtgacctccactcctctntcatgccaaacgccctcaaccaagcactctgctctccccttactcccncntcccattttagtaaataagtaggcaaactaactaaaatacaataattcgaccatgacaaactaaacacccatataacccataacccacatacaaacacactcaaatcccctacccctgtctcacccggcacccggctcgggatgagcataataggtgatcattataattagataataccancaacgcttatgcaatcactctgtagtatgtgatattaagtcagtgacatgacacactgaaatacatgagtactacactccactattcaagatcactccatatcctcatacctgattctctcgctcccctctacattcagatactccacacaagcccacacttatttacagtctgaccacacgtcacataacatcgtacctaacctcctccctaaacacacaagtactctaatacacgcataaacgccagccctcactatataactacctccgccataaacgcaacctctgccctaggcgacgagtcaccgtcgaccaagcaaacatctacacaccgccacataatgtcggccatcaagtcgacctacattcaacgcgcatatagtagatgatctagtatagccattangctaattggtagaatatgtttggatctccctcgactatctctctatctctctccttttctctctcttctctcttctatcactaatctaccnagtctcctgtctagatccagtgttctacgacatcactactagcatacctctagntgacaagtacacaacaacacatccaatatgaaagattgataatgtgtgtgatgacacacacattcaaacttactcctctaacaactancatatattcacatattgttcgatcgttcgccacctcccactctcattcgatgtcgcctgctcacacacttcgtctcagcgctacaccaatgcatgcgctcagacgaacatgccacgcactctgctctaccgctcaccctcaccacccatccactgtctcatcagcatattactattncnaacagattttancnctgactatccatctttcgcatacctgtctccntgtctcttctcacgcactactgtgctaacacgtctaactagatctgctcaccanatgagcatagaccgcacggacgtacacactatacccactatcgcgaacacactgctcctcctcatcacgttacacctacgtcagacactgctctcctagatatatacagacagagatagacataatatccactcacatcacaccttacacgtcgatattcgcttcgacctcacgcactcacatcatactagctgacatcncgagagagcgcatcttatatacntcgtctatactcacgtagtacataacacgtacattgcgtactatctcacgtagtaggcgatatgtgacacagatacgagcag

SEQ ID NO: 3008 - DNA, 255 bp, Glycine max
  misc_feature (156)..(160): n is a, c, g, or t
  misc_feature (213)..(255): n is a, c, g, or t
  Probeset Number=SeqID_12787
ggttttatccttatcactatgctccctgtgcgtctgatgtcaagggcgatggtgaacttgatattagctataagctgggatctccattcaaaccatatggccagcttgtacgggattttcctgcagcaaggtttgcatgctccgcatacttattgnnnnnatacagaatatgtagctttctaaacttgagtaagtgtgacattgggactatcnnnnnnnnnnnnnnnnnnnnnnnnnnnnnnnnnnnnnnnnnnn

SEQ ID NO: 3009 - DNA, 1424 bp, Glycine max
  misc_feature (587)..(587): n is a, c, g, or t
  misc_feature (639)..(639): n is a, c, g, or t
  misc_feature (670)..(670): n is a, c, g, or t
  misc_feature (699)..(700): n is a, c, g, or t
  misc_feature (714)..(715): n is a, c, g, or t
  misc_feature (731)..(731): n is a, c, g, or t
  misc_feature (781)..(781): n is a, c, g, or t
  misc_feature (835)..(835): n is a, c, g, or t
  misc_feature (843)..(843): n is a, c, g, or t
  misc_feature (878)..(880): n is a, c, g, or t
  misc_feature (885)..(888): n is a, c, g, or t
  misc_feature (922)..(922): n is a, c, g, or t
  misc_feature (924)..(924): n is a, c, g, or t
  misc_feature (974)..(974): n is a, c, g, or t
  misc_feature (978)..(979): n is a, c, g, or t
  misc_feature (1018)..(1018): n is a, c, g, or t
  misc_feature (1021)..(1021): n is a, c, g, or t
  misc_feature (1028)..(1028): n is a, c, g, or t
  misc_feature (1082)..(1082): n is a, c, g, or t
  misc_feature (1101)..(1101): n is a, c, g, or t
  misc_feature (1113)..(1113): n is a, c, g, or t
  misc_feature (1184)..(1184): n is a, c, g, or t
  misc_feature (1208)..(1209): n is a, c, g, or t
  misc_feature (1224)..(1224): n is a, c, g, or t
  misc_feature (1237)..(1237): n is a, c, g, or t
  misc_feature (1247)..(1247): n is a, c, g, or t
  misc_feature (1261)..(1261): n is a, c, g, or t
  misc_feature (1265)..(1266): n is a, c, g, or t
  misc_feature (1284)..(1284): n is a, c, g, or t
  misc_feature (1316)..(1316): n is a, c, g, or t
  misc_feature (1334)..(1334): n is a, c, g, or t
  misc_feature (1342)..(1342): n is a, c, g, or t
  misc_feature (1366)..(1366): n is a, c, g, or t
  misc_feature (1423)..(1423): n is a, c, g, or t
  Peptide Sequence Number=SeqID_6563
  Probeset Number=SeqID_12788
tttcccccccccccctctcttcacccctccaccacctcacctccgtaattaagatgacacaccctaaacaaaaaataaggagcctacccccccctgtgttggcggtcgcgcccccctcaaaaattaatggagatactcccccggtgagctggggagagaagggcgaatttccgtttattgcctcctctttttccgcgcaacattcattactatctccttatatactcataaaaacaaaatctcgaaaaagacattaccaatacatctttgttatttaacaaccatatgaccagatcaatatagaccatctctccctgctcgcttgcgtgatatcacatcgagaacactatgcgatatccactcatcggctctagatatatatataaaggtacccttcacaccaaacgctcgacgtcgtattatactgtatgttcacacttataagtgttgtttctatcttcgattagggaaaaactagtagatgccccacctctctattattcctactggcgctcctacagaccaagtatatgtttttgtattctagcgtcgcgtctctctctgattgtattgtgcggcagcacggnagagtttgcttagtcttttggagtgtggtacggtccactcgcgccttgtggnccggctcgcctctcaaagcccagcatatggnttgaataggtatggggtgtgctcggtccnncgtggataggggcnncctgacattatctttntttaagttccccttatgttgacgaacgacgcgtaaagagcccctcccaancatcctgtgatgtgtctggtgtcttttatgttacctccccccctaactctgttntttgtccnataccacagtccggagctcagatattttgtatccnnntcctnnnngcgcccgacaactcaacaatcatctccacccctngntcttgcatccttctcacgcgaggaaatcgagataatctactgtcttgtcngttnngaaggtgataataccacttgacaatgtcctagcactacngtncactatnagttgttaagacccaccctcgctaattctaggtccctgactcattgcttcactntggtgaccagccggacacnccgtgcttgccnccccgataacacccaggaatgcataattttaaaataatacatagttgtgttctatatagcatatctcccgnacgtcactacatgcgtagtgctcnntgaagtagaaagatnctgtagcacagcnagaacggatnatagagatgtagcnacgnncgcgtgccagagagtaancacactctccacaccccatcaacaaaccaaancattacgtaaaattatanacttgtanataatcgtcccgtaacaacacggncgccgagcttttatgttaacaaatagttagaaactagtacgtatgcgacgatccgana

SEQ ID NO: 3010 - DNA, 1834 bp, Glycine max
  misc_feature (1)..(197): n is a, c, g, or t
  misc_feature (1834)..(1834): n is a, c, g, or t
  Probeset Number=SeqID_12789
nnnnnnnnnnnnnnnnnnnnnnnnnnnnnnnnnnnnnnnnnnnnnnnnnnnnnnnnnnnnnnnnnnnnnnnnnnnnnnnnnnnnnnnnnnnnnnnnnnnnnnnnnnnnnnnnnnnnnnnnnnnnnnnnnnnnnnnnnnnnnnnnnnnnnnnnnnnnnnnnnnnnnnnnnnnnnnnnnnnnnnnnnnnnnnnnnnnnnccttcggggtattgtttgatgtcagtgacattcttctgattttgtttaatcatgaacggtgctcccaagcacgaacgccgctgggcgtccgacaccgtgccggagatggcattcgtcagcgccgggacttcgccgggaactgagtacaactccgtcaccgacgagtacgttgaggtcactctcgatgttcacgacgatcacaccatcgttctccgcgacgttgagccggtgactgtcgttaacatcgacgacggcgtcgcaacaagtggaaacgaaactccgacgtcctccgcgtggtcgccgtcgatcaggaggagctctcctaaccggtggcggcagttctcgcaggagctgaaggccgaggcggttgcgaaggcgaggcagttttcgcaggagctcaaggcggagctgcggtggttctcgtggagccaaggcggatctgaaacggcgttggtggctcgagatctcaggaagcagcgcgctcagcttgaccgcaaccgctccggtacgaagaaagcgctccgtggactgaaatttattagcagtaaatccaatggcgctgacgcctggaacgaggtgcaaagcaatttctatagtcttgccaaggacggttatctttatcgcactgattttgcgcaatgcatagggatgaaggactctaaggagttcgctctggaactatttgacgcgctgagtcgtagacgtagactgaaggttgaaaagatcagcagagacgagcttaacgaattctggtcgcaaattaccgatcaaagctttgattcgcggcttcagatattctttgacatggtggacaagaatgaagatggtaggatcaccgaagaagaagtgaaagagatcattatgctaagcgcttcagcaaataaattatccagattgaaagagcaggccgaggaatacgcagctctgatcatggaagagttagaccctgaaagacttggctacatcgaggtgggagttctctacaaatgataacatatgaatttatcaagaatacatgcatatattttaattctctaacacatatgagtacgtcacaaaagaaaatctttgtaagtgatagacattaatgttaatccaatccatgattaatttggtttccgaaaaaaaaaaaaaaaaaatcctccgcgcgccgcctacgttttattcgattaccctgacccgaacttcatgagggggggtggctcccagggttaccccaaacttgcgccccttttattggcggggagactccgtcatacttcacccccgctggctccccccctgggccgcggcccgctccttactatacaacgcgcgccgcacccatcctgccggaaaaatagacccccggtgcggggtatcgctgacgagctctctattcgtcctattttgcgccgccccttcccgccacaccattttcaatccgacgtccgccgccccttacacacgcgcgaaaaacgggcgcccgcccacccaccaagccggggccccttgtcgcacagactaatgtagcactcaacacactatacgatgcgctcaactcgcgcacacttgtcaaaagcagcctcaagaacacccgccgtgtcacagactgtaccatatgcagcccacttgttggagaaatgtcacacgccatn

SEQ ID NO: 3011 - DNA, 1498 bp, Glycine max
  misc_feature (1)..(1): n is a, c, g, or t
  misc_feature (150)..(150): n is a, c, g, or t
  misc_feature (610)..(610): n is a, c, g, or t
  misc_feature (1250)..(1250): n is a, c, g, or t
  misc_feature (1282)..(1282): n is a, c, g, or t
  misc_feature (1286)..(1286): n is a, c, g, or t
  misc_feature (1291)..(1291): n is a, c, g, or t
  misc_feature (1316)..(1316): n is a, c, g, or t
  misc_feature (1388)..(1389): n is a, c, g, or t
  misc_feature (1391)..(1391): n is a, c, g, or t
  misc_feature (1400)..(1400): n is a, c, g, or t
  Peptide Sequence Number=SeqID_6564
  Probeset Number=SeqID_12790
nttataaatgttagctatcacacacgcagactgatgctgaatatgttcctctgttcttagcatctacaatgactcttactcttcacactcacctcatcaaagctaccagttcatcatatacatcatctactaatcactaattccatactntctataccactgcacctacacctaaataatacacacgatatattaataaagaataacaccatatgatcgtcattagttctctcacccaacatcatacaccacatacaacaaaatacctcatacaataatcttcacactatatcacacctatctcatttactcattcttctcttttacgactatttgctgtttctcctgctcatgttctcattctctctttcttactgtttatctatgcgatcatacttattgtagtctagcattatcatctctactcattttatactctatcttctcttctagccagtcgttgtctctatcgctctcttcccctcttctcacctcctctatgtattctcctctatcagttctttcagcactaatataatgaccagcacttttcttccttctgtccctcccgacttcatgtttaatgtgcgtctgtctcatatacctgtcntctataaccatcttcttatatattcaatatctatatcttatctgcctacttacactatcctttctccttcctctcattttctcttctctcatttctctatcactttttttctattttttactccagattaaacatctaccacaccttctaacatcaacactccacactcattaccatactaccactcacaatcgccgactacaaccccatcccacacttacagcgatcgttctacatctctccaccccaccacacaccacgcatcgcacactacacctcccatgctctatcttcgcagtagtacccactcccctactaaccaccataccagcgtatcctagtactacctctactcccttctgcgtcctcttccattgtgctccttactctacccttcctgccttcccgcgttccctcttgctactcttctctcccctctccttctttctttctctctctctttatccgtacctagcttctcactactctattcatcaatatttcatctccccagaaaacatctctctcttccccttctccaacctcccacgcgccacgcccccctgggcagtccgctcctccacctctcctctcccctcctacccatctcccttcctagccatatcagattcccctcccnctggggggcataatatttcgtaatgttctctntttntcatnaataaagacgaggttttatatactnaagtaattctttccttttgtgggaagaaaaaatctttttctctcctctctctcctcttattttttagtaggnncnttcctttcnttccgtcctttagatcttccactcttttgtttgtaactctcccgtcgcctccctcgctccccccccccctcccctcgcccccccgccaccccccccga

SEQ ID NO: 3012 - DNA, 582 bp, Glycine max
  Probeset Number=SeqID_12791
gttgataacaaaaaaaattctggggagccagggaaagttgaaatgcgtatttcatcctcctctgagcacggtcaacccgatgttggtgtggcttctaaagatgaccgagctgttggagaacgtttgatgtctcaatggcaacctaaatctcaagcatctaataatcacagaggaaacgtatcaagtgatcaaaatgctggctcgagcgacggagctaacaaaatttatcccactcaggagggggagtctctgtcagggaaccgtggcaagagttccactgctcacgtctcccaacctttccatgagcaatcagtctgtgctaagagcaacgccggagaggccccacattttgagactcaagagggtgacagagagagtagaagcgctccatcaaagaggcgtcaccactccccaaatgaggcatctgttagcctcagttgagcaggctccaacaagtgcagatctttggcatgatcaacgcccatcttctgggtctggcagaagacgaatccataatcggctctgaagaggacatgaatcacatggggcatcatagccaccacccccagatatctgacatta

SEQ ID NO: 3013 - DNA, 428 bp, Glycine max
  Peptide Sequence Number=SeqID_6565
  Probeset Number=SeqID_12792
cggctcgaggtactaattcaatgtaccctccaattcatctgtgtcacaacagcgcacacactattttgcacgcaggtgtacaacgaggggcgcccgggcgttgccccccttgataacaaaaacctgatattttttaggtgtcgccccttgaaaaagggcatcacctatgttaactccccagaactactctctttgatggcagaaatatttttcttctacatcaagctcaagcatgagacaacatgttattttatatcatatagctgtccttatgctggatcagagtgttctgttgtcggggatattcctttccttgttgctcatttgagggatgaccataaagtggacatgcacaccggatgcacattcaaccatcgttatgtgaaatcaaatccccgtgaagtaaagaatgcaacctggatgctcac

SEQ ID NO: 3014 - DNA, 490 bp, Glycine max
  misc_feature (435)..(435): n is a, c, g, or t
  Peptide Sequence Number=SeqID_6566
  Probeset Number=SeqID_12793
ctacgcgatacgagagtgttcgttccttcccgaccgcggcggcgatcgatttctagggcaaactcctcgcccggtccgcgcgctcgaggcgagaggagggttcggctggtgagatggcggggcgcaaggagacggcgctcgacctggccaagttcgtcgacaagggcgtccaggtcaagctcaccggcggccgccaagttacaggaactttgaagggatatgaccagctgctgaacttggtgctggatgaagcagtcgagtctgaaagagagcaagatgacccattgaagctgtcaaccaagaccagacaacttggtctaattgtgtgcagaggcactgctgtcatgctggtgtcaccaactgatggaaccgacgagattgccaaccccttcctcgcagcggagggggcgtcataagctttgtgctagtcaattnagttcagagctgtgttactcaagcatgtgccaaaagagcttctgttcttttggag

SEQ ID NO: 3015 - DNA, 1947 bp, Glycine max
  misc_feature (38)..(38): n is a, c, g, or t
  misc_feature (45)..(47): n is a, c, g, or t
  misc_feature (72)..(72): n is a, c, g, or t
  misc_feature (76)..(76): n is a, c, g, or t
  misc_feature (79)..(79): n is a, c, g, or t
  misc_feature (95)..(95): n is a, c, g, or t
  misc_feature (99)..(101): n is a, c, g, or t
  misc_feature (107)..(107): n is a, c, g, or t
  misc_feature (109)..(110): n is a, c, g, or t
  misc_feature (117)..(117): n is a, c, g, or t
  misc_feature (122)..(123): n is a, c, g, or t
  misc_feature (148)..(148): n is a, c, g, or t
  misc_feature (159)..(159): n is a, c, g, or t
  misc_feature (172)..(172): n is a, c, g, or t
  misc_feature (199)..(200): n is a, c, g, or t
  misc_feature (260)..(260): n is a, c, g, or t
  misc_feature (478)..(478): n is a, c, g, or t
  misc_feature (516)..(516): n is a, c, g, or t
  misc_feature (677)..(677): n is a, c, g, or t
  misc_feature (737)..(737): n is a, c, g, or t
  misc_feature (741)..(741): n is a, c, g, or t
  misc_feature (858)..(858): n is a, c, g, or t
  misc_feature (860)..(860): n is a, c, g, or t
  misc_feature (872)..(872): n is a, c, g, or t
  misc_feature (876)..(876): n is a, c, g, or t
  misc_feature (910)..(910): n is a, c, g, or t
  misc_feature (930)..(930): n is a, c, g, or t
  misc_feature (955)..(955): n is a, c, g, or t
  misc_feature (981)..(981): n is a, c, g, or t
  misc_feature (1029)..(1029): n is a, c, g, or t
  misc_feature (1188)..(1188): n is a, c, g, or t
  misc_feature (1190)..(1190): n is a, c, g, or t
  misc_feature (1220)..(1220): n is a, c, g, or t
  misc_feature (1291)..(1291): n is a, c, g, or t
  misc_feature (1376)..(1376): n is a, c, g, or t
  misc_feature (1420)..(1420): n is a, c, g, or t
  misc_feature (1520)..(1520): n is a, c, g, or t
  misc_feature (1563)..(1563): n is a, c, g, or t
  misc_feature (1715)..(1715): n is a, c, g, or t
  misc_feature (1789)..(1789): n is a, c, g, or t
  misc_feature (1792)..(1792): n is a, c, g, or t
  misc_feature (1814)..(1814): n is a, c, g, or t
  misc_feature (1822)..(1822): n is a, c, g, or t
  misc_feature (1864)..(1864): n is a, c, g, or t
  misc_feature (1867)..(1867): n is a, c, g, or t
  misc_feature (1880)..(1880): n is a, c, g, or t
  misc_feature (1886)..(1886): n is a, c, g, or t
  misc_feature (1890)..(1890): n is a, c, g, or t
  misc_feature (1900)..(1900): n is a, c, g, or t
  misc_feature (1908)..(1908): n is a, c, g, or t
  misc_feature (1911)..(1911): n is a, c, g, or t
  Peptide Sequence Number=SeqID_6567
  Probeset Number=SeqID_12794
gttgtgttgttgtgatggaggtatggcccacccccccncctcaannncctcccgcccccgccccccccctcncccnccncgcgcgccccgtgganggcnnngggggngnnatgagancgagnnggctagatgtgattggatagtgtgntgtgtttatgnattaggttggttnttgatgatgtgtttgttcgtttgtggnngtgtgttgttgctgccgctctgcgcgctcaatgcgagcttcgatcgacaatagtatgtgntcgacgcatcacacactgttcctctactgccgcgttctctgtctcttgtatatgctgttctacatcaacgaccaaaccttctcttcgcttcaatttgttgccaccggcggcgtctcttatgctgtccacgcctcctctctacttctcatattctctctctctctattaatacatctctgtatctcagcgactctatgtcgtctctcgttcatcacacngcacgccgacacgcgccgctcgcgcacgcacgtgcacntgcttgtaatgctgtgttgctgttgtgtttaagttaattttatatataatagaatgatatgcgggtagcagcagagtcgggatgcagacgagcgatgagagctgacgagtagagagatagacgagaatgcgcatctacactacaacgtgcgaacagccccncgctactcacggccgagcagacgcgaccagacgcgcagagaatagcgtctgggagccggngcgncggacgcacaccacacgcgcacagagcgcgcgcagatatatatctacatagagaactcatgacgcgcgcacgaacacacactatcgtaggtcgtctactactctctcgcctctaaantnattacttctaanacanctgtgctagcatagaagagatcatcgcgtgtgcngtcgttacgcgtagataganggtgtggtggacataagtcgtgcgntgtgtgcgagcagatgtagagtatangagaagagacgcgcgcgcggcggagcccacgctacatgagctcgtcgnggtacgcgcacagtcggcgccgcgctaatcgcgctggcagacacgcgcttcgtagaaggttgggagcgacgagcgacgcacctctacgcactctgcgtgtgtcgaacgtcgtctcgtgtgctatatatgtctctactcgtttggtccgagggtctgctntnctcgcgccgcgcactgcgcggcggcgctgngacacgttgcgcgcggtgatgcgtgcgcaggtatgtgttatatgtgagtactcgtgcgcgccaggacaganacgtctgcgcgcgatctagatgcggtcgcggaatgcgcgtgctcgactgctcatggatgtgtgtgtagaccaggagcgctagcanagagataatacgcagtacggtcacggacacggacgactgcgctngcccgcgcgcgcgctactctgtgtggtcgtcgcagacatctctccgcccacaacgagtgtcatgcgtgtcatatcatgtcttgtacggatgtatgtttgngttcacgcgctcacgctcagcctacctcgttgatagtcgttcncctctatacacacagtatcaccatgagctctctgctctctgcgacacgtccgctgtctctgtcgcatgcctggtcgtgctgttatatagctcatgcgcacatcgtgcgacgcggcgcaccacagagtctgtgccgctctggatgcatgttgngtgacacgtcacttcgcgtgcgttcgtcatgagttgtgatagggaatagtagactaactgcacccccggcagcncanacgtctccgccgatgtgagtgnagtgcccncacatcgcgcgcactcacatactcgagacatctcgccgcctnccncgcgtcggcgcgnacttgntgtntgccatcgcngtccgtcnccngcgtcgtcctaactgcgcatctccacccaccactcc

SEQ ID NO: 3016 - DNA, 600 bp, Glycine max
  Probeset Number=SeqID_12795
tcgaaaaagaaataaataaaaagttaacataagtaattaacaagacataattgcaaaggaagcatagtatgataacagttcatttttttatatataatttcattaaacttcaactttcaatattttctcttcaaaagtttctagtactgtcattctttttgtctctcatccttctcgtttattaaatattttaataattttattcgattccaaagtttctggccactgccctgttatagaaagcgatatttcttcatgtggtggcacgacgaaaatctctaaaaaaggagggaaactagaagaagctttgatcgaaggtgaagtagggtgacgagaaaaaatgaatgttggattttaggttcgaaaggatttaaaaaagaaattggtctaacttgatagtggatttcaaatttggggcttttattgaagtatatttttgttacagtttttttattttccgttttgttcatttttattttattttaagagttaattattaattttgttccctaatcattttaaatgtgttaatttagttctcagatttttaaaaggtttaatttaattctccaatttttaaaatttaatcctagatccggc

SEQ ID NO: 3017 - DNA, 1563 bp, Glycine max
  misc_feature (348)..(349): n is a, c, g, or t
  misc_feature (439)..(439): n is a, c, g, or t
  misc_feature (464)..(464): n is a, c, g, or t
  misc_feature (650)..(650): n is a, c, g, or t
  misc_feature (730)..(730): n is a, c, g, or t
  misc_feature (1104)..(1104): n is a, c, g, or t
  misc_feature (1246)..(1246): n is a, c, g, or t
  misc_feature (1251)..(1251): n is a, c, g, or t
  misc_feature (1278)..(1278): n is a, c, g, or t
  misc_feature (1284)..(1284): n is a, c, g, or t
  misc_feature (1290)..(1290): n is a, c, g, or t
  misc_feature (1323)..(1323): n is a, c, g, or t
  misc_feature (1350)..(1350): n is a, c, g, or t
  misc_feature (1352)..(1352): n is a, c, g, or t
  misc_feature (1374)..(1374): n is a, c, g, or t
  misc_feature (1421)..(1421): n is a, c, g, or t
  misc_feature (1508)..(1508): n is a, c, g, or t
  misc_feature (1514)..(1514): n is a, c, g, or t
  Peptide Sequence Number=SeqID_6568
  Probeset Number=SeqID_12796
cgaagatgctagtgagatatcacgcgtactaagagtacatagagtaatagtcgcacagcgcgctcggcgcgtcgagtaggaggcacatggcagtaacaactaccgattcgctccactactcgccgagaacgatgaggaggcacacgcgtccgctcgcgacgctcagagtatcagtgagatgtagccgcacagtaccacgcattacatctcatctatacatattatgcatgtcagagagaagatgatcctcgagctggttggatgatgtagagagctcgtagtacaggtactagcactctactcatgcagacgtgatccctcaatacatatataatgtcgaacgcacgnncacgagacagagggcagattcacgtcgtaatgatgacatatgaggacaacacgtgagagacagatatcgtgacgtattcgagtggcgagngacgctacactatcgatagttacantatgttagtatgtgtagcgtagatcgaaggatgattcgtacacctagaatgagagaggtagtgtccatacgtaggagacatatagttcatatactgagaggagttgaatgtgattgatgtactttccgtctcatcttactgcaccacacaggtctgcagtgatagtcaacctctgtgagtacacgncgaatgggcgcatcagggaggtatgcgcgcgatagcagcatcgagcgaggagcatagcaggtcctacttctcctaagatnaggctcgcacaggcggagagcgcagggtagaagataaacctatacatagagagagtataccgctactcctcgacatgctatgacattcggcatagtcacagctccggtctcgtcccaagtcagagaacatcaactgctgatgtgatagaggcgttcgtctgtgggctaggatctaagtgtcattccagtgcggcataaacacgactatagtattatctctcaaggagttactatgctagatactacactgataatgaacatgcgagctccgctccggggtagtaagcgcgaggctcgtatctcatgatctagagataggcgatactacagcgtatgagatctacggctcgagactaagatctgtagagaagtgnaagagctgccatggtaggcatgtgaaaggatgaatgtgatagcgacaatcaaggattccgtctctgcgctatagtactaacatcgcgagcgatactacaggcgctcgacggctgataagacgacgagaggacctacagacgncccgnttcttagtgtccagactctagcagcanaggaancttacnaggggagtagtctgagtctacatcccctgcgtnagcagcaacgcgcagctaaacatcggngngaggacatctggtcgacgatcncctgcgggtgtggctgcgcggcgacagtattctcaattggatagccngtcgtggctcctcgctccgccgcgtgaggaggctagcgaggacgcgcttatctgtaatgtgtgtaggctgctaggcgagtgaatcanccactncagtagagagaggagcggtagagagaggtgtgggagggggtgaggagtg

SEQ ID NO: 3018 - DNA, 2648 bp, Glycine max
  misc_feature (1)..(1): n is a, c, g, or t
  Probeset Number=SeqID_12797
ngagactgcagaaatgaaccccactaatggtattgaggtagaaaagattccagcaaatcatgccaaggagaaactagtgattgaggatgatggtaaattcaatcaagaagaagcaaaagggatcgaagaagcaacaaaaacactgttactaaatactgcaacagagagcctaacagaggaagaagtccaggaaatattgcccactcctgcaattgtccaacgtgacacaaagcaaatcatgcaacaacaaacacttcacaatgatgaatcagaagcaattgataaggaaaagagctgcataccagaaaatgaacttgacagaaagttcattgctgttgaggaatctgatcaacctgaaaccaaggccaatgctggcatagtaaaagaagaacaagcagacaaccaatcacaagtatcaagcatgcagagtgtgattacaaactatataacagcagaaggacatctggcatcagaaagcagtacaaaattaagttttatgaatgaacagaagacagtagacgcgtcagtagagaatttagaaatcaaggatgcaagtgaaatcacagcagaggaagcaacagatgccaaacaattgactgatgaggagatacaaaaatcagaaaccgaaagtgtgtatgaagataaggccctgcaaacattacccagtacagcatctgtccgtattgaagttgagaaaagcattcaagagatacatacagaaacagaattagcagtgacagataccaaagaggggcagatatcagaaaatgagtctgaggcaaaaaaggaagtttctgagtatatgttaaaaaaggcttttgatctgcacaaagtggcatgccagaccggtgcagaaaatgaactgaaagctgaattcctatctgaagagcggagccaggaaactatagttacaaagcatccaaatttggaaggagagagcatagagataaacccaacaagtgaaactgaagaacatgaacaggtaccagcatcacacaccggagagaaattagagatcaacgatgatgggaatttcatacaagaggaagaaaaagagatggaaaaagaaactgaaaggcagttgcttaaaactgcaacagaaagtgtaccataagatgaagtccagacaaccctgccaacatcaacaattgttaaaggtgagacagttgaaggaattgttcaggaacaaacactcgaggaagagaaatcagcagcaatagataacaatagtggcagaccagaaaataaacttgagggaatggctaatgttgttgagacaattgatcaacatgaatccatggccaaggtcagcactgaaaatgaagaacatgccaaccgccattctgaacagtctagcatggagaatgtaattacaaagcatatcaattcagaaggaatggtaacaacagaaaacagtacaaaatcaagttataatgtggaagaactggaaaaggttctagactcaaactccatagaaaattcagaaatgaaggatggtagaaaaatcttgtcagaggaagcatctaatatgaaagaagccactgatgcacctggctcgagagccatctcaactttgcctgagatagttgaggaaagcattcaagaagtaatacaaaaggaagctgaatcagaagtgatcgataccaaagaggagcagagaccaggaaatgattttgtaaagaacatggaagttctcgagggatttgatttacacaaagcgcaaggcaacaccactctggaaaatgaaatgaaagcagaagtccagtctgaagcaaagagccgggagatcattatcgagcatcaaaatttgctggagactgcagaaataagtccaagaaatgatactaaagaacctgaaaaggaacataaagtcaccacaggtatctctgaatcagtatctgcagataccacagagcaaacagacacaggaaaaccggaaactccagaggccgaaatcactcaaccaggcatcacaaaagaagacgaagcaggagacgaattcgaaaaaataagcccatcatctagtgtgagtgtgatatccagagactctcaagacaccgacacgaaagtttcacacaaaaaatctcatggcatcctatcaggtgtagggtcaaaggtgaagcactcaatttccaaagtgaagaaggccattacaggcaagtcttcacaccccaagacaccaccatcatcaaaataaaaaaaaagtgacccattagacaactacatacatgctgcttttgtaaatagatagaatacacagatgcttgagctttttggagggcttgtttcttttgttgaggaattggattgatttgtttcattgatgtattgcttggtttgttatgaaaatttatcttaaggggggtctattattctcctaactcagtgtaatgtattcatattctctttgttttaatgaaattgttatagacataagcacaaaaaaaaaaaaaaaaaaagaccgagtttgaacgagtgaagaaccgcattgcatccggatctgtcaccttcaagcgtccgaaaagataggcctggcgctgaggcacgaggtgatgctgaattgctgcccatcctgtaactcaacaaataatattcatacgcgaccgcaagatgaccactatcatctatctcaactgcaacatctcgct

SEQ ID NO: 3019 - DNA, 605 bp, Glycine max
  Peptide Sequence Number=SeqID_6569
  Probeset Number=SeqID_12798
ggaaagctcaagcaattgagccgtcaatgtagggcatcccagcagaaggaggcttatgcaggcctgcaaacagcaatgttttatagcccagtcatactctccatggttagcacagcaattgtgtgcatgtgggtaacttcacttttcaaaagctcgcctagagttttttatatattcccacccttcatctgggaatcattagagtacggggcaaggtaatcttttatatcaggggcattctactgtaatcttccaccttttttttatattttattttagaaactgggtaagtttttgtttttgggtttggattattgacaggttatgcatccatagtaatagtatctgtcaccaacatatttggggaaaccccgaggtagacatttcgcctgttcaggacagaatcttttttattaatcctgtcagcctcttaaatatggggtcaatgctcttagtccataatatatctgataatagggatcacgccataacagtttttagcaatttgaggaaatcaccttttattaattagtcgaaaaatccaagatattttcggtccattttcacaaaaaaaaaaaaaaacaaagtaaaaaaaaaaaaaaaaa

SEQ ID NO: 3020 - DNA, 2204 bp, Glycine max
  misc_feature (1069)..(1069): n is a, c, g, or t
  misc_feature (1121)..(1121): n is a, c, g, or t
  misc_feature (1321)..(1321): n is a, c, g, or t
  misc_feature (1333)..(1333): n is a, c, g, or t
  misc_feature (1380)..(1380): n is a, c, g, or t
  misc_feature (1413)..(1413): n is a, c, g, or t
  misc_feature (1419)..(1419): n is a, c, g, or t
  misc_feature (1426)..(1426): n is a, c, g, or t
  misc_feature (1428)..(1428): n is a, c, g, or t
  misc_feature (1462)..(1462): n is a, c, g, or t
  misc_feature (1502)..(1502): n is a, c, g, or t
  misc_feature (1523)..(1523): n is a, c, g, or t
  misc_feature (1604)..(1604): n is a, c, g, or t
  misc_feature (1664)..(1664): n is a, c, g, or t
  misc_feature (1687)..(1687): n is a, c, g, or t
  misc_feature (1734)..(1734): n is a, c, g, or t
  misc_feature (1743)..(1743): n is a, c, g, or t
  misc_feature (1749)..(1749): n is a, c, g, or t
  misc_feature (1772)..(1772): n is a, c, g, or t
  misc_feature (1786)..(1786): n is a, c, g, or t
  misc_feature (1883)..(1884): n is a, c, g, or t
  misc_feature (1931)..(1931): n is a, c, g, or t
  misc_feature (1941)..(1941): n is a, c, g, or t
  misc_feature (1983)..(1983): n is a, c, g, or t
  misc_feature (1989)..(1989): n is a, c, g, or t
  misc_feature (2001)..(2001): n is a, c, g, or t
  misc_feature (2031)..(2031): n is a, c, g, or t
  misc_feature (2080)..(2080): n is a, c, g, or t
  Peptide Sequence Number=SeqID_6570
  Probeset Number=SeqID_12799
aggtgttacgtgcaggctgagtggtgcgatgtagcggaatggtaatatgcagtgtcgctggtgaatagaatgtaatgttcctcgcccgatgatgtctgtgtttcttgtatcgtgccgcggcagctgaacgtcgcggagtgagtggactgtggaaactgcgatgaagaattacatggaattatcctccacacaacacaacggtcactagcgagacgcagcgatatgaagagcgacacgtgttcgttcctctccccgcacacacaccttgcctgttactcctgtttttgcatgtcgtcgttctcacgtcgccgcgttgtaagggcgttacgattctgcctctcgggacggacacactgacgatcatgttatgccgtacccctccgatcggaataaaatatcgaaggatctacgcctgctgtctcatactgtagtatgtgcgccacgtacgtcaacatggtcacacacgcgttatataacatgctgctgtaatagtagtcgcgcagcatatgtcagcccgctttgttttttgagtatgcctcaattcctctccgtgcggcaggggtgtgtagaggtgatatatcgtagcgatgcactgcacgcgtgtgtgccgcacggtcgctgcgcggggattgactccggtcgcggcatagtcgggaggctgctatgtagcgtaaccacacgagcgcgcggcagcggggtcgatgcggtggtaatgatgtgatcgtgttgttatgataggagggatgagaggaagtaacggaggagaggagggccgggaagacagatgatgtgatcgatgcgacgagtggtaattgtattatcgtatagtgacgagatagacacctcgtctatcattctacaagcgacctgctgagggcaggaacgtggttgtctatgtatagagtagtcagtgatcgggcaatctaatccgacccgaccagtccgcctacgcagagtctcatctacgctcaatgatatgaatggttacatacgtgggcgagcgttatcagagtgagctggtcacagcgaacgcgatgtgtcgggcaagacgaggcgtcctattccgagngtaatccgacgagataatcagaagcaatgcgcgtatcgctacctcatggtangtgcgtactagattcgtgtcggctcgtcgccgtacagcgctctgtggacgtgatgtagactatcgtgctcgaaagacatgcgagtagtgattgactggactggatgtactcgaccgcgagttctgtacatgtagcatatcagagactgcttctggcgcgatatcacgctacgcatcacatacgctatatacagctcgatngagaatagcaanacacactgtgagtatgatactgtaagtagaaagcaatggtgcgcatncttacatctgttatgtcgagtgtatttgtggantgcgcnagcgtgntngctacagcgctgatgttaccttcctgtatcgccncagcgtcgtcgccttcgtctcgcgcgcgagtagatcaagnatatcagcggtcgctcgacgngcggcgtgtctagcgatgacgctgcaagagtattacatatgcatatcgctgagctacactcaagatacgtgaacgtctgangtctgagttactactatactgagatcctcgactgagctactagactgctacgagctctcntaatatcgaacggatgacacctnactatatagcgacaacgaatcgtgactgctatcatgcatgtaccgancatacgagncacgtntcgagctcgtctggtgatatgcngtgaacgtcatacncgagacctaccgtcactaacggaacacctgcactacgagtgcgtacgtatacaacgcactgatgattagagatatcatgagactgcagcgtcatgannccgacgcatatcgttccagtcacatgacgctggttgaaattattctngactgctgcngtacgcaacgtgatgcaattgtgtacgtcgtacgagagaatnatctgnaacttctgttangtatgaacatacgtacgcacgcggccgtgntgcgagatcgcttcgttgcgagtcataccgcggctgtacggatccgtancgacatacgatgatctaggacgtcctggagtcttatcgtcgcatggtcgtataacaacagatccggtgcgtgagcagtacgtgtcgtatcataagacgtagtgagtagtgaccgacggcggtcg

SEQ ID NO: 3021 - DNA, 1572 bp, Glycine max
  misc_feature (1)..(1): n is a, c, g, or t
  misc_feature (152)..(152): n is a, c, g, or t
  misc_feature (267)..(267): n is a, c, g, or t
  misc_feature (367)..(367): n is a, c, g, or t
  misc_feature (565)..(565): n is a, c, g, or t
  misc_feature (594)..(594): n is a, c, g, or t
  misc_feature (598)..(598): n is a, c, g, or t
  misc_feature (705)..(705): n is a, c, g, or t
  misc_feature (830)..(830): n is a, c, g, or t
  misc_feature (931)..(931): n is a, c, g, or t
  misc_feature (962)..(962): n is a, c, g, or t
  misc_feature (985)..(985): n is a, c, g, or t
  misc_feature (1125)..(1126): n is a, c, g, or t
  misc_feature (1129)..(1129): n is a, c, g, or t
  misc_feature (1137)..(1137): n is a, c, g, or t
  misc_feature (1148)..(1148): n is a, c, g, or t
  misc_feature (1171)..(1171): n is a, c, g, or t
  misc_feature (1228)..(1228): n is a, c, g, or t
  misc_feature (1352)..(1352): n is a, c, g, or t
  misc_feature (1357)..(1357): n is a, c, g, or t
  misc_feature (1382)..(1383): n is a, c, g, or t
  misc_feature (1391)..(1393): n is a, c, g, or t
  misc_feature (1400)..(1400): n is a, c, g, or t
  misc_feature (1403)..(1404): n is a, c, g, or t
  misc_feature (1409)..(1409): n is a, c, g, or t
  misc_feature (1449)..(1449): n is a, c, g, or t
  misc_feature (1462)..(1462): n is a, c, g, or t
  misc_feature (1464)..(1464): n is a, c, g, or t
  misc_feature (1477)..(1477): n is a, c, g, or t
  misc_feature (1486)..(1486): n is a, c, g, or t
  misc_feature (1493)..(1493): n is a, c, g, or t
  misc_feature (1504)..(1504): n is a, c, g, or t
  misc_feature (1506)..(1506): n is a, c, g, or t
  misc_feature (1509)..(1510): n is a, c, g, or t
  misc_feature (1512)..(1518): n is a, c, g, or t
  misc_feature (1520)..(1526): n is a, c, g, or t
  misc_feature (1534)..(1535): n is a, c, g, or t
  misc_feature (1553)..(1553): n is a, c, g, or t
  Probeset Number=SeqID_12800
ncagatagaagtaagtgagcgtgaagacgatacgcaccgtgatccagagacactaagatagagtcattatgacatctgcactatatatgtccagacagatcaacatacccatgtaacggtgtccgagtggtatgagtatatgtaagtataanagtgagtcagtagtggtagccattatatgaggtaatatgagagataatagatgatagtgagcaatgctctatgacatcgacgctgaaacgcatacacctgcagaacgtgcagtgnatagagatcatgtcaacgatacacatcatataatctcgccacagtacgttgagtacagcgtctgcgctatcggagcagcttagagaggagaacatgtaanacgagaggatcagagtagagatgtggcaatggcgcgatgtcgagacacatataacacacactcggaatatgcttttacaacactagatatacactgagcagcgcgcagcgcgagatccatagaacgcagcaacgaaatatggcagtcaaagagcacaagagaagagtcgaggcgtgtgtcgaggtattataaagttanaagaataacataatgctgggagagtacgnaatnaagcgaggagtagataacaaatgaatgaagagagatataatgagaagcaagaataagagaggtgatgacacgagtctgcgttgttcgtagtatatgaccaaataacnaatcaacaacacaactgcaacaagcgggtaaggaaatacaactcgatactacagatagtagcaagagcctcgtatgcgcggctctgtactcgcagatactacacacgcaacggaacagtatcacntatgcacgagtaaagaacagtcacaacaccgaccacataatcaagcaaaacatgataggtcaagaatatatagttcttactataactatctctaatatagnagcagagatatagactatgaaaactggcacnagcactcacccaactcaaacatnacatcaatgagtggatgagtatttttattacaagagggtgtggtcctaatttatacttatagagagaaattataagagataagagaaacacgaaacagcatgagaggaattaatgcaataaggatcaaatcaaacaacanncanaacacaanacacacagagncacagtatacgcgccatcatccncactcagtggatgtggtcgtagacatcatgacagaataggacaatctgagcgatcanaactgcgacggagtcaggacgacagtacagtgaaacagtgagttaagagaacaccgcggagaggagagcacaagcgctcgagtcacatccgctattcacaaagagtccactcgccccacatcanacaanaaaagcagagcgaaacaatcaaaannagagaacnnnggtgggncannaaaanacaataagaaaagaggaccacctgccgcgcgtccacgcgntccacacaaatanangaatagatagaangggggagcnatgaagngcaacacgaananaannannnnnnntnnnnnnnaggagagnnagagaaggagcacaaganacgcacacaccaccaccca

SEQ ID NO: 3022 - DNA, 1032 bp, Glycine max
  misc_feature (1)..(1): n is a, c, g, or t
  misc_feature (554)..(554): n is a, c, g, or t
  Peptide Sequence Number=SeqID_6571
  Probeset Number=SeqID_12801
ngggacgtggagggttcagttcgcagcgagtttatgcgggatggggcaggagggaggattgttctctctttcagtttgctcaatgcagaccctcgagattggatatatgattggaattttcgcgaaattgatgagactttgttgcggccagtgattgaggctttaccaacctatagcaaacatcactgttgaaagccaggttttgtaccatacaccaaagtcttcattttctaactgggatgataagcatggcagccacatgtttagaaccgaggatcttcctttcttcgtgaattcaaatgagtggcacttggatacttctgttgcagcaggaggaaggtcaaaagtattgcaactcgtggtgtatataccatctgcaaaggagtgtccacttcaactggagcttccaagtggggagatctctaaaactaacggctttatatctccaatgtggggaggtgtcgttgtctggaatccgcgaagctgtataaaagatttggaaagtagggatccagttagacatacgattccttctcaggaatctccagaagctnttttgaagttctcatggggcagttgcggcaactccttggtctgaagtctgataacctttatgttggtaagtcaggtgcatccattcttctaggcaggggaaagagttttacaaaatgggagtgggattgtggtccacgaaacctatatgcttaaagcttcaagcatttgcatctacccttggaatgcgtttttaagttgtgcccgccatttccccaagatgaatgtcatggattgaagttggaacacggagttggagttggctctttaaacgcgcggaatctcgtggaaaggggtggcgtctgtgggaaatgtatgatgctgccacctgtgtgcatcaagaacgatcgaaaactttagccgagagaatccgttgtgtcgatgcgatcaagtaagggtcgcggtaaacggatttatttgcgaggtggaaccgttatagttgaggccatgctattttcaccgcattgtttgttgtggccg

SEQ ID NO: 3023 - DNA, 1522 bp, Glycine max
  misc_feature (6)..(6): n is a, c, g, or t
  misc_feature (13)..(13): n is a, c, g, or t
  misc_feature (75)..(75): n is a, c, g, or t
  misc_feature (131)..(131): n is a, c, g, or t
  misc_feature (271)..(271): n is a, c, g, or t
  misc_feature (335)..(335): n is a, c, g, or t
  misc_feature (595)..(595): n is a, c, g, or t
  misc_feature (600)..(601): n is a, c, g, or t
  misc_feature (647)..(647): n is a, c, g, or t
  misc_feature (654)..(655): n is a, c, g, or t
  misc_feature (660)..(660): n is a, c, g, or t
  misc_feature (892)..(892): n is a, c, g, or t
  misc_feature (939)..(941): n is a, c, g, or t
  misc_feature (1098)..(1098): n is a, c, g, or t
  misc_feature (1205)..(1205): n is a, c, g, or t
  misc_feature (1207)..(1207): n is a, c, g, or t
  misc_feature (1226)..(1226): n is a, c, g, or t
  misc_feature (1230)..(1230): n is a, c, g, or t
  misc_feature (1406)..(1406): n is a, c, g, or t
  misc_feature (1419)..(1419): n is a, c, g, or t
  misc_feature (1432)..(1432): n is a, c, g, or t
  misc_feature (1462)..(1462): n is a, c, g, or t
  misc_feature (1465)..(1468): n is a, c, g, or t
  misc_feature (1478)..(1480): n is a, c, g, or t
  misc_feature (1485)..(1485): n is a, c, g, or t
  misc_feature (1487)..(1488): n is a, c, g, or t
  misc_feature (1491)..(1493): n is a, c, g, or t
  misc_feature (1516)..(1516): n is a, c, g, or t
  Peptide Sequence Number=SeqID_6572
  Probeset Number=SeqID_12802
ctgagnacgtgtnagatcatgaggctgtgtcacaggcactcagcgcgagtgagagaacgagatcgtagagatagnagcacatgtggacactgctatcatgtcatgtgtatctagcccgacttccatctctncatcgtgcgctgatgagggacagacgggcaatcgccgcagggccgtgtgcacaacccgcatgacagaccacacgccagcgtggtgttatgacatagatatatgtaccagcgctcggttgcatgtgtgatgacactatgcngtgtctgtggcatttgtactatgcgtgcgcgaacgtgtcacgtgttcgctactatagtcgaganttatggcctgagctcagtgagtggtaagaggcgctcgcacaatgcgccctagcgtggcttctgcgcagtaatgagatcgtggtcatgcatgagcagaggctctagtccagtagatgcagattaacggtcacgcgtcatggctgcagcttcggagccgccactacattagtcactatgatctgttctgcgcccagtactatgctcggtacttctttggttggtgctagttgtttttttatttctacatgcacttcacggtnttttnntttttgttttgtttttgtttgtgtctttctctttctcttttttttnttttttnnttttntttttttcctcatttctcaccaccgtcctctcatagacctcaatgacttgcggtgtgcatgtagaaaacaataatattacggttgttgtgtacatgactgttgtgctcgtatttgttttcgctccttgttttcctttactagaagatcataagtacagacaatacacaacaaacacatagcaaagcaaccacatataagcgggcagacaccagagacatgacaaggcacaancagacctccccactcgcccgtccatctctgcgctatggtcggattannncctatctcttaacacttgtgttgtctgccttctaacaccactgcgaggtagactcagtagatgtgtatgctcgcgttgcaaaatataagatccatatctcttcagagcacagggctaacgcaatgaggtatggtagcccataggccgtggaggtggntactctagtatctatattatgttgtgacatcggtagaagaataagtatgtaagtatctggggcgcatctcactctccttacgcttcgatgactagtgttagtggagnanacacaaactcactaactanacantagttagggcgtgtgcggcgtgtcggtgggtgtcatgacgacgacgcaccgcacccaacacacactactatcccgcatggtttctaattcagatttgggcgcggggggtgcgttatacctctcttatatttattatgtctggtgctggtacagcgctctgtgtctcattccgttantatgtagtttgtnggccctttctggngattgatctaaaaaagaggatgggtgtgtnggnnnnagtgtggtgnnncgggnannggnnnggggggggggggcccacaccccnaaccac

SEQ ID NO: 3024 - DNA, 1384 bp, Glycine max
  misc_feature (1384)..(1384): n is a, c, g, or t
  Probeset Number=SeqID_12803
tcagctacgtaggccccccccccatcgcatctacccaacaaccagtttcaactttatcccttctcaaactcattactcagtcccaactctcatcatcatggagactatcaagagcgtgcttggtcttggaaccactgctccccaggagggtcgtgagcccgtgagcggcgtcactggctctggtgttgctggcgagccatacgaccagggaaacgctgaggactctacccttggtggaaaggcgcctcagcacactgctactactaccgatggcactaccacttctgctactgagccttacaccattggtagcggtcttggatcgaacagcaccagcggtgtcacttcttccgacggagtcactcctaacgcggcctcggccacttcttctagcggcccagctgtcgaccctacgtccagcaacactacttccggccctcactcctcggaccttgccaacaaggccgatcctcgcgttgactccgacaacgatagaaccaccggcgttggctcaaccacatctactaccagcggtcctcactcgtcagatgccgcaaacaaggtcgatccccgtgtcgactccgacaactccaagaccgactcgactggtccaattggaggcagctcatggatgagcactgttctgccacacagagaaggcaacaacacaacatcgaacacaggtgtttctgactctactcctgctgtcactggcacttcttccgcagctgcaacaagctctgttccctccagctccaccaacaccaccaccgatacccccgtcggcagcaccgtgcccagcgcaaccgagccttcccactctcttaccggcagccgtgaccccatcgccccatctaagcccgaccacaccaactcccctctcaagcccgccgagaagggcggttctcacggtgtcaacccagacgccatccctctcgccggcggcaagaagattggcgaggacgcgtacaccgagcgcaagagcttgcaagtcgactccatcgacgccggcctgcctgccaccacaagcagcaacaccgcgcgcaacgtcggcactgctgaggccactggcaggcccagcacgacttctgagcacgagaagtcgagcgttatttctggtggctcgggatcggaccacaagaagacgagcgtcacttctggcggttcggggtcagagcataaggagaagaagggtcttgtggagaagatcaaggagaaggtgcacatccacaagcacgacaagtgagggtttctgctgttgagccctgatgtgattatgagtttacgttctagcgagcgcttggttcagctgagtcctgtatttaatgctttcaacttgcaacaccgtatcatgtgatgtgacaccgaaaaaaaaaaaaaaaan

SEQ ID NO: 3025 - DNA, 1645 bp, Glycine max
  misc_feature (8)..(8): n is a, c, g, or t
  misc_feature (24)..(24): n is a, c, g, or t
  misc_feature (28)..(28): n is a, c, g, or t
  misc_feature (33)..(34): n is a, c, g, or t
  misc_feature (40)..(40): n is a, c, g, or t
  misc_feature (42)..(42): n is a, c, g, or t
  misc_feature (82)..(82): n is a, c, g, or t
  misc_feature (84)..(84): n is a, c, g, or t
  misc_feature (87)..(92): n is a, c, g, or t
  misc_feature (94)..(94): n is a, c, g, or t
  misc_feature (96)..(96): n is a, c, g, or t
  misc_feature (99)..(99): n is a, c, g, or t
  misc_feature (101)..(103): n is a, c, g, or t
  misc_feature (106)..(106): n is a, c, g, or t
  misc_feature (166)..(166): n is a, c, g, or t
  misc_feature (177)..(177): n is a, c, g, or t
  misc_feature (182)..(182): n is a, c, g, or t
  misc_feature (234)..(234): n is a, c, g, or t
  misc_feature (270)..(270): n is a, c, g, or t
  misc_feature (283)..(284): n is a, c, g, or t
  misc_feature (309)..(309): n is a, c, g, or t
  misc_feature (325)..(325): n is a, c, g, or t
  misc_feature (331)..(331): n is a, c, g, or t
  misc_feature (382)..(382): n is a, c, g, or t
  misc_feature (438)..(438): n is a, c, g, or t
  misc_feature (448)..(448): n is a, c, g, or t
  misc_feature (450)..(451): n is a, c, g, or t
  misc_feature (504)..(504): n is a, c, g, or t
  misc_feature (575)..(575): n is a, c, g, or t
  misc_feature (595)..(595): n is a, c, g, or t
  misc_feature (755)..(755): n is a, c, g, or t
  misc_feature (900)..(900): n is a, c, g, or t
  misc_feature (903)..(903): n is a, c, g, or t
  misc_feature (905)..(905): n is a, c, g, or t
  misc_feature (908)..(909): n is a, c, g, or t
  misc_feature (933)..(933): n is a, c, g, or t
  misc_feature (944)..(944): n is a, c, g, or t
  misc_feature (961)..(961): n is a, c, g, or t
  misc_feature (974)..(974): n is a, c, g, or t
  misc_feature (1036)..(1036): n is a, c, g, or t
  misc_feature (1042)..(1042): n is a, c, g, or t
  misc_feature (1049)..(1049): n is a, c, g, or t
  misc_feature (1099)..(1099): n is a, c, g, or t
  misc_feature (1106)..(1106): n is a, c, g, or t
  misc_feature (1143)..(1143): n is a, c, g, or t
  misc_feature (1193)..(1193): n is a, c, g, or t
  misc_feature (1224)..(1224): n is a, c, g, or t
  misc_feature (1268)..(1268): n is a, c, g, or t
  misc_feature (1368)..(1368): n is a, c, g, or t
  misc_feature (1509)..(1509): n is a, c, g, or t
  misc_feature (1511)..(1511): n is a, c, g, or t
  Peptide Sequence Number=SeqID_6573
  Probeset Number=SeqID_12804
tttttttntttccctgcgggtcgntgtngcttnngtctcntnctgtgctctcacagctgtctgactatccttctcctctaananatnnnnnngnantantnnnagnataagagaggtgtagtggtgtgtgctgtgtgcttgcgagtcgtggtgtgagggagagggncgagggctacnctcantacacaatgtaggtctgagtagtgcactatgctccgtggcgctgtgccgggnggcggacatgagagagagagagactatgacgctatntatgtatactcgnntctctgtgatgagtgagcacatacnatacactatgaactanactatncatatcatactagatcgatgtatgggagatgagcatatatatattagatgngagcaggatgtagacgtgtacgagaggactgtgtccctagacagtgaggagacgcnacgctatcancnnactcacgatgtcgactatactctgtgaccgctctcgctgtgttcttcgtgctntatgttaatatatagtgtagaaacactagagtatcgtatccaatatattcatatatactatcgtgtgcttngctcgctgtctcgtcggcgncactcactgctatgagagttgtatctactcgacttcgtgttatatgcactaatatagagtccacgattactaactacatgaacagatgagtccgaactcgtgctatcagtgtctatacatatcatggatactaattgctgtcgttctgtgttagggcggntgtcctgctgtcagccatggtgtgatagcacgcactacatacactcgacctgctcgctcgctgtagtatagtcgtttagacgttaatacacgttgtcgcgtttagtgtgattctgaagtgtcgagtcagacgtagatatgagtgntgngngtnntagaagtagcttatatcatataanacgacgcgatnacatataaatagaaaanaacaaatagaatngattatgttcgggtaagcacaggacactccttatcaccgctcacactgtacagctgagttgnggtatnctctctnaacggaggtgagatgtggtggatgtgcgctctcgaccctctccagtcccnactcttnatgtgcgatagatcatcatcactgccgatgagcagangacgagaggtacgttcgctcgtcagtatggttctcgcgccatgctcgtancacacacgcgtagcgcttaggcacaacattnatgacgggttcgtggcctcgtctcatcgaacctctatatatgtnagtccactcgtatgtgctcagcgtgagctattatgttggtgttattatcctggtctccacagaacactgcgactcggctacatgcgattcgtggactgtngctatgttcgtcgtgttggtgttgtggtatctatagagtgcagatatcgcgtaatatggatagagtatagtagggtgatgagagaatatgcgtgacgcatgtctcgtgctctctatacgcttagttctgtgctagtcgtantngtgatgtctgatgtgcatagtatcgtgtacgtacgtgcagtcgtgtcagactggcgcgtggccgggctcaacgtgatgtgtggatgcggatatctccgaggtttgtgtctacggatagtcttgcgaggagtacg

SEQ ID NO: 3026 - DNA, 672 bp, Glycine max
  Probeset Number=SeqID_12805
atcgcttctcttctcctccatagttctccgtcgaccgtcgtccgagcagacagaaaaaaaccctaaaaatggatgggcatgattctgaggaccctactaagcagagcactgctgatatgactgcttttgtccaaaatcttctgcagcagatgcaatccaggttccagacaatgtccgactccatcatcacaaagatcgatgacatgggaggcagaatcaatgagctggagcaaagcatcaatgatctaagagccgagatgggagttgaaggcactcctcctgctgcctccaaatctggcgatgaacccaaaacaccccctagttccacttgaacactaagtgtcacatgatcttcctgcttatgtatgcatctgcagaaacattctcaagtttgttcaggagcagtgttattacttttagatttcagtttcaaaaggcatgaatatgttgttgagttcatcagattgattgatggaggatgtgggtacattacattattatgcacttatgttgacttgctttctatgttggttttgagataactgagaaagaccagtgcttgatggatctatactccgcttggttatacattttattctctatagtccgaatgtatagcaattacaactttgtgtgtaccctaacaatctatcattatcgatttttatcagt

SEQ ID NO: 3027 - DNA, 2441 bp, Glycine max
  misc_feature (13)..(13): n is a, c, g, or t
  misc_feature (22)..(22): n is a, c, g, or t
  misc_feature (65)..(65): n is a, c, g, or t
  misc_feature (160)..(160): n is a, c, g, or t
  misc_feature (167)..(167): n is a, c, g, or t
  misc_feature (179)..(179): n is a, c, g, or t
  misc_feature (184)..(184): n is a, c, g, or t
  misc_feature (197)..(197): n is a, c, g, or t
  misc_feature (213)..(213): n is a, c, g, or t
  misc_feature (232)..(232): n is a, c, g, or t
  misc_feature (235)..(235): n is a, c, g, or t
  misc_feature (239)..(239): n is a, c, g, or t
  misc_feature (241)..(241): n is a, c, g, or t
  misc_feature (262)..(264): n is a, c, g, or t
  misc_feature (276)..(276): n is a, c, g, or t
  misc_feature (281)..(281): n is a, c, g, or t
  misc_feature (292)..(292): n is a, c, g, or t
  misc_feature (312)..(312): n is a, c, g, or t
  misc_feature (314)..(314): n is a, c, g, or t
  misc_feature (319)..(319): n is a, c, g, or t
  misc_feature (321)..(321): n is a, c, g, or t
  misc_feature (335)..(335): n is a, c, g, or t
  misc_feature (337)..(337): n is a, c, g, or t
  misc_feature (339)..(339): n is a, c, g, or t
  misc_feature (343)..(343): n is a, c, g, or t
  misc_feature (345)..(345): n is a, c, g, or t
  misc_feature (375)..(375): n is a, c, g, or t
  misc_feature (389)..(389): n is a, c, g, or t
  misc_feature (402)..(402): n is a, c, g, or t
  misc_feature (415)..(415): n is a, c, g, or t
  misc_feature (418)..(418): n is a, c, g, or t
  misc_feature (469)..(469): n is a, c, g, or t
  misc_feature (475)..(475): n is a, c, g, or t
  misc_feature (500)..(500): n is a, c, g, or t
  misc_feature (509)..(509): n is a, c, g, or t
  misc_feature (512)..(512): n is a, c, g, or t
  misc_feature (521)..(521): n is a, c, g, or t
  misc_feature (546)..(546): n is a, c, g, or t
  misc_feature (549)..(549): n is a, c, g, or t
  misc_feature (552)..(552): n is a, c, g, or t
  misc_feature (571)..(571): n is a, c, g, or t
  misc_feature (576)..(576): n is a, c, g, or t
  misc_feature (580)..(580): n is a, c, g, or t
  misc_feature (605)..(605): n is a, c, g, or t
  misc_feature (705)..(705): n is a, c, g, or t
  misc_feature (711)..(711): n is a, c, g, or t
  misc_feature (732)..(732): n is a, c, g, or t
  misc_feature (747)..(747): n is a, c, g, or t
  misc_feature (794)..(794): n is a, c, g, or t
  misc_feature (799)..(800): n is a, c, g, or t
  misc_feature (810)..(810): n is a, c, g, or t
  misc_feature (863)..(863): n is a, c, g, or t
  misc_feature (869)..(869): n is a, c, g, or t
  misc_feature (877)..(877): n is a, c, g, or t
  misc_feature (879)..(879): n is a, c, g, or t
  misc_feature (888)..(888): n is a, c, g, or t
  misc_feature (984)..(984): n is a, c, g, or t
  misc_feature (1047)..(1047): n is a, c, g, or t
  misc_feature (1101)..(1101): n is a, c, g, or t
  misc_feature (1157)..(1157): n is a, c, g, or t
  misc_feature (1161)..(1161): n is a, c, g, or t
  misc_feature (1185)..(1185): n is a, c, g, or t
  misc_feature (1203)..(1203): n is a, c, g, or t
  misc_feature (1355)..(1355): n is a, c, g, or t
  misc_feature (1361)..(1361): n is a, c, g, or t
  misc_feature (1384)..(1384): n is a, c, g, or t
  misc_feature (1399)..(1399): n is a, c, g, or t
  misc_feature (1473)..(1473): n is a, c, g, or t
  misc_feature (1480)..(1480): n is a, c, g, or t
  misc_feature (1500)..(1500): n is a, c, g, or t
  misc_feature (1541)..(1541): n is a, c, g, or t
  misc_feature (1551)..(1551): n is a, c, g, or t
  misc_feature (1559)..(1559): n is a, c, g, or t
  misc_feature (1565)..(1565): n is a, c, g, or t
  misc_feature (1569)..(1569): n is a, c, g, or t
  misc_feature (1572)..(1572): n is a, c, g, or t
  misc_feature (1618)..(1618): n is a, c, g, or t
  misc_feature (1640)..(1640): n is a, c, g, or t
  misc_feature (1649)..(1649): n is a, c, g, or t
  misc_feature (1668)..(1668): n is a, c, g, or t
  misc_feature (1681)..(1681): n is a, c, g, or t
  misc_feature (1686)..(1686): n is a, c, g, or t
  misc_feature (1712)..(1712): n is a, c, g, or t
  misc_feature (1745)..(1745): n is a, c, g, or t
  misc_feature (1764)..(1764): n is a, c, g, or t
  misc_feature (1766)..(1766): n is a, c, g, or t
  misc_feature (1779)..(1779): n is a, c, g, or t
  misc_feature (1817)..(1817): n is a, c, g, or t
  misc_feature (1837)..(1837): n is a, c, g, or t
  misc_feature (1844)..(1844): n is a, c, g, or t
  misc_feature (1846)..(1846): n is a, c, g, or t
  misc_feature (1873)..(1873): n is a, c, g, or t
  misc_feature (1878)..(1878): n is a, c, g, or t
  misc_feature (1884)..(1884): n is a, c, g, or t
  misc_feature (1891)..(1891): n is a, c, g, or t
  misc_feature (1909)..(1909): n is a, c, g, or t
  misc_feature (1941)..(1941): n is a, c, g, or t
  misc_feature (1950)..(1950): n is a, c, g, or t
  misc_feature (1953)..(1953): n is a, c, g, or t
  misc_feature (1996)..(1996): n is a, c, g, or t
  misc_feature (2014)..(2015): n is a, c, g, or t
  misc_feature (2053)..(2053): n is a, c, g, or t
  misc_feature (2056)..(2056): n is a, c, g, or t
  misc_feature (2089)..(2089): n is a, c, g, or t
  misc_feature (2136)..(2136): n is a, c, g, or t
  misc_feature (2161)..(2161): n is a, c, g, or t
  misc_feature (2192)..(2192): n is a, c, g, or t
  misc_feature (2207)..(2207): n is a, c, g, or t
  misc_feature (2225)..(2225): n is a, c, g, or t
  misc_feature (2252)..(2252): n is a, c, g, or t
  misc_feature (2254)..(2254): n is a, c, g, or t
  misc_feature (2258)..(2258): n is a, c, g, or t
  misc_feature (2261)..(2261): n is a, c, g, or t
  misc_feature (2264)..(2264): n is a, c, g, or t
  misc_feature (2281)..(2281): n is a, c, g, or t
  misc_feature (2290)..(2291): n is a, c, g, or t
  misc_feature (2293)..(2293): n is a, c, g, or t
  misc_feature (2315)..(2315): n is a, c, g, or t
  misc_feature (2355)..(2356): n is a, c, g, or t
  misc_feature (2365)..(2365): n is a, c, g, or t
  misc_feature (2370)..(2370): n is a, c, g, or t
  misc_feature (2384)..(2384): n is a, c, g, or t
  misc_feature (2400)..(2402): n is a, c, g, or t
  misc_feature (2407)..(2407): n is a, c, g, or t
  misc_feature (2409)..(2409): n is a, c, g, or t
  misc_feature (2413)..(2413): n is a, c, g, or t
  misc_feature (2425)..(2425): n is a, c, g, or t
  Peptide Sequence Number=SeqID_6574
  Probeset Number=SeqID_12806
cggagcacgacgngtcgtcganctctaacgctgctccgtcatgcatgactaccgcgctcgagcancatcgtcatcactacgcgtgcgacgatgcgtccgagtactgagtagtccagatcagcgcgctgcgtacgctctggactgctcacgtcgtataccngtgcgtncatactactcantactncatctacggcatnatctgtgaagggtcangccaacgcgatcgatgcanttnctcncnacagcactgcattcgcactannncacgcatgctgnactancactgtaatgnctgtatctgagtcgacgacngncacgncntcgctcattcctgntntntcangncgcgagtagaccatacacctatcacagcgnctcgatcagtacancgatgatacggtngtgcgctgacgcntgnacgagtcagcacagagcgcagtgatagctcggactctacgctaccagcgangacgancacgttatagctcatatcatccatnacagctcgnagnatagtcagnctaatgacgacatgtagacactgcnatntgngtagtatcagatatgagtnatatngcanagtacgatgatactccagatcaggnagaggtcgatacctcatatcattcgtacatcttgcatgtatgatactactcgtaggtcatgcatacgcacttgatatccacgcagagtgtcagtatactnatgagntgtattgcatacgcacgacgngagtagcacatgagnatcggtatgtactcagcagtctacatacgtcgaatcagactgggatncacanntcgtgatcangtcgtagtctctctcgcgtattgcatcaatcgagagacgagtgtagcatatcntgagtntatagatngnagcacagancactaccacactagatacgtaagcatatacgacattagagtgcatgagagatatcgatagtatcacgtggatcagtgagtgatcaactagatatangtagacttggatagagagatgacatgttcagattagctacgtgtcagtgatgtcgtcgtcganctgtcgctcgtgtattcgtcttgtgactacggatacgtctatcttcagtccgtngcggactcgtagtgaatgaacgagagacgccagagatgatgcctctcagacagcanatgntcgatgcacacgacagcgctcagncgctcacaggtggcatancgtcagaatgaggcgcgtgcagcaggcgagtaagatacacatcaagcattagtctacggcagctgactgagtcataatacgcagacacgttatcatgacgcaagagtagcgatcagatatgactacacaatcacgtatactacgcagcgtcnctctangttacagactgatgcatgttagnggcagtagtatatgnagcagagatataagagactgacgatgtgctatctacataggcatcacgcacgctattctcccctctatatacancgtatcnacgatcatatcattcatttnatgatactgttactgtgtgcatgcgagtatatccgatgtangtgtctcacnatcagcancacatnatcnatntcagacagacatggcagactctcgtcgcgtctgatagtctcattcnttccatcagttcgttgatatangtgactatncgtcgtgtgtcgtcgtgantagataggatcangcgtnatcatcgacaccaatcgacagacgtnagtgtgcgctgtcggcagcacgcagacgtgtcngcggcacgatgtcaccagnanacgatcgatggancgcgtcaccgcctgactgcatagtcatagtcacgttgntatcagcgatgtgtggatgntctatgntngtagtagtgctgctatagtgacgtctngacancgcatncgaaccnagtcacacatatcgatcncgccatgagagacgtaagcaccgtgcagaacntgggcgtantanttggggagtcagtcacaactatagacacagcttcatagctagngcatgagtcgacgatatnntgtatcgatgatcgagatcactaggagcagtcgtatgnatnatcacatcagattacggtctactgcagtcgtgnagcagcatacaagcagtgaacgctactacgccgatacgcgcgatagncacgacatcgagcagacagacggcnaaagtgagtgtagcacgctgtagacgtactnagtaaagtaggtagntatgagtcgcacatcagnacgtacgcatgctggatgagtacgacngnacanganagncagaagcagtagagacntctatctanntnaatattaagtatactatctacnacattcaatagctgtcagtgtagcagtcagctgcagctanncgtcgtgangcagnagatcagatagggngtagctggagaggtgnnngaggngnggantgggcggcaganagtgggtacagggact

SEQ ID NO: 3028 - DNA, 1701 bp, Glycine max
  misc_feature (1)..(1): n is a, c, g, or t
  misc_feature (30)..(30): n is a, c, g, or t
  misc_feature (34)..(34): n is a, c, g, or t
  misc_feature (49)..(49): n is a, c, g, or t
  misc_feature (53)..(53): n is a, c, g, or t
  misc_feature (75)..(75): n is a, c, g, or t
  misc_feature (81)..(81): n is a, c, g, or t
  misc_feature (127)..(127): n is a, c, g, or t
  misc_feature (161)..(161): n is a, c, g, or t
  misc_feature (219)..(219): n is a, c, g, or t
  misc_feature (431)..(431): n is a, c, g, or t
  misc_feature (454)..(454): n is a, c, g, or t
  misc_feature (457)..(457): n is a, c, g, or t
  misc_feature (534)..(534): n is a, c, g, or t
  misc_feature (617)..(617): n is a, c, g, or t
  misc_feature (623)..(623): n is a, c, g, or t
  misc_feature (658)..(658): n is a, c, g, or t
  misc_feature (735)..(735): n is a, c, g, or t
  misc_feature (750)..(750): n is a, c, g, or t
  misc_feature (893)..(893): n is a, c, g, or t
  misc_feature (1009)..(1009): n is a, c, g, or t
  misc_feature (1101)..(1101): n is a, c, g, or t
  misc_feature (1471)..(1471): n is a, c, g, or t
  misc_feature (1553)..(1553): n is a, c, g, or t
  misc_feature (1688)..(1688): n is a, c, g, or t
  Probeset Number=SeqID_12807
ncgtcgcgctagatcgtcagtagtttactntctntagcgtcacttgatntacntgaagaagtatgttgtgcggcngagctnggtatcttcgtgtacatgatatcctgcgtcgagtgcgtgcgcgtcngtgatgacatatatattaatatgatctatacggntcagcgcgatcagtcagagtagcttcctctaaatgactatgtgctcatcagtgctcgnctcatctcgtcacatcatctgtctggtgagcagagacgcaatgacgagcgttgagtatagatagcgtcgtgcgctcagtcacatggcgcgatcgtcttactctatagtatcgattgtctcgcgacatatctatgtccgtcgcgcggacgtgcgctttcacaacaaatgtaaatatcattacttctcttctcttatgcctcatgctcatctcnttcctctaagttcatcatcctcncantcagtgaccgtatcgctctcgtttccgtcccgcatgtcaatatatacatacatatatagcgtgcgcgccgcgtcgtngaaatatacgtcagctcgtgctatgcacgaatgcatgagtcacaaacagacgattgacgcgcaccgtcgctagtcgtcgtcgnttctcntgatcaccgtcgtccgccgtgtatgactcactctntctcactctgtatatagacacgggtggttgtgtcgtctcgtgtgtgtgtataccatgcctcgtctcactcatcactncgcagctcgtcgcgncatattactaacataaaaagatcgcgtcgacaccacagctacctacttctggtcgcgcctgtcgcatacatcgcgacatgcgtgtcgtgccatgtactctatcatccatcacactactcatatactagtctgcgcggtagatntaaacggggtgtggcgaagcataggtgtacgcgctgctccgtactccatacttatatacactcgcgctacatattagactccgcgcgcgcccgatgacgcacatcgatatcgctgncttcgtcactctctacaatactaataaatagataatattccgtcgggccagagtataatgagaacactcgcgcatcatcagtaatatctatntctcatcatatacacgctcctgccagagcgcgggctacatacctggcggcgatggacttactgagcgatgtcgcactgtcctcctctcggctgcgcgcatcgccttcatctgtcctacaacacccgcgcgctactacctcgccgtaataatgacgacactcgtcgatctagtatatatacagtcgctatagcttcctcacctgcagcacatcctcgatatgctgtaccacaatcaatagtagatacacgcgttgtggtcatcacgtgctgcaacttctaaaataataatatgtctccgctcccgcgctgcgcgggtagtaggcagaagagagcgaaccacgtcgacattattacgggggggggcagaagnttgtctgtgattgtctagtcattaatgcgcgttccgtgtgtgtattaagttcgcttctctcgcgtggcggaaaaaatccctntttgtcgcgcgcggcgtcctatcttttggtatccaatcttcgtgtgttgcgcgccgctgtcctctcctcgcgactattctatcgcactgcctttgatgacagcgaggcacacaattagcatacacaatagagtanctacgacgtcaca

SEQ ID NO: 3029 - DNA, 501 bp, Glycine max
  Peptide Sequence Number=SeqID_6575
  Probeset Number=SeqID_12808
atatataattgtgttgaaaaaaaaatcattttttcttgactttcctcagccccctaactctcctccctttcctatttttctttctatttccttkggcaactacctctaccaactcgcccctccccttaagcctctccttcctccctcttctccattgcactccctacccttactttccttctatcgtgcctcccctctcctccctccacccctcattccccttccaccgaaacccacttagggacacgatctatctctccctctctctcaaacccgtcgcgttcaaaggcaccaccgccgccaatgcctctgcggtggcctccgacagcatgttcctggcggcaacattggaacccagatctgccttcaaaatgtttcaagaacacaaccgaaaatatgaacatggatcaaatcttagatctgtaatttttctttttttttttcttttttttttttattggtcatgatttttgagacaagctattggtgttgttgatgttg

SEQ ID NO: 3030 - DNA, 1402 bp, Glycine max
  misc_feature (61)..(61): n is a, c, g, or t
  misc_feature (76)..(76): n is a, c, g, or t
  misc_feature (173)..(173): n is a, c, g, or t
  misc_feature (183)..(184): n is a, c, g, or t
  misc_feature (242)..(242): n is a, c, g, or t
  misc_feature (387)..(387): n is a, c, g, or t
  misc_feature (648)..(648): n is a, c, g, or t
  misc_feature (953)..(953): n is a, c, g, or t
  misc_feature (1156)..(1156): n is a, c, g, or t
  misc_feature (1215)..(1215): n is a, c, g, or t
  misc_feature (1248)..(1248): n is a, c, g, or t
  misc_feature (1342)..(1342): n is a, c, g, or t
  misc_feature (1369)..(1369): n is a, c, g, or t
  misc_feature (1383)..(1383): n is a, c, g, or t
  Probeset Number=SeqID_12809
aacgggtataccgtgagcgtgtacgacgcggctatcaaagatatggcagcgtaagagggtngtgggtggacactanatagcgaggtggttggagcgtggcgtgcacgacacgagcagcacgcgacgggagagcgtatactcgagtaagacctcgactcgccactcatcgagangggtgacgannggtgcgctcacacgcgcgcagtaggagtcgcggtagtgatgcgtgacgagggcgagangtgagcggagaggcggagctgatgcgaacgagtcgcaggcagacggtggtggcaggtggagtaagagctgtgtgcgatagtatagccgcgggtcgtcctgcataggatgtccgaagagttcgatctgagaagatgtgtaaggttntgactcgacgcacgtacctaagacagagcagtagaggggattatggcgctgaccgagagtatgtatggagacgaagttggtgtataagactgagcccgagagacgtgggtatgtcgcggtatttcactcgtgagagcagaggatacgttaagcaggcagagccgtacggagcgatgacaactacaaacagaacgggtgcgtgagattgaatagagtggggtgtaggctgtatttgacgtacacgggtagatgcagcagtangaagagtaagatgagtagtggcggcacgcctgcggcagtgcaggcgtccaggagaggagtcagtccgcgtgtatgcgactaaagcctaatgtatctacgtgttataccacaaacattcagctttttaaatgtgtgaggtgtgaagatcggccgcgacaaatagattgtggttcggcgccgcacgcctctgggcgcgcgcgcggtcgggtctaattcagttgttattatgagggaatgagtggcgcgagcgagggcagtaaagtgcacgcagtgtaatttaacgacgggcgggggggggagaggangagtagagtagtaggtcgacggtccttatctcctttgtagagaagagggatgtagtatgtgtctgtaggaaggagggcgtagtgcggggtgtcgtagtgttgtgtctcttgtatagagatgggcggcccttggtttatttcttgttggatatttgtatcggagtaattaatccaaaggtgggcgagatcagggagtgtggganatattaattactggaccatgggcgttctcagaggagcgacaggatgattattttgaatnttgaatataaaatatagttgttcaacttatggntgtctgtgttacgacagcacacagacagcgacacaatggcgagagggagggtgggtggtgtgagcggcccgctccgggcccgtgccgctcggtngccctggagttagacatcatggggttntgtcgggttttatncacttgagaatagggaggg

SEQ ID NO: 3031 - DNA, 1525 bp, Glycine max
  misc_feature (20)..(20): n is a, c, g, or t
  misc_feature (22)..(22): n is a, c, g, or t
  misc_feature (38)..(38): n is a, c, g, or t
  misc_feature (46)..(46): n is a, c, g, or t
  misc_feature (51)..(51): n is a, c, g, or t
  misc_feature (88)..(88): n is a, c, g, or t
  misc_feature (223)..(223): n is a, c, g, or t
  misc_feature (229)..(229): n is a, c, g, or t
  misc_feature (258)..(258): n is a, c, g, or t
  misc_feature (262)..(262): n is a, c, g, or t
  misc_feature (426)..(426): n is a, c, g, or t
  misc_feature (432)..(432): n is a, c, g, or t
  misc_feature (452)..(452): n is a, c, g, or t
  misc_feature (557)..(557): n is a, c, g, or t
  misc_feature (590)..(590): n is a, c, g, or t
  misc_feature (594)..(594): n is a, c, g, or t
  misc_feature (736)..(736): n is a, c, g, or t
  misc_feature (971)..(971): n is a, c, g, or t
  misc_feature (1021)..(1021): n is a, c, g, or t
  misc_feature (1098)..(1098): n is a, c, g, or t
  misc_feature (1136)..(1136): n is a, c, g, or t
  misc_feature (1248)..(1248): n is a, c, g, or t
  misc_feature (1250)..(1250): n is a, c, g, or t
  misc_feature (1279)..(1279): n is a, c, g, or t
  misc_feature (1343)..(1343): n is a, c, g, or t
  misc_feature (1426)..(1426): n is a, c, g, or t
  misc_feature (1433)..(1433): n is a, c, g, or t
  misc_feature (1440)..(1440): n is a, c, g, or t
  misc_feature (1455)..(1455): n is a, c, g, or t
  misc_feature (1512)..(1512): n is a, c, g, or t
  Peptide Sequence Number=SeqID_6576
  Probeset Number=SeqID_12810
taaaaaaaaaaaaataatananaggtaggaggatgaantagtatanttganaatatcacaaaaactaatatattaacacatatactantgttatatatagacaatattcctcccccccccccgcaccacgcgcgcccgtacaatggcgcgtggagtatagcgtccatatgctagtataggaatatatataaattgtatattgtaggagtggatgagatggctntgacgntaactaattacacaggagcaggacaagcngtgnatatgatagagtagatatgcactagtattgtatcgtggtatgaccattttgtgacggtcgtagcgtgtgtatagagctcgcatccacgactactgtattagttgaaatgcagaagagataataatcacttcgtcgttcatcatacacaggaaagctaagacganattaangatcaataactcatactccntctaatgttcttgcccctccctctctgtgattgcgccgcggtgcatcgtttatctggacaatcgatatatgaggcatctggatgctaaatcgtcccgcctgcttntcttaaatttgtttacatctcatcgtctctgtncttntcctcgtgtgtacagtgttattcacgcgtcgagcggcctctgtatgatggcagctcggtatctgttgttgtggtgatctcgtgtcaagatacatccataatctaaataaagactctcccctctcactctctcttccttctancacacatccattatgaacatcatatacacatatcgcacttactctacacactcgtagcatcgtaacaccgccgatactaaattagaggcagatctacatacaatcgtattcatatctatattatcactatcagataaacatgctaggcgatacgataatgagagtctatctaatagtggtgtggacgatgaggtgggatgtgagtatgatgacgtatagagagataatgagtccnatcagaaggtggaagatcattacataataatacagtagacaacgaatatnagcaatcagtaacagaccactacacactctcacccacgtataagatcacaagcacagagctacacaatatcacacgntaaaatagattgctacgccccaaatacatagtactatnacgcatcaatactctagctctcttatgactctcgattatagttgcgagcgtatagataacataaacacataaatagatgacatactcacataccatatataatcacggtgantncgaatactgtacagactacatagtgatangagatatccagatctcataaatatgttatagtgtacacatggtcgtacacagtatagctgacangtagcaaacacatagacaccacatactaataactagatcacgctcatacgtaaagcgtcgacaagagcgctataatagatatncatctanacactcngacagatctcatcgnctgcgtcaacgaataaacacaaacatctcacatcagcaccgactacatactatctcncacctatctcacg

SEQ ID NO: 3032 - DNA, 1865 bp, Glycine max
  misc_feature (44)..(44): n is a, c, g, or t
  misc_feature (48)..(48): n is a, c, g, or t
  misc_feature (62)..(62): n is a, c, g, or t
  misc_feature (65)..(65): n is a, c, g, or t
  misc_feature (86)..(86): n is a, c, g, or t
  misc_feature (90)..(90): n is a, c, g, or t
  misc_feature (113)..(113): n is a, c, g, or t
  misc_feature (118)..(119): n is a, c, g, or t
  misc_feature (124)..(124): n is a, c, g, or t
  misc_feature (131)..(131): n is a, c, g, or t
  misc_feature (151)..(151): n is a, c, g, or t
  misc_feature (156)..(156): n is a, c, g, or t
  misc_feature (171)..(171): n is a, c, g, or t
  misc_feature (180)..(180): n is a, c, g, or t
  misc_feature (247)..(247): n is a, c, g, or t
  misc_feature (255)..(255): n is a, c, g, or t
  misc_feature (257)..(257): n is a, c, g, or t
  misc_feature (364)..(364): n is a, c, g, or t
  misc_feature (519)..(519): n is a, c, g, or t
  misc_feature (552)..(552): n is a, c, g, or t
  misc_feature (571)..(571): n is a, c, g, or t
  misc_feature (702)..(702): n is a, c, g, or t
  misc_feature (706)..(706): n is a, c, g, or t
  misc_feature (724)..(724): n is a, c, g, or t
  misc_feature (726)..(726): n is a, c, g, or t
  misc_feature (748)..(748): n is a, c, g, or t
  misc_feature (1006)..(1006): n is a, c, g, or t
  misc_feature (1130)..(1130): n is a, c, g, or t
  misc_feature (1269)..(1269): n is a, c, g, or t
  misc_feature (1354)..(1354): n is a, c, g, or t
  misc_feature (1366)..(1366): n is a, c, g, or t
  misc_feature (1376)..(1376): n is a, c, g, or t
  misc_feature (1381)..(1381): n is a, c, g, or t
  misc_feature (1409)..(1410): n is a, c, g, or t
  misc_feature (1418)..(1418): n is a, c, g, or t
  misc_feature (1449)..(1449): n is a, c, g, or t
  misc_feature (1466)..(1466): n is a, c, g, or t
  misc_feature (1523)..(1523): n is a, c, g, or t
  misc_feature (1599)..(1600): n is a, c, g, or t
  misc_feature (1617)..(1617): n is a, c, g, or t
  misc_feature (1620)..(1620): n is a, c, g, or t
  misc_feature (1638)..(1638): n is a, c, g, or t
  misc_feature (1650)..(1650): n is a, c, g, or t
  misc_feature (1685)..(1685): n is a, c, g, or t
  misc_feature (1688)..(1688): n is a, c, g, or t
  misc_feature (1691)..(1691): n is a, c, g, or t
  misc_feature (1693)..(1693): n is a, c, g, or t
  misc_feature (1717)..(1717): n is a, c, g, or t
  misc_feature (1736)..(1736): n is a, c, g, or t
  misc_feature (1753)..(1753): n is a, c, g, or t
  misc_feature (1778)..(1778): n is a, c, g, or t
  misc_feature (1785)..(1785): n is a, c, g, or t
  misc_feature (1794)..(1794): n is a, c, g, or t
  misc_feature (1805)..(1805): n is a, c, g, or t
  misc_feature (1819)..(1819): n is a, c, g, or t
  misc_feature (1823)..(1824): n is a, c, g, or t
  misc_feature (1841)..(1841): n is a, c, g, or t
  Probeset Number=SeqID_12811
gagaaatttgggatggaacacggcgggcccccccgcgcgtccgntagnatgcgaacgcgggnaanccgaacttagaggatattttnattntttcgtcctttattccttcacantcgcnntcctnaacactnacgccctcctctcattcacnccganctattgcgcgcaccntatagagcntacgtgctacttcactcacgtgcgcttctacgtgtcgaacacaagagtgtatagacatagactcatncgaatacncncagttaccgtaatgctcgcggcctagtccctggctatcgtcctctcgtctcatgatctgtcattactccgtcgcgagggttctttgtcgtcatatcacttatgagcnattagtcgacgagcgatatcacaatcgcgcatacgtccagcactgcgaccgccgctcccgacctaggcatcaactctagatacctataccctaccctctgatattgtgttactgcacgagagtcgtccgccgccccgacaactcgcgtggcttgnacctgttgccggctctaactattctgcagagcncccgtgacgcttgcgtcgntgtctgtgcggctccgcagacttgagaaccgatcacactccaatgacgactcctcgccgggtgcaccctcgagtcttgctctgaatattgtacgcgccctgctctctcgcgctcctcctgcctacgctgantgcntctcctgctggacaacanantacgactactgcactagactcncgcgtactctcttctgcatcactctcgctcacccacactctgagtcggagcgacatcggaccagtgatccatcgtgtcgctccgcgaccaccgctctctctctcctcatcgccgtcactcgccgatgtcatcgctacattgttgcaccatagtctcgcatgtttgacttactgtcagccaccgaccgctgctgactcgtgacgagcatcttgctgactcgccaatgttcagacagactctagcgcactgagagcggangcgcgtcatgccttgcaatggctccgtcgtgctcgcatctccgcacacagcaacggcatcgtactctgtgtcgcgtgacatgcgtagcttaatcagtcccatatctctatccgcgccgtctagnaggccatacgtactgtactctccgtgtctgtgctggcactcgttcatctgtggtgtgacgctcgcacttgttgatctggcgctctccttgctcacgctctactcgcgtagcctcacttagaataaagctatccgcctanatgactgcattgaggtctatagatcctagagatcttatcgctcgatcccgccgaatacgtatctgcgccacgcatagcatatgtnatcctagtctanagcgccgtantgccnacgtatgactgcctgatagtctccgctnntcagatcnctgcgcgtcgatccatgggtgtgcgtagtcnctacgggtcttctagcnacgttcagccgaacgcctatgtgcgcctcgctcgtcctgtgtcgccgtcgactactnctcactgctccgcagagcctcgtcctagcagtccactcgtcgtctactcacatgtcgacacaatgcgaagaacggnntcgaccacgacccactnatngtagcgcacatcgcatantgccatccctgnatctacttcatactgctgacagcatcgtccggccnagncgntngcccagttcatccagccacgtatntgatttaacgctacggccncacttacgaagtacgtncactcgttgcatgatagcgcatcgnactgacnatccgtcgnacgtacgtagnactgttgatgcacnatanntacaataagagaattangtgtctgatcataattgcagatac

SEQ ID NO: 3033 - DNA, 855 bp, Glycine max
  misc_feature (829)..(829): n is a, c, g, or t
  misc_feature (846)..(846): n is a, c, g, or t
  misc_feature (852)..(855): n is a, c, g, or t
  Peptide Sequence Number=SeqID_6577
  Probeset Number=SeqID_12812
gtgctttttggtgcttctattggcatctctctttgacctcaatggatatgaaatcatatgatatggacatggatatgaaactttttaacacatacagaatataacgtgatgctttgcagcaattcatagaagttgtattgcaactgtaattagattactgtaggttaggcaaatgaaaatgtatttagaattcccattattactgctttcttccaggctcagttttcacagatgaggcctgttgcaagaacgccttctgttgcgccccgtatgcctctctaccctcctggtgctcctggtcttggacaacaatttttgtatgggcaaggacccccagccatgatgcctccacaagctggatttggttaccagcagcaactagttccgggaatgagacctggtggtggtcccatgccaagcttctttgttcccatggttcagcaaggccaacaagggcagcgcccagtgggccgccgaggaacaggtcctgtgcaacaaccccagcagccaatgccaatgatgcagcagcagatgcttccaaggggacgtgtctatcgttaccctcctggccgcaacatgcaagatgtcccacttcaagttgcagctggtggaatgctgtcagtcccttatgacatgggaggtctgccaatgcgcaatgctgtaggacagccaatgcccattcaagctttaactacagccctcacaaatgctccaccagaacatcagaagactatactcgatgaacctgtatacccacttataaatcagctaaaacataattcttcttacaaagttacatacatacttgctaagatagaccagcgcaaantgttacatcttatggantcaccnnnn

SEQ ID NO: 3034 - DNA, 1977 bp, Glycine max
  misc_feature (35)..(35): n is a, c, g, or t
  misc_feature (68)..(68): n is a, c, g, or t
  misc_feature (98)..(98): n is a, c, g, or t
  misc_feature (101)..(102): n is a, c, g, or t
  misc_feature (131)..(131): n is a, c, g, or t
  misc_feature (136)..(136): n is a, c, g, or t
  misc_feature (145)..(145): n is a, c, g, or t
  misc_feature (289)..(289): n is a, c, g, or t
  misc_feature (368)..(368): n is a, c, g, or t
  misc_feature (409)..(410): n is a, c, g, or t
  misc_feature (418)..(418): n is a, c, g, or t
  misc_feature (463)..(463): n is a, c, g, or t
  misc_feature (591)..(591): n is a, c, g, or t
  misc_feature (673)..(673): n is a, c, g, or t
  misc_feature (796)..(796): n is a, c, g, or t
  misc_feature (805)..(805): n is a, c, g, or t
  misc_feature (889)..(889): n is a, c, g, or t
  misc_feature (899)..(899): n is a, c, g, or t
  misc_feature (936)..(936): n is a, c, g, or t
  misc_feature (953)..(954): n is a, c, g, or t
  misc_feature (1005)..(1005): n is a, c, g, or t
  misc_feature (1069)..(1069): n is a, c, g, or t
  misc_feature (1074)..(1074): n is a, c, g, or t
  misc_feature (1092)..(1092): n is a, c, g, or t
  misc_feature (1163)..(1163): n is a, c, g, or t
  misc_feature (1197)..(1197): n is a, c, g, or t
  misc_feature (1272)..(1272): n is a, c, g, or t
  misc_feature (1343)..(1344): n is a, c, g, or t
  misc_feature (1373)..(1373): n is a, c, g, or t
  misc_feature (1587)..(1588): n is a, c, g, or t
  misc_feature (1654)..(1654): n is a, c, g, or t
  misc_feature (1670)..(1671): n is a, c, g, or t
  misc_feature (1701)..(1701): n is a, c, g, or t
  misc_feature (1731)..(1731): n is a, c, g, or t
  misc_feature (1739)..(1739): n is a, c, g, or t
  misc_feature (1741)..(1741): n is a, c, g, or t
  misc_feature (1808)..(1808): n is a, c, g, or t
  misc_feature (1869)..(1869): n is a, c, g, or t
  misc_feature (1894)..(1894): n is a, c, g, or t
  misc_feature (1947)..(1947): n is a, c, g, or t
  misc_feature (1950)..(1951): n is a, c, g, or t
  misc_feature (1967)..(1967): n is a, c, g, or t
  Peptide Sequence Number=SeqID_6578
  Probeset Number=SeqID_12813
ccgcgcgccgtcacctgagacaatgatctatatcnccctgtatatatagaatatctccactatacctnctaacactcgtgtcttaactcctaattatnaannttagtcactcccacatctcttcttcaatncaacncgtgagagnttgtagcgtactcatcacacataccactaatatcgcacaccctcatcagtacacgctccaccctgcgcgtagattgtacgacagtagaatcaactcacttatgcacatccgtatcatggcgcgttgagtgctcgatccgtaatntatatgcacgagagctcactactctacgatcacacctatcacaagatgagtacatctatagatgcgccacagtcactancatatcgagcgtcacgcttcgtgcagcacgtgacatttganngcacactntcgtgtgtcatgtaacacgacacgcatctcgacgatctgtgacgngtctgtctcgcacgcgcgcacatcactctatgccaatcgctctcttcacactcagcgccgttctcctacagtcgcttgattttgctgtacacgcgcgtaatctctcaagtctgtatgcatgagttgantttacgtataatgtaagatagattataggagtgacaacgagtgttcgcgtgtagagacccacatttacgttactacgcatgnattgtgttcgttatcatatcgtgtcttacaaagtcaccatctatttacgtagtattattattcatgatatcatatcagaacacataatatacacataaatcataacagcactatcttatagtngattctctntgctatacgctatatcattgtattcatgatgtgtagtctcgctcgcggtctacaataggccctcctgctcgactccgatggtcntaccttgtgnattaccacgtctcgcatactcaccgatccgcgacatncccacacacacacaaannatcacgcactatatgaacgtgcgccacgccgtcgacgcggctggagcgtcncagtcagctgtcctgcatgttgcgcactaccacgctgtagcattagccgagctgcttcgtccanactcnctccttgcgcgcagtacnagccatcaccgtgtgccactcacttcgtcctccgcactcacctcacacgtctcatcacgtagtgtagtatngaactgttgtcgcgtatgcgtcgcgcacgacgancgcctcagtcgtgcgtaatacatacctgtgatgcttaagtgtaatgcgtgaggcgtcgtttatgttgttagctgnttatatataattatgtatttatatcatatattatattctgaatatattatgtatcgcttacaagtaggggnngaaggcgcatgagcgtgagacgcgagagnccggtggtgcgttcggatatactctatacaactccatacatattgtattcgtcgtgttcatttatatcttgttatatagtagtatccagttatttattcgttagatatgtgtatatattataatgtcattatattatattacattatatttgtctagagtatcattcagtgccgttctttaggacgttctattgtattgtgctaatgcaagganngcgagccaagacacagacagcgacgcacgagcaatggtgaaaaacggaacaagtaatcgaacgagngagaagagaaagaggnnggtcgagatttgtatagtacacattgaatntatttatggtgtaataagacaatatgattntaaggacntnatctatgatatccgagcacgcaactcaaccattcattagcatattgagataataagttcgtgactcncgagcgcagagatactatgacagtgatacgcggcatagtttgtgaattgttcgtatggtgnttatgagcgcacgcgcgagaggagnatcacgaggagagccgtcacgcatcgcagtaagtctggtggtgatgaggtganaannggtatggtgagggganggcagagctt

SEQ ID NO: 3035 - DNA, 995 bp, Glycine max
  misc_feature (1)..(12): n is a, c, g, or t
  misc_feature (987)..(987): n is a, c, g, or t
  misc_feature (995)..(995): n is a, c, g, or t
  Probeset Number=SeqID_12814
nnnnnnnnnnnnattcccactcaatcgtatataatctctgtttcaactttctatcttcctataatggctagctccaccgtcttgtttacactagtcgccgcattgttagtaacctccgtcgtggctcagtccccggcgtcctccccagccctgtctccaaagcgcacccccgtgctggccacgccgcagaagtctccttcgccggcgatttctccttccgccgtgtcaccgtcatcctctcctcctgctccgacggtgaacgctccgtctccttcgccaacctccgtcgactctccgccatctcctccgttgtctccctccgattcgccggccggtgttccctccgtcactccctcagcaatctcctctccgccgtctgaagcaccagctccctctcaaaacggcgccgctttgaacagattcactgtcgctggatctgctgctgttgtcgttttcgctgctgctttgcttatgtagagactagagagggtttcgtggagtttttttttattattattatcatcgttccgaatttacgcggatgcaccaggaagtttcatttgtaactaatttttttttgaatctgaaatgttctaatccccgttgaagtaacattgaagttgacgctcttttgattgcaatttagttatcgtaaaacttcagccttcatgttcagaaaccatgttttagctagttcggggtgttctgaaatttctgaatgtatgtaggcaccagtaaaaggggaagaaggcatggccctcatttttgtttgctgcaacccaacttgtggctaccgttggagagactaggactcttaatagtcaaggttcaacattggggagttgagcatatcaaattcttcactcttggatggatgagaaactttatttgtatatataaaacttggctagtgtgaggacgttcataattaagtatttgtgatcactgtttaatctccctaaacaattatgttgacgcagtttatgngtccaatn

SEQ ID NO: 3036 - DNA, 1685 bp, Glycine max
  misc_feature (1)..(1): n is a, c, g, or t
  misc_feature (19)..(19): n is a, c, g, or t
  misc_feature (34)..(34): n is a, c, g, or t
  misc_feature (66)..(66): n is a, c, g, or t
  misc_feature (247)..(247): n is a, c, g, or t
  misc_feature (278)..(278): n is a, c, g, or t
  misc_feature (312)..(312): n is a, c, g, or t
  misc_feature (351)..(351): n is a, c, g, or t
  misc_feature (353)..(353): n is a, c, g, or t
  misc_feature (376)..(376): n is a, c, g, or t
  misc_feature (418)..(418): n is a, c, g, or t
  misc_feature (466)..(466): n is a, c, g, or t
  misc_feature (622)..(622): n is a, c, g, or t
  misc_feature (685)..(685): n is a, c, g, or t
  misc_feature (960)..(960): n is a, c, g, or t
  misc_feature (1049)..(1049): n is a, c, g, or t
  misc_feature (1051)..(1051): n is a, c, g, or t
  misc_feature (1254)..(1254): n is a, c, g, or t
  misc_feature (1542)..(1542): n is a, c, g, or t
  misc_feature (1545)..(1545): n is a, c, g, or t
  misc_feature (1547)..(1547): n is a, c, g, or t
  misc_feature (1550)..(1550): n is a, c, g, or t
  misc_feature (1618)..(1618): n is a, c, g, or t
  misc_feature (1641)..(1641): n is a, c, g, or t
  misc_feature (1643)..(1644): n is a, c, g, or t
  misc_feature (1648)..(1648): n is a, c, g, or t
  misc_feature (1650)..(1650): n is a, c, g, or t
  misc_feature (1654)..(1654): n is a, c, g, or t
  misc_feature (1656)..(1657): n is a, c, g, or t
  misc_feature (1664)..(1666): n is a, c, g, or t
  Peptide Sequence Number=SeqID_6579
  Probeset Number=SeqID_12815
ncacgtgcgcgcgatgcgnacacaaatcggtatngcagagagtgcaacgtcgcgtgcgcgagcgtngcagccagacgcgtatcgtagtggagacgagccgtgagtcccgcgtcgcgctagccgcgctgcgcgcgcgctgtcgcgcaaccgtcgcgcgcgccactgcgaacggcgcgcagttggcagcggcctcggcacagctcggcaggacacggagtagaggagcagaaatgacacgcgccaacancgcactcccgacaccgaacacgcggtgactngggcgagctccgccacgtcaccacgtgcgagcantcgatgcggcgcggacgcacagcgcgcgcgagacaggtnanacgcgtgagaggatcacagtgangggaagagatgagcgcgggacgagtcgcgcacgagacacagnatgatggatgcggtgcgagcgaggacgataagagccggcacagcagcnggatagtgatgtgcgtgtacgcgtgtgacgcgcgtcagcatagtactaccacagacacgcgcagagacgggtcgacatactgcgtcattcggcgtgcgggatatagtggtgatattatatgtgtgagccgagaggtacacatagacgagcgcgganaacgacggagtaggagcagcgcggcgacgcaggtgtcgaggatcgcgcagcgatcgacacacncaccaccatcagagggctgctcgacgcgcgtaccgccgtgagcactagagcgacagagcgcgagtacaggggtagcagacgagcggcagcagctgaggcggcgcgcgctgagcggccgcgcgtctgcgctcactacgctcctcgagcccggcgacgcgcaggcgacgcggcagtagagcaacagagaggagggacggggtcgaggaagcggcgcatacagccgcgaaggggagacacgccgcgcacgccgcgccgcgccaggaggcagcaacgcntgtcgacacaaatactagacgcgagcgacgcgcgagaagaatgaacataatagagagatgagcgcggcgcgctcggacgcgcgaacgangntggtagcgatagagcggtgtgcacgtaatattgcacgaacaggacgtgtgagagagacggcgcgggagatagtagcgtgtggttggtgagaggagacaggagcaaggcgcgcgacaagaacaaggagggcgcggcgtatagccgtggagggaggagcgagaataagaatcgagaggctcgcgcgtcgggttcggcgcgtcctnaaggtgaggcgcgagtggaaagcgagacacagtggcggcgagcgcgcgcgctcgggtcgcatacacgtccgacagggaggcgccaacacacaacggagcggcgcgcgccgccgccgcccacgacccgccgacgcgcgcggagtggtgtagcgtagagtaatggcggcgagtggcgaggcgtcaggagctgaaatacacgacgacgggaaagagcgagtggtgtacgcgaaagagtgagggagagtgaatagtagggttgaaacaaacaaccccaacatatcaccactnctnancanaaaaagcgcacaggacggcaacacgaagacgagacacccaggcgccacgtggcaggcgcacggacacncgcggcgcacgcgcgtccccggnanncganancggnanncattgtnnncccccaaccacaccaccac

SEQ ID NO: 3037 - DNA, 1664 bp, Glycine max
  misc_feature (71)..(71): n is a, c, g, or t
  misc_feature (372)..(372): n is a, c, g, or t
  misc_feature (385)..(385): n is a, c, g, or t
  misc_feature (431)..(431): n is a, c, g, or t
  misc_feature (596)..(596): n is a, c, g, or t
  misc_feature (669)..(669): n is a, c, g, or t
  misc_feature (684)..(684): n is a, c, g, or t
  misc_feature (899)..(899): n is a, c, g, or t
  misc_feature (938)..(938): n is a, c, g, or t
  misc_feature (1521)..(1521): n is a, c, g, or t
  Peptide Sequence Number=SeqID_6580
  Probeset Number=SeqID_12816
cgcgtgccgcatcagtgtcggatacaacggatagtagctatatgtgcgtacactagtcatctgtagtcatnagcgcattcgaattcatcgtcataagagaacatatctgacataattcagaagtcgcacatatcacacaccgcgcgcattcgcatatgataattacatgttcgcgtacagtctaattatttcgagctcgtatctcgcctcattccatacattactaccacattgacgcgcggacgcacgcatgaacatatatatacatgaacagcgtagacgatcatctgaccgacgcgcgctaatagaatacatgcgacgccgccgaaatatctgaagtgatcattgttggacgaagagatattctattanttatcatgcggtnaacaacacaccatcgccgtgtgtatgggtattgatactaatgaggncagcagtgaggtccgcatcgacgcgagcgagatcacgtaacatgttgtatataaagtcgcagaagactacagcaccgtgcgcgctatttatatgtgtctgtgtgcataacgcgtttcgcgccatctgttaggtctagagtgtgctacatcacattcgtcatatantccgcacgccggcctcttcgctatactaccagcagcacagctcgtgttgtttatatatgttttaatggtgtangcgggagaaatatgnggaacgatctcgcggcgcgatcatcgacattgaaccaataacaatatacgagtaggcggtatataatgcgtgtgacgcgccgcacatactgcgcgaacatagtgtgattagttatcagagacgaagaagcagcgcataaacaagacacgaaagtaaacattaacgaagccgtcggcgccgctatcactgcagatgtagcaggacgtaatatatancgactggtgcttcacgccaccgcgctctaatcagtctantatatataataaatgattagaacgtcgggtagtggagaccgactcacccactacaacgcacacagcgcgcactcacttacgtacgatcgaccaacgcctcacttatatactcgactcatctgtcgtgtcgcctaccgctatatcggtcccattctcgcacgctatgtagttacgttgatgcgttgtgctctaccctgcctagtatataatagctagcggtcgggcgtggcgagagaatgttcgtatacataatacactacatgcgccatactccgtgcgactggcgggtgtggcgctgtgagatcgccttataaataaactcatcaacaataagacgccgcggcgagatgtacggggcgcgaggcgggtcgaattaatatgtcacattaatatgacgtcattcatatcttattagaccaacagcgtctcgcctctgattaatatgagaccctctccacgagggtcgctcctgcccgccacacacaacctctatgttgctgtcaccgtcatgtgccccactaccaagaaacttatagttagttgcagtagactagatagtgccgcgtcgttaatacatatccgntggacccagaacactactccgacgccgacgctgtctgtggtctaacaacgaataaaagaacaacattacactcctctctcttgacctcacctccactatatcagccgacatcgtataggactagagagcggaggggacatcac

SEQ ID NO: 3038 - DNA, 456 bp, Glycine max
  misc_feature (438)..(438): n is a, c, g, or t
  Probeset Number=SeqID_12817
aagcaaatcgatgtccaaaacaaactggatccaaaccctaagccggcgatggaagagatggtgagcagcgggctggcggggatggatatctccggcggcgatagcgacggggctccggccaaaaaaagaggggagaagaccaaggaagcgaggagggagaagctttccaggggtcctccaccgtcgccgtccggcgaggggttggaggaggagccaccggatacggaggccagggaggaagatgagatcccatgctaccgcgtgctgtgggacagccgctacgccggcgaattcggctccttcgacgaccacacacgtcttggtcccatgcgctttacatccggacccatcccgcgacacgccagacctgagtgtaccatgaacatctactacatccgagtgtacggcctagaagacggcctccagtggccgctgcangtccatggcctggtcgcg

SEQ ID NO: 3039 - DNA, 962 bp, Glycine max
  misc_feature (14)..(14): n is a, c, g, or t
  Peptide Sequence Number=SeqID_6581
  Probeset Number=SeqID_12818
atttttttaatatncccctcttacctgatcctcctccccctcaaaaaaaacgattgggtccggtgcccccctcgagtagctacaaaagagcccccccataaaggatgttcccacaatgcactgcttgatggtgctactgttggttcatttaccggtggagcattggcccccaaatttggtcggactaggacttttcagttgcatgcaatccctttagcaattggaggatttctttgtgctactgctcatagcgttcagacaatgatcatcggtcgcttgctagctggcataagaattggcataacatctgcaggtgtaccactttacatatctgagatttctccaaccgaaattcggtgtgcacttgtatccgttaatccactttttatatgcattggaattcttgcagcactactggctggtttgcctctggtgggaaatcctatatggtggcggacaatgtttggaatcactgtagctccatctgttctgttagcacttggaatgactatctctccagacagacctcggtggttctttcatcaaggaaaaatatctgaagctgaagaggctgttaaaaccctatatggaaaagaaagagtgccctttggttatgcatgacttgacagcatcaagtgaaggcccttctgaaactgaaaccagaaggtttgatctgtttaatagtcgacataagaaagtggccgctgtaggggcaacccttttcttgctcccgccattggcaggaataaatggagcggccatattattcaactttctgttttccgcagtgcttggaattgcttttgacgctgcaaacaagtggacttgctttgtggctcctaatggttttagggaccagatggtcgcttcgtgcccttgaaggccacataaaggcgaggaatcagtttctcctttatacaacgcctttaggcgcgaataggcctggcttcaatgggtgccta

SEQ ID NO: 3040 - DNA, 593 bp, Glycine max
  Peptide Sequence Number=SeqID_6582
  Probeset Number=SeqID_12819
tagcaatatcagtaggtcctaggtcgtggcgtccaactctagaagtagtggatcacccggccgtgcagaattcgcacgagcctattccgtagaacatcgtatttggaaacaaagttgcactttgctgtcagtctcggtgagatagaattccatggtaaccgtagtgcttgagctattcgtttcggagctctatattatcaattggagctcagggatcagaaagcaggagatggtagcaccagcgtgaggataaataatttcagcgaagtgcatgtggaggctgtaaaaaagtgtggggaagagaataagggcgactatgtcaaatgtcgtacagagagtgaggctgtcacataatcatggtctctcaggagaaacaaaaggcctctcaagaagacgctttgatgttagattaaggatgatggtgtgatgtggaatggtcacttatggctagggcatctgggcatgagggggtcacaaagtataatgatattgatcagttgtatcaataaatgatgatcatagtgaatgaatagtatatttgcgagttgtggctttgtccgataacaaatttcaggagttgacactcaaaaaag

SEQ ID NO: 3041 - DNA, 517 bp, Glycine max
  misc_feature (487)..(488): n is a, c, g, or t
  Probeset Number=SeqID_12820
cccacgcgtccgccggttcgaccgggttctgggttttcggtgattgggaatctgatgcagcaggggtacttgtttgagtttgatttggaccggtctcggatcgggttcacgcgtcacggatgcgcggttcgctaaagaacccgaacaaaacaaatcaacccgccttttgtttttaaatgacacggacttgttattattgccacatgtaatttttgggggcacatttggattattattgtgggaaatttcggtggaagaacgttgtgatgatatgtacttcttttatttggaatttttttttggtttattcattatttatcttaaaatattttgtgctgtgtagagtatttgaagggaaaaaagaaaagtgaaataatgctcgagtttgatgtaaataattgaaggtgtttcgagtatgcttcgctctcataatgatcacatgaacgttgtacatgaggaagaacatgaattgcttgtacgtaaggcnncaagcccatgagcttgtctgaactctgca

SEQ ID NO: 3042 - DNA, 1339 bp, Glycine max
  misc_feature (1)..(1): n is a, c, g, or t
  misc_feature (19)..(22): n is a, c, g, or t
  misc_feature (32)..(33): n is a, c, g, or t
  misc_feature (107)..(107): n is a, c, g, or t
  misc_feature (1143)..(1143): n is a, c, g, or t
  Peptide Sequence Number=SeqID_6583
  Probeset Number=SeqID_12821
nccccctagcgggggtggnnnntttcgctttnncttgttcttcttcccctcgcgtctgtgttctctcttcattctccgctctttgatgttatactcctccccccggnggaggaacgctcgcccccctcacgctcataagcgctacacttccactcttctccacggccattacctcgcgcacacctgtcacctaacatataccatccacctcagagcttagtctgcggtctcccgtcgccactatatatacatggtaatattatgtaataaaatgtgaatagaatgtagagtagtatgaacgccatgtccaatctgatccaccatcgtcatctctgcatctactaagaatgcgagctccgccatcctacgtacgtcattgcgcttacactcacaagcatcatctagttccgcacgtccaacactcgaaacttctgacacacatcgacgacataatgatgatcagcacagactattgtcacttaaacgcgagaatgaacgcataccaccatcggatcacggaagcaagaactctcttatctctaccacgcttactatgacactcgcctatcaatagctaatatgacctgacgctgtagactctctggatagcgccgatgacctcccgtcgcaccaatgcaccacgctcgcttcaccataccatctcctcacatacatatatagtattatctagttaagttctgtctcacttgtgtactatctcaacaactccactgcacccaccatcatcacgcgcccgttccttatatgcgtatatatgataattgatccaggatagaacggtgacttatgacggcattccgcacgctgcccacacaccatcaacgatctgtataatggtacttgatattagagcaccaaagtatatatgagatgatagagtacacacgactctcacacaaaagtcactcctcgcgtctctcacttcatcgacccataatgtatcttatgaatgctctccctcgcctcccaccacatgacgatcagagattaacaagttattgtatcccttcagcgatactcccactcctgacctcccctcatgatcacgtatactcgacgtgttgcatattcaaaactctctctatatactgactatcgacctatactatcactccataacgngcgagatcatgctctcctcacactcagctccaccgtatctccgaatcgcaatcactccactcgcacacaccgatctccgctgagtccgctcagatgaccctagcattcgcataactcactctatatatactatctactatcatccatatcactatagactacactcgtatacaaacttcactctactcgtcacacc

SEQ ID NO: 3043 - DNA, 744 bp, Glycine max
  misc_feature (499)..(499): n is a, c, g, or t
  misc_feature (676)..(676): n is a, c, g, or t
  Probeset Number=SeqID_12822
gcacgagaccattacctagaacatcctaatcgaaaagaccagtcctccgaactccgcagcgaaccgaccccacacctttccccggcgaagcagcagcatccgcagcggcgtctatggcccccaaggcggagaataagcaggcggcgtacaaggccgagaagaccactgcggcgaagaagaccaaggccgagaagcggacgccggcgtacaaggagggcggagagaagaatggccagaaaatccgcagaagattgggcagacgcccaagatccacatcttcaaggcgctgaaagccaagcggaggcccggagatcggcttctccatcaaggcccatgtccaatgatgaaacccctttgatcatcgaacttccttccaagaaatcttggccgggccaagtcccgggcaaggctccgctccggctatctaccccaaaaagcccccacccattcccggtccgccggggaaggaacccaggactcttcggggccggccctacgnaccctcccccgcggagaaaggtccgcccagggtcacggcctgtcctcccgcagtgggcaaccaaatgggccaacacaacaaaggggtagcctccccgcccgatagaaagagggcggcgatccgcgggaatcacctatgggggcaacacggatagcggaattcagggagagaaaaggncagcgggtctttagaaaacaacttgtcggacccgttggaaacgtggtttccccgcttagcaacagggg

SEQ ID NO: 3044 - DNA, 1577 bp, Glycine max
  misc_feature (645)..(645): n is a, c, g, or t
  misc_feature (673)..(673): n is a, c, g, or t
  misc_feature (829)..(829): n is a, c, g, or t
  misc_feature (836)..(836): n is a, c, g, or t
  misc_feature (1182)..(1182): n is a, c, g, or t
  misc_feature (1264)..(1264): n is a, c, g, or t
  misc_feature (1429)..(1429): n is a, c, g, or t
  misc_feature (1537)..(1537): n is a, c, g, or t
  misc_feature (1546)..(1547): n is a, c, g, or t
  misc_feature (1550)..(1550): n is a, c, g, or t
  misc_feature (1552)..(1552): n is a, c, g, or t
  misc_feature (1554)..(1554): n is a, c, g, or t
  misc_feature (1556)..(1558): n is a, c, g, or t
  misc_feature (1572)..(1573): n is a, c, g, or t
  Peptide Sequence Number=SeqID_6584
  Probeset Number=SeqID_12823
ttgttagtgtggtgagcgcgtgaactagtcacagtagatgcattgcgcaacaacgcatatttgtcactacagcactcatcagtagacatctggtacgcagatatgcacggttgagggtagctagaggagtgtgagtatatagatgaaatactcgcagtgggagcgggagccacgcggcgctcagcggacgacacggctgcacgctgactagacgcacaagagatacacgttgtacgccagctcaccctatactctatactactaggttcgagtgtcactcgcgaagaaggcgtcggtcatgtcgcacgatagcagacatctctatgacattaacggaatagagtctaaaactcagaaccctactagaggagtgcggtacgacggacaataatgtgtatgtaatcaagcatagatgaaggcgcatgtgtgtgttagtgcgagatattttcagctaaatcgaaggatagagtaggtcattagcgataagagtaaggtatagaaatgactataacattaagaatacattatagcacacgatatgatatatatagagagtactacatcaaacaacatcttgagtggcggggcacccatcctcattaattttattgtgtgacatcgacgcagtacacacatctcgtatgngtctgtctgctcgattctattgtagttntgtaccttcagcattaccatatgatgccctctctttcgctctctaagccacttattccggcacattaagtgatatatatactatacataccaccaacttgtgtgaaagaatagggataaatagaatgattgtgcatctcggacaatcatatgttantgtcctncggttgggtttgttctcgagatataaatatctcatatagaacgagcgaatcgagagagggaagcgcgccacgcacgagcgcgccccgtacacgacgcggaggcgctccgctcacagagaagaggcacgcggcgcggcgtgaccgaggtgagtacacggcaggaggcctggagaggagagggtataaagagaaacataacgggagacaaacgaggacaagcaatagtatacattatagatcagatcgcaaaacagtaacataccatacaatggaaagaatacataagatagacaataaacaatagacaacaatactacagcgcacacaccagaccctaacctatcantactagattctttccagtcttaagctacgggaaagaatggaagagctcgccgctacgcaagccgccgcatcgatccgcgganacggaagaaaataattctgctcgacacacacccctataacaagcactacaccttatctgctttaacccactaaaggtagtcaagagataaatagatcgaaggtagaccgcatccacgccaaagcgcccacgcgaggggagagatacacacgtattataggtaagnaaaagaagaaccatgacccgtctccatcataagtggagggaccgccacagagctccaaagaaaaaggccacgaaacccccaaacacgccaacaacaacccccacgctncaacacccnncancnancnnncccaaccaaccccnncccc

SEQ ID NO: 3045 - DNA, 647 bp, Glycine max
  misc_feature (625)..(647): n is a, c, g, or t
  Probeset Number=SeqID_12824
tcagctacgtaggcccccccccccccgttaacaaagattccagcaccaaatcagaatatagcccaaagcaatgtggcattctatgagccaataacgatcgttccttcatttccacaaaagaatatcaatcaatatgcacaagtggaaccacaagtttatacagagaataatatgaatgggaactatggaggaggaatggtacctcagaacaagaataatatgagcggaatgactcaattcaaccctctcatgaacttgaatgcgatgaatcatatgccaacagcaaatgaaataaatcattataacaatgtgcctggctacaataatatgaataatctcagcaataacataccaaaattaaccagcatgcacagcaataatacctatactagcaatagtactctagataccacaattacaaacctcacaaatatgagcaatatgagcagtatgaatgatataagcaatctcagtaacctcagcaatgtcagtaatgtcagcagcatgagcaatattactcaaacgagtaataataataacccatataatcttcaaatgagcaattttatgaatcaacagaattggtttaataattatttgcaatattatttaccaataatgcatnnnnnnnnnnnnnnnnnnnnnnn

SEQ ID NO: 3046 - DNA, 1525 bp, Glycine max
  misc_feature (1)..(1): n is a, c, g, or t
  misc_feature (7)..(10): n is a, c, g, or t
  misc_feature (18)..(20): n is a, c, g, or t
  misc_feature (24)..(25): n is a, c, g, or t
  misc_feature (30)..(31): n is a, c, g, or t
  misc_feature (33)..(33): n is a, c, g, or t
  misc_feature (43)..(43): n is a, c, g, or t
  misc_feature (45)..(45): n is a, c, g, or t
  misc_feature (47)..(47): n is a, c, g, or t
  misc_feature (53)..(53): n is a, c, g, or t
  misc_feature (55)..(57): n is a, c, g, or t
  misc_feature (59)..(62): n is a, c, g, or t
  misc_feature (67)..(67): n is a, c, g, or t
  misc_feature (69)..(69): n is a, c, g, or t
  misc_feature (256)..(256): n is a, c, g, or t
  misc_feature (598)..(598): n is a, c, g, or t
  misc_feature (618)..(618): n is a, c, g, or t
  misc_feature (624)..(624): n is a, c, g, or t
  misc_feature (740)..(741): n is a, c, g, or t
  misc_feature (744)..(744): n is a, c, g, or t
  misc_feature (868)..(868): n is a, c, g, or t
  misc_feature (882)..(882): n is a, c, g, or t
  misc_feature (966)..(966): n is a, c, g, or t
  misc_feature (977)..(977): n is a, c, g, or t
  misc_feature (1000)..(1000): n is a, c, g, or t
  misc_feature (1023)..(1023): n is a, c, g, or t
  misc_feature (1041)..(1041): n is a, c, g, or t
  misc_feature (1074)..(1074): n is a, c, g, or t
  misc_feature (1111)..(1111): n is a, c, g, or t
  misc_feature (1130)..(1130): n is a, c, g, or t
  misc_feature (1135)..(1135): n is a, c, g, or t
  misc_feature (1160)..(1160): n is a, c, g, or t
  misc_feature (1176)..(1176): n is a, c, g, or t
  misc_feature (1194)..(1194): n is a, c, g, or t
  misc_feature (1215)..(1215): n is a, c, g, or t
  misc_feature (1234)..(1234): n is a, c, g, or t
  misc_feature (1246)..(1246): n is a, c, g, or t
  misc_feature (1279)..(1279): n is a, c, g, or t
  misc_feature (1307)..(1307): n is a, c, g, or t
  misc_feature (1327)..(1327): n is a, c, g, or t
  misc_feature (1346)..(1346): n is a, c, g, or t
  misc_feature (1406)..(1406): n is a, c, g, or t
  misc_feature (1417)..(1417): n is a, c, g, or t
  misc_feature (1421)..(1421): n is a, c, g, or t
  misc_feature (1441)..(1441): n is a, c, g, or t
  misc_feature (1458)..(1458): n is a, c, g, or t
  misc_feature (1496)..(1496): n is a, c, g, or t
  misc_feature (1506)..(1506): n is a, c, g, or t
  misc_feature (1510)..(1510): n is a, c, g, or t
  misc_feature (1521)..(1521): n is a, c, g, or t
  Peptide Sequence Number=SeqID_6585
  Probeset Number=SeqID_12825
ngggggnnnncccccccnnncccnnccccnngngggcggcaanancncccccncnnnannnntggangngcgagggagagcgggatctgagttgggagtgagagagcgccgccgccctcagctcaagcttagtgagttgtgtagtgggccccctcccccaccacatagcaggtaagctatcatctctacactgataatagtagaggacagggcatgtatggcataagcacagtaaccgcatcggaggtcatagagncttgaaaatgccttatgaatgatcagccaccggccgctgatcagattcagcttaactaagtattagagcatcaagatagcttctcgtagcataagatggaaggcatagcctctagtattaagagacatatctgtgatgcatctaacattagatagcatcccggatataatagagttctgggtgtgcacacatgcgagaagtgactgtacatagtataaaaaattcctcattttcttaacatcgtctagatctctggcagccaagagtgaaactaatatggtgttcgacatatgctctatttacgtggtagctatttgaatgttatggttgtttatatattcncttatcagcgctctgcaacnttactntatgtatcactattactcacaagtatttttgtccccggggacaatgtggttgcgacgcgcgtgctgcgctgggagtgagagcgcaggtggagattagagctattctaaacctcctnnggngtttgttgtgtttttattagataggattctatacgtgtcgttccctccgctcggcggcacatagagttggtgagtggatggtgttagcgtgttctgtgtttgatatttgtgttcctccatctantctacagatgagcntgcgcctacgccactccactagtcggtgaagtgcgctcgcgtgcgcacacgcaccgcgacagccgagtgaaggaggcaggccgntgcgcgcgagnaagcgagcgcatcacctccaagngagacgcgggcggcagcatcgcnccctccgggagtcatggngagatcgcacatatcagtggggtagatgcgcgncatcgagccaatcgccgctcgcgcgtggggcgcggcncacaatagtttcgtgtggnagacncgtacttatacgcgtgctcgtatgnagagcgagacatgctncgacgtgtgcgcgagagnatcgtgagagacgatatgcgncacgtactagcgccgacgncaagcactacgntgcgtctgtgggtgagagagtcggagacatgtntcgggcgtgtggcgcagatcgggacacnagacagacgctagtgagtangttgtagcaggcttgcggnctgcctagcgatgagcgtgcgtgtcggcacgtcgcagtcgtcgacgtgcagactccccancctccctgatncgangtggtctagcgtgtgcgagncgccgtacgaaccccantattcgcggacgaggcgacgatatgattatgtcttcgnacagcaacgncacntacatgacgcncatc

SEQ ID NO: 3047 - DNA, 359 bp, Glycine max
  Probeset Number=SeqID_12826
gggcccacccatgcgtccgactgttgcgagaagaccacagaggggcggagttcatagttccagtgccatatgtcaaacaagtctagctgccgaaagctggtgggaggctagctattgcctctgatggcatactggatgctctatcatcagaaatggctgccaaattttgccgtggtttgcctgctgaacttgctgctatgcaggttgccaaggaagcactactaacgagagggttaatggacgattccactagcatagtagttgacataatcccacctgataatgcattgagccccacacctacccccccatagcggaccaagctgagcgaacttctttcattcaagaagaaggccccc

SEQ ID NO: 3048 - DNA, 591 bp, Glycine max
  misc_feature (150)..(150): n is a, c, g, or t
  misc_feature (192)..(192): n is a, c, g, or t
  misc_feature (201)..(201): n is a, c, g, or t
  Peptide Sequence Number=SeqID_6586
  Probeset Number=SeqID_12827
atcactctgctgcctcgctctgtttctgtctctgtgtttgcggctgaggattccgaacgagcgaccttcttcgtttctcgcaagtttaagtcatcatgggtaaggaaaagactcacatcaacattgtcgtcattggacatgtcgactctnggaaagtcactaccactggtcatttgatctacaagcttggangtattgacnagcgtgtgaatgaaaagttccaaaaggaagctgctgagatgaaaagaggtcatttcaagattgctgggtgcttacaaactcaaaggttgaccgcgaaaaaggattacatttgtatttctttgtgggaattttaaaccaccagtactactggccagtattgattgccccccgaatcttggtttttttaggaaatgattactggtgactcccccgcggaatgggggggccttataattgaacccccaacggtgggtgttgaagctgggatttcttaagagggacaaaaatcctgggaaaggtcttcttggtttttcccttgttgggaaaaaaaaaaatctcctgttgttaaaacatgatgtgccctacccccccagtattcttatggttatg

SEQ ID NO: 3049 - DNA, 1999 bp, Glycine max
  misc_feature (48)..(48): n is a, c, g, or t
  misc_feature (87)..(87): n is a, c, g, or t
  misc_feature (92)..(92): n is a, c, g, or t
  misc_feature (94)..(94): n is a, c, g, or t
  misc_feature (97)..(97): n is a, c, g, or t
  misc_feature (137)..(137): n is a, c, g, or t
  misc_feature (142)..(142): n is a, c, g, or t
  misc_feature (189)..(189): n is a, c, g, or t
  misc_feature (211)..(211): n is a, c, g, or t
  misc_feature (233)..(234): n is a, c, g, or t
  misc_feature (277)..(277): n is a, c, g, or t
  misc_feature (285)..(285): n is a, c, g, or t
  misc_feature (305)..(305): n is a, c, g, or t
  misc_feature (315)..(315): n is a, c, g, or t
  misc_feature (322)..(322): n is a, c, g, or t
  misc_feature (331)..(331): n is a, c, g, or t
  misc_feature (341)..(341): n is a, c, g, or t
  misc_feature (344)..(344): n is a, c, g, or t
  misc_feature (371)..(371): n is a, c, g, or t
  misc_feature (402)..(402): n is a, c, g, or t
  misc_feature (496)..(496): n is a, c, g, or t
  misc_feature (530)..(530): n is a, c, g, or t
  misc_feature (542)..(542): n is a, c, g, or t
  misc_feature (565)..(565): n is a, c, g, or t
  misc_feature (581)..(581): n is a, c, g, or t
  misc_feature (674)..(674): n is a, c, g, or t
  misc_feature (686)..(686): n is a, c, g, or t
  misc_feature (762)..(762): n is a, c, g, or t
  misc_feature (792)..(792): n is a, c, g, or t
  misc_feature (833)..(833): n is a, c, g, or t
  misc_feature (962)..(962): n is a, c, g, or t
  misc_feature (1011)..(1011): n is a, c, g, or t
  misc_feature (1135)..(1135): n is a, c, g, or t
  misc_feature (1159)..(1159): n is a, c, g, or t
  misc_feature (1351)..(1351): n is a, c, g, or t
  misc_feature (1354)..(1354): n is a, c, g, or t
  misc_feature (1599)..(1599): n is a, c, g, or t
  misc_feature (1777)..(1777): n is a, c, g, or t
  misc_feature (1865)..(1865): n is a, c, g, or t
  misc_feature (1915)..(1915): n is a, c, g, or t
  Peptide Sequence Number=SeqID_6587
  Probeset Number=SeqID_12828
ctcagcatcagtccacatagtatagtcgatatgtctacgtagcatgantactcatcgcattgactcgtcatgctgccatcgtctagnctacntntcnagacgacattatgtatgttgttatatagtatacacgctgncggcntctctactgcacgtcgcatctcacgctcgatatatcgttcgacgacntcgcagcgtcgtagtgctttcnacgacgacgtatgacgtgatgnnatcactactactctgcagcggcggctgaacgagacgtcatacngcatgaangttctgctcatcatagtatncgtgcactantgctatncatcacgcnacattgccgncgnagccgactcctatgaagatgtacgatntatcggctctcgtctcattctggtagttatncacttatagtagtagtaatatatagtatcatcattctagatgtctcacatctcgtgatgtcattacgtatcatctactgtgtaggacacagcantcgacgaagatatatcagtcatatacgtactgancgaggtagaganttacagtcgtgcgatctagcgtnacaactgtccgcactnccgctcgtgtatacgtcaataatatcactgagtactcatctcacatgttactgacctctagcgccgccacatgatacgcctgtacgtgattcntctagattcgcnagatatgcgtgccacgtacgcgtgcaacagtaggcgctacatccgtgtgcgtatatgacatagtatgtgcgcgatngagatctcctaatatctactcgtccgtganatcatcgacaagtggtcgctgagcacgctacaccgataatntacatcgctatattataacctatgtagtagtgtgatctaatcacacaacgtgcgcacttcactgtgtcatacacgccttctacagtcttcgcatcctgccatcgttctatcttagaacatctgcgtcantatcacagtgagtctggttgataggcgcgtgcgtatgagcgactcgtgnacactatatacggacaggatccgtcactgtcagccgagctgactgctcgttgactgcgaacacatgtacctagcactactactctcgtctacagagtacaagtactacacgtgtctccagtcgnatattagtgattcgcgtcgtactngtcgtccgttcgtgccactcaagcgcaacacgataacacgagcacacgacggacggtcagactgagtctcgaaccatatattcggcaacgccgaacacagcactacgcacatacatacgcacacagcgagtcagtgcaccacggagcgcagtatagacatagtgatgtctagcctacatgacagcactccancgnagtgcagttgtcgtctatcaccgcttccgcttcgcgacagtcactacacacgcgataatagtcacgcgtatatacattcataatcagatatcacttcgtatggttggcatacttattattatcgatgagaagtcactaatattactcagtagtgagtaatatcctgtgctattagtacttatgatttgtaacgtgtttgtattttactcgctacgcgctcccattcactacccttctcgccttcngccgactgcatcaatgcaacacagacaagatacacaacagacgtatagcctgcacagcgagactgcggggaggatgagtacggcagattggtcgagtagtgataatattaatttctgtaacgcacgatgcgcccacagtccgcttgctcatgtgtcggtgacaatcgtagcctaaatnagttgtcatgcctaccacgcgccccactgtctccaccacgcttagttgtagatcttcgtgttatatatttatattacatgtgtgaccnaccacggcacggcgcgagagcggtatcctcctacacctctacaaataaangtaatgacgacccactgtctgcatctcacacctacacacagcagcccgcgcacggcactacaggcgccgagagccgacggaggc

SEQ ID NO: 3050 - DNA, 502 bp, Glycine max
  Probeset Number=SeqID_12829
accgtgacgaactctgcttcttcctccacaaaaaccagagcccgccgccccgagactcccaaaacacttcttttcccaaccaaatccaccaaatctcgtgcgagaaattttgcaatggcgtcggtagcgtccgaagtcgatcccgccgtggagccccacatcgtcgttgaggagtcgtccagcgctggaggcagccgagaggaggcgcccccagaggctgcggcggtagaagcggtggtcgagacagagctggcggatgcggaggaagaaggggagtgcgggttctgcctgtacatgaaggccggaggttgcaaaggaggcgttcgtgtcgtgggaggagtgcgtgcaggcggcggagaaggagggctccgacatggtcgagcgctgcttccaagtcaccaccgacctcaagaagtgcatggacgcccacgccgactactacgcccccgtgctccaggctgagcagaccgtctccgaccaagcccaagccgccatcgctgct

SEQ ID NO: 3051 - DNA, 501 bp, Glycine max
  Peptide Sequence Number=SeqID_6588
  Probeset Number=SeqID_12830
aatattctaaggagagcggcccccccccgccccttccgccgccccccgccgcgcaaaacggagaccgcggccgagtccgcggccgcgaggagggccaagtggaagaagaggcggatgagagaagaagagaatgagggggctcaagagaaagcgccgacagatgaggcagcgatccaagtaggtaccttcgggcgggggaaaggaagcatcttacagcctggccgcgggacttcgagggaggatggcagggtctggttgttactggtgtgtttgctgttttgggtgtggtataggtgttttatcctttttttgctattttgctgctctttgttttatgtgttgtgtgtaatgtatgtgttttatgtagtttgtgattgtatgtgtttgatttttaattttatataattattaattttgcattaaacatgacaaaaaaaaatgaaaaaaaaaaaaaaaaaaaaaattaaaagtgatgctgtgctactccaaaaaaaaaaaaaa

SEQ ID NO: 3052 - DNA, 656 bp, Glycine max
  misc_feature (209)..(209): n is a, c, g, or t
  misc_feature (211)..(212): n is a, c, g, or t
  misc_feature (601)..(656): n is a, c, g, or t
  Probeset Number=SeqID_12831
acacactgcgaccccactctccctggcaaccctagctcccactctcttgcccgcgaccctagctctcccactctcgctcgacgctggttccgcttgcaaccccttgctcgcggtggtcagagcaatctctctcgcacgcaggtggtcataatgtttagtttgtcccggtgggcaatcaacgctaccatgaatccattttgattgctgtngnnagcgagattgaaagaaatgaaagcaggtcctttggcttcgggaaaacccattgccgttgaatggctttcccaaatccccaatttaattcaaggggaaaatttttgaccgcgtgtaaaggcccaaaggggcccagcccgggggtgtgaccccaaaagaaccttttttttaaggggggaaaaaatttggggggcccgtgggggaggggaaaaaaattttccgccgggcggtttggggggggtttaaaaaaaaagggggttttttttcttccccgggggggggggaaaaaaaaaattgggggggggccccccataaataccgccgcgaaaaaaaaaacccaaccggggggagaaattttcttttttggggggggagtcttttctcaaaaagnnnnnnnnnnnnnnnnnnnnnnnnnnnnnnnnnnnnnnnnnnnnnnnnnnnnnnnn

SEQ ID NO: 3053 - DNA, 1142 bp, Glycine max
  Peptide Sequence Number=SeqID_6589
  Probeset Number=SeqID_12832
agaatagtacaatttctttttcaaagaatattttagttttaagctagtttgaccaaattgttagtaactcaaattctttttcttttacgatgattgcttgatgtgataacatttttaaaattttcaacgaagctgattggtatagtgtctaaagtatccgctccatttttctacacaaattatgggcctaaactttctagattagtcaaaatttgcagctggaagaaaattagttttattttgtacgaataagaatctattttttaagaaaatgtccagtcgcatggaagttggaaccgctactaaaatagttcatggagaaaaacaaaacaccacttgcacatgacaaatcatgccttgacgtccttctcattcttttaatgcaatgcatcaacgataacgcatgattttcaaattacgagtattttcaacttggtaagaaaagttttatgcttttaatatccgactttgattgtgatcgaatgctactttaattttgaaaattgtaaccttctatccagatccctatcagcccccttctatttaaatttattggatatttggtatatctattatttttaaaataaatatttttttgyyytcaaagttcccttagaaaattatcaataaaattttctggagctggattctagttaaaaaaaattggcatcttgtgtcactcagtgtgattttgtgcagaacagatgttactgaagtagctagcagcaactagcaagggtcaaacacccgtataaatggagaaccataaagatttaattattattagacaggtttattcatttagctacttattaataattacttaagactcaaattgaaattattaattaaattaaaataatcttagatcaattgatctgcaagttgtttgcaatttattagacagatttaatttgtaatacagcatgtccccgattagcaactcatggccagcrggattacactttattaccacatcatttgaaagaagatggaatctttgacttgtgttacagtataatatacacgatcttttagatctttgtacctgctatgactatgattttttaattttattcatgattgatgccacaatgaatggaatatatgttctatataatcaaccgcgtggaattgtgtgg

SEQ ID NO: 3054 - DNA, 2166 bp, Glycine max
  misc_feature (1)..(7): n is a, c, g, or t
  misc_feature (2166)..(2166): n is a, c, g, or t
  Probeset Number=SeqID_12833
nnnnnnngaattcaacttcatctccctccttaaaccctaccctaccctacccgtcgcccatggcttccgagaacgtaagcaccgatacggtgtcgaaagccgtcgacgctctcctgaaatggcgtcgctcccaatctgaaaccctaaaaccaaaactcttcgacgaagacgaggaatatgtgtacctgatcctgacgctgaagaagatcccttcaaaatcccgcgtgaaccctcacaagatccctctcccccactccctcttctcccctttctccgagcagtgcctcatcctcgacgaccgcccaaacaaggcccgcgtcaccaaagcccaggcccaagcccgcatccagtcggaatccatccccgtcaataaaatcctcaagctctcgaaactcgcctccgattaccgccccttcgaggcgaagcgaaaactctgcgattcttatgatttgttttttgcagagaagagcattgtgccgctcctgccgcggcttctggggaagagttttttcaagaagaggaagattccggtgccggtggacctgaagaaggggagctggaaggagcaggtggagagggcctgctcgtccgcgatgctgttcatgaggacggggacctgtagtgtggttagggttgccaaggtgaggatggagagggatgagattgtggagaatgtcgttgccgcgattgaggggattgtggaggttgtgcccaagaagtggggcaatgtgaggtcgctgcatttgaagctgctggagagcgtggctctgccggtctaccagactgttcctgatgtgaagttgaagattgagggatttaaggttgaggagaagaagaatgagaaggagagggatggtgaggttagtgattcgattgagggagggacggagaagaagaagaagaagaaggggaggattcatgaggttaggtatatggatgagaatgttgtggaggctgggatggaagatgaattggcgagtgatgacgatgatagtgaagatgagatggtgagtaagaagaggaagaaaggggtttcgagtgagttgagtggtgttgagcaattgaagaagttggtatttaatgagttgagtgccaatgggaagaagaagtcaaagaagggctgcttgtctgttgggaagggggttaagggaggtttgattgaggggagtggaagtgaattggttgtgaaggatgaggagtcgggggtgaagaagaagaagaagaagcgagaggaagtgaaggcaaaggctactaaaagtgtaaaggctacgaaaggtgtgaaggctaagaaaattaaaaaggctgcgtgagttggattagtggttgatgttagaaattgcagcttgatgtggctctgtgcaagcttgtgtggttctgcttgttgaacctccagcggatttttgttttagaccacattattatggtagttgtgttgtgtcagttcagttcgtcatttctaattcaaatttactatacttgaggtttagaatgattgttaaatgggtaaaaatctaaatgttgcatcccgacaagtttagtatactaaagatatttagatattgcatgttgttggagatcgacttggaaattgagatgagaagttggtgttttactaagtgaaagtgtatcaaggaaatgacaggagaatgctgagaacagattaatgctttcaaaaaaaaaaaaaaaaaaaaaaaaaaaaaaaaaaaaaaaaaaaaaaaaaaaaaacagttcctgctttccgttggatccccactagttttaaaggccgcccgcccaccggggggtcctacttttggtcccttgttagagtcgagatttcgagatcgcggaaatcacgcgcgtcaatgtttcatgtgtgataatgtcactccttcacactaccccagagcatataatccgaaagcctaaggcgacaagctgttgcgcgaatgatttcattaatcgcatattggtctgtgctcttgccgactttcaatggcatgttttatagtcatgcaatcataaactaccaacgaggagatagggtttgctactgtccctcctccatctctatcctcgactagcgtacggcgtgtgggattcttctctctacttatctcttttcctctcaccttacctcaattataatataccactattctctctgctcgacaatactactctccn

SEQ ID NO: 3055 - DNA, 1557 bp, Glycine max
  misc_feature (273)..(273): n is a, c, g, or t
  misc_feature (291)..(291): n is a, c, g, or t
  misc_feature (320)..(320): n is a, c, g, or t
  misc_feature (329)..(329): n is a, c, g, or t
  misc_feature (375)..(375): n is a, c, g, or t
  misc_feature (663)..(663): n is a, c, g, or t
  misc_feature (692)..(692): n is a, c, g, or t
  misc_feature (914)..(914): n is a, c, g, or t
  misc_feature (1100)..(1100): n is a, c, g, or t
  misc_feature (1166)..(1166): n is a, c, g, or t
  misc_feature (1211)..(1211): n is a, c, g, or t
  misc_feature (1250)..(1250): n is a, c, g, or t
  misc_feature (1262)..(1262): n is a, c, g, or t
  misc_feature (1308)..(1308): n is a, c, g, or t
  misc_feature (1311)..(1311): n is a, c, g, or t
  misc_feature (1386)..(1386): n is a, c, g, or t
  misc_feature (1389)..(1390): n is a, c, g, or t
  misc_feature (1393)..(1394): n is a, c, g, or t
  misc_feature (1421)..(1422): n is a, c, g, or t
  misc_feature (1458)..(1458): n is a, c, g, or t
  misc_feature (1479)..(1480): n is a, c, g, or t
  misc_feature (1485)..(1486): n is a, c, g, or t
  misc_feature (1492)..(1492): n is a, c, g, or t
  misc_feature (1497)..(1499): n is a, c, g, or t
  misc_feature (1501)..(1501): n is a, c, g, or t
  misc_feature (1505)..(1510): n is a, c, g, or t
  misc_feature (1512)..(1514): n is a, c, g, or t
  misc_feature (1520)..(1527): n is a, c, g, or t
  misc_feature (1530)..(1530): n is a, c, g, or t
  misc_feature (1532)..(1532): n is a, c, g, or t
  misc_feature (1534)..(1535): n is a, c, g, or t
  misc_feature (1538)..(1540): n is a, c, g, or t
  Peptide Sequence Number=SeqID_6590
  Probeset Number=SeqID_12834
tgagagagaggatggcgtagtcaatagattgtgtgacgcatgaggtagcattaatataaagtgtattatatatcagtatatagtattgtagtcagccagtgtggcagtgagcggctagtgtacatatccacgtgatgatatgactgctcatcgagacaagtagtatcagtgccgtgtgcatcgcagagtcgtaacgtgtgacatgtctcgagagcaagagagatacgttcgtagtagtacgatcacacgtccacgcgcggacagcctagtgancgcgtgcagtagcgcgancgttcactcgagagtgtagacagagtatnatgtactgngcagcatgctaatacatacagttccatggaggatggcgtgtgtgangcgtgcagaaggcagtgtcgcacgagagagctccagcagcagagtgagtgtgagtggagatatgagtagactgtagagtgatcaaagagatagcatagaatgatgatagggtgagcgtgacggtgcgactgctaggtgaggagttgtgtggaggttcagatggcagcgggtcagtagagttgctcattgagcggttagtgatctagtctatagaacatcatcactataaatatataatgaacaaggtcgcgctcgcgctgtgtgttgtgtgtgatttctgcgcgcgtnctacacacacacacctcacaaccaccacntccctaccacagactcggggagtgcaagagagagagtgatggggtgtggtggggtgtgtcacacacacatcgtttatatatatctctacatcctctctactcatataacgtactcagtctctgcgtagatcggcctcgcgatcgtatgtacggtctgatttcatattgtattgtgtatcgatatattaatgatatgttctacattatcatcaatatattatntattcataatagatatcagagctctatgtagagaaaacctccccgacagcttccagtgctgatattacatctgtatgcgcgcgccgagagcgtcgagtctcgactttgaattggtgtgaggatcaatgtgtgtttctctctttgcaccaccccaccacgcacctcgctgctattgtgttgaagaantcatcgactatgcttttcggcgggcggtgtgtataacatgtagacgggacacctgggagaaatcantgtagaataataaactgcgtaatagctatacgaggtaatatctanacatagcctcctcatactcttttctctattgtatatatnatagtagttggnggtggtctgcttcgaaactcattttgtatgttgttttgtgtgttgntgngtataggcggaacgcagacgcacccctatgccatcatattcgtattattgtctgtctcgctggtggggggggggnggnnacnnaacaaataaccataggttgcgtattgnnggggggggttgtgtgctctctctatttacgagaggngtgtcgggcgcgggggggagnnaatanngtcgcnctggnnnanagannnnnngnnntggggnnnnnnnncgngncnnccnnncgaccacaaccacaaaa

SEQ ID NO: 3056 - DNA, 1378 bp, Glycine max
  misc_feature (1)..(1): n is a, c, g, or t
  misc_feature (62)..(62): n is a, c, g, or t
  misc_feature (64)..(64): n is a, c, g, or t
  misc_feature (155)..(155): n is a, c, g, or t
  misc_feature (169)..(169): n is a, c, g, or t
  misc_feature (184)..(184): n is a, c, g, or t
  misc_feature (217)..(217): n is a, c, g, or t
  misc_feature (483)..(483): n is a, c, g, or t
  misc_feature (732)..(732): n is a, c, g, or t
  misc_feature (780)..(780): n is a, c, g, or t
  misc_feature (861)..(861): n is a, c, g, or t
  misc_feature (870)..(870): n is a, c, g, or t
  misc_feature (1120)..(1120): n is a, c, g, or t
  misc_feature (1185)..(1185): n is a, c, g, or t
  misc_feature (1346)..(1346): n is a, c, g, or t
  Probeset Number=SeqID_12835
ncatcgtgatagacaactcgcgctaaaaatatgtataagagcggtgcgaagtgagtcgacgntngacagagaatatgaatacatacgagaatcacgaggtacgtcgcggctcgcgattgcaactgtatgtaatggcattcgaagtaggccatatncaattatagatgantgtgagatacagtgnatgagcagcagggagattaataggtgggagtancaaggataatgaagcccgagacgcgcgcgaggacatatggagattcggacacgagttatgtattaacaagaacagctgtctatccgtagcattcgacaaagtcgtatagtagtccaacaccacgagtatgcgaaggcttatcatgcctaataggagtaatatgaagaaacgatagttagaagggcgggtaggtgtacaatagtataattctcgccctgacggtccatacgatggaaccagccgtatagcgacccacagctgcatcntctaggcactcgtgacattatgactatataacgataatagccgtacgtgtttggccaatgattgcataggtagaacagggaatgaagcatggtaatataaagagtggattaatgtccattcgtcgatccgaataccaggggaatggtggcacaattcatcaatatgtgcgtgatgtcagaaaggcaatagaacaatggctatgtgagagaagagtatataccataagcgagttttgctataggtgggtngtagcgacgtgtcgatcaggcgttagatcgatggctgcagccagcganagaagtgactccctgggagtgcaatattgtggagagattacacagaagaccgatatgaagcaggtcgtgccatgtggtagngaatgtgtngtcctatattcgcagtgatgcgagagttgtcgcgtagtcgagtacaagagccgagtaatgatgcagatcgatggtcaaggctaagcagcatgtaaacgaggaaggggattatggagtattgcataagtaagagacattcgatagaagtaagtattacaaacttgtgagttcacatcagagaataatgatgaatacacgtctcgacactacagagttagcacataatagtgataatggtaatacaatatanatgagatcctaacgtcgagcatctagtgcaacgacatcatgtaagactagcagaaatatgttgtncaggtattagaagcagtgcagaggggtacacttactatacacattaaggtggtgaagttgagcagataaagtgatggtgtactacgaagtgagtgtgcactacgggtggcggtgtatttagtttgtgtcatctttagtttgattgaatctcgtgtatattnctagtaatagtgacagttgtaatttgaagaat

SEQ ID NO: 3057 - DNA, 476 bp, Glycine max
  misc_feature (447)..(447): n is a, c, g, or t
  Peptide Sequence Number=SeqID_6591
  Probeset Number=SeqID_12836
aaaggctgcagcgtgagagaaaactcgtcgattttcacaaccggagagctcagtctgatctctgaggaatagcagcagccatggcggagaaagcagtcacaatcaggaccaggaagttcatgaccaacaggcttctctccaggaagcagtttgttattgatgttcttcacccaggaagagctaatgtctcaaaggctgagctcaaggagaagttggcgaggatgtacgaggttaaggacccaaatgctatcttcgttttcaaattcagaacccactttggaggtggcaaatcttctgggtttggtttgatctacgacaatgtcgagagtgccaagaagttcgagcccaagtacaggctcatcaggaatggacttgacaccaagattgagaaatcaaggaaacagattaaggagaggaagaacagggccaagaaaatccgtggtgttnagaagaccaaggctggtgaccccaagaag

SEQ ID NO: 3058 - DNA, 1819 bp, Glycine max
  misc_feature (14)..(14): n is a, c, g, or t
  misc_feature (24)..(24): n is a, c, g, or t
  misc_feature (26)..(26): n is a, c, g, or t
  misc_feature (114)..(114): n is a, c, g, or t
  misc_feature (120)..(120): n is a, c, g, or t
  misc_feature (130)..(130): n is a, c, g, or t
  misc_feature (303)..(303): n is a, c, g, or t
  misc_feature (364)..(364): n is a, c, g, or t
  misc_feature (636)..(636): n is a, c, g, or t
  misc_feature (847)..(847): n is a, c, g, or t
  misc_feature (893)..(893): n is a, c, g, or t
  misc_feature (985)..(985): n is a, c, g, or t
  misc_feature (987)..(987): n is a, c, g, or t
  misc_feature (1069)..(1069): n is a, c, g, or t
  misc_feature (1155)..(1155): n is a, c, g, or t
  misc_feature (1291)..(1291): n is a, c, g, or t
  misc_feature (1313)..(1313): n is a, c, g, or t
  misc_feature (1344)..(1344): n is a, c, g, or t
  misc_feature (1395)..(1395): n is a, c, g, or t
  misc_feature (1427)..(1427): n is a, c, g, or t
  misc_feature (1493)..(1493): n is a, c, g, or t
  misc_feature (1532)..(1532): n is a, c, g, or t
  misc_feature (1583)..(1583): n is a, c, g, or t
  misc_feature (1756)..(1756): n is a, c, g, or t
  misc_feature (1777)..(1777): n is a, c, g, or t
  misc_feature (1786)..(1786): n is a, c, g, or t
  misc_feature (1789)..(1789): n is a, c, g, or t
  misc_feature (1791)..(1791): n is a, c, g, or t
  Peptide Sequence Number=SeqID_6592
  Probeset Number=SeqID_12837
atcccatccccacnctgcctcaantntgtatgttcgattgccagagctgttaagtacagacacgaggcagcaagaggccaccgtactaaggtggtagattcgctcattttacgncgcgangcggtggtgnatgacgctttgtatatacgacgtcgacacgacactcgtgatcacgactcggcacgctagggactgtacatacatatatacaaccagagaccggatagatcttatcgtatgtctgtgctcgtcgtgatactcatactatttgacacattgtccgaccagagaccgaagccacgntgatgctccacgtagatcaagtgagagagcgccgctgcgtattcttcgctctgcggccaancgcggagcagcgattagtagtgtgtttgttatagatatactaattatataagggcacgagaagcagaaatgacaaacatatgagaacaagacaaatgacgcgacatcgaccaggacagatatgagagcgtatatcacatcctcaatgcaccgatctattcatatgatcgtgactctcgtctattcacccgcgctctatcgcaatgttaaaatagaagggagtgagagagcaagacgtgacgtatgattaatgagatttctcaacgcacaatnagaccagctacagacaatacgaataagactctcatcgacatgtcgtaagtacctaccactcacacggagtggcgcgccggtgccactgagtagaagaatactcgaacgcggcttcgtctgccgcaaactccaccctacgcccactaggatagggtcctgagagacatcaattagcatcgagcccgccgcctgcgcgctcagagtgcggctncgcgttgagtgatatacttcacagtatatgagagcagtatcatggncgtccgatcgcgtgcatagacataacagtgtatcgaaaacggtttagtgacaatatgatgccgagagtaacgagcgttacatgttggcacantnacacacagtgtctactgctgaatgcgtactgctgcatgtacgtctccatacagtgaacgatagtacatcatataactcgcanacatcatcagcatccactatctacctattgacgcttcgatcggacgataactaagacatggctgatactgttacgtcacttatcantacatcatgccgacgtgctctcgcgagcgtactatctctcattactctagcaatatccacgtgtgacgacacacaggcagacccgcgacggctggtacagtaatcctgcctctcgtcacgccgttagcgccatctntgagactgtaagatagacagangtgtatgttggtatatcgagtagcgtatgcncagaacgaccacgctgttgcgtctgagttacttcgtttctatatcggcacnagactccgtggactgacaccatgcttgtgtgnttacaacagcgttcacccattatgtattacgagtgacacgatagacgaacgagtagcatgtatgantaccagcgacggagacatgactagtgtgatagatctatnatcgttcgtgatgactcacacagcagcgatctcgacgactgctctacgacnatacagcttacgacgtctacgcaaacactgtatacgcgctgatcgcgagtcacgcgagcagatgaggcagcgacgcgacacatgtgcacgcagatactggcagatagactgtcttgtatatagacgagtctatggtatatcggcgctcgccctcatcgtacacacgcgaaccnaccgactgacatctcaggtgncatgcacgntcncncgccgtgcgtgcgcatgagtccgactct

SEQ ID NO: 3059 - DNA, 1469 bp, Glycine max
  misc_feature (114)..(114): n is a, c, g, or t
  misc_feature (224)..(224): n is a, c, g, or t
  misc_feature (233)..(233): n is a, c, g, or t
  misc_feature (247)..(247): n is a, c, g, or t
  misc_feature (496)..(496): n is a, c, g, or t
  misc_feature (1025)..(1025): n is a, c, g, or t
  misc_feature (1235)..(1235): n is a, c, g, or t
  misc_feature (1443)..(1443): n is a, c, g, or t
  Probeset Number=SeqID_12838
caatacaacaacagagatcacctcagactacgcactcgacaccactacactctctctcactggttgcaagtccctactcaccagcacccttctcggaggtatgcgggggcgacngccgccccactcccacagcgttcagtaataagagaattcacgaatcaatggccccccctctccgcactctactatatctcttcaaggagagcaaccagcatatgtctaanacatacacnccttgaactcgatncactatatatgtctaaatcggcaaacttaaactaactcgaaaggatgatcgcgtagatctcgtgaaaatattagatacatacactaacgatcaattgtgcaactaaacgctagcacgatacatagtactacagactctagattcagtcttccactactccgcaagctaaattattcaccataaggagcatcttaatactcatatgctacagcaaagccaacgcctatcatatactgctctttatgatcntaggttagtgatcactagcgcatacctctacactctagtattcactctctccttacccctcacctaccgacgcagaacatccgtacacatagtcacgattagacaatctgacaaaagacacatggacaatcacgtatgccctactctccaatgtaattccaatcatcaccactcgatatcgcgcgatactttatatattgacactctccccacataccacgctcgattctgtctttataaacgctcaactcatccttagcgatcggctatcgcatctcgcatgcgctagatcgccttcgtatcatctactcccctactccgccctacaacaaatggctcccggacaactccatagtcaattattctcacctcgacgcaaccagattatgttctgcaagccactcacttctcatcatcgttctatgctgccattatcacacccatctctactatacacttacatctggctaacctcccgactcactaatcacgacacgactatctttccatgagacgatactacgagacnttgcgcactgcgacctatctttctagtatgataccacaccacagcgaccctctctcctatctcctctataatatatacctaataatgggacatcgccatattagtaatctaatctgcatttctacctactctccacgacacttaagttgatcatataatacgactaatcatacaacgccatatccactcctactactcactccactcatngccacaccatatatctatatctgcataagccaattgcgtgtgctctcgttatatatacactctgtctatacggctctcctcctcactcctctcctctccgtctacccgcttcgcctcgtcgtccactctaggtgcctctatcgcgagcgctgtaaagttgtgttgtatgtatacgatcgcgcacgcttacgtactcgactcgtctccnatcctcctcacctctatctcttgcgg

SEQ ID NO: 3060 - DNA, 1553 bp, Glycine max
  misc_feature (30)..(30): n is a, c, g, or t
  misc_feature (269)..(269): n is a, c, g, or t
  misc_feature (391)..(391): n is a, c, g, or t
  Peptide Sequence Number=SeqID_6593
  Probeset Number=SeqID_12839
cagtaactaatataatagatagcgttgaantatggataacgcttagtctatctactacgtgacgatactatctatggtcgctatctatactatctatatcagagcaagtatctcctaatctcgataatgcttccataacacatgattatagatctatcacgcgctctccatctcacgcacacttcttcatatgctataaagaatatatatatacatatgagtttatcaccacatatgatatatatttccgcaggactctcactaaatgntactaaatctactacactacaatcgttactaatcacctatctctctacgtctcaccaccttatcggctccctctcagcattatatagaataaacaatccatccgagttactctcatctgatnagataacatcgcctattcctcaatttatatctcccagagttatagatattattatcattatcaatatcctaatgatcttatttacttatatatcattaaactgtagtacttcgtcgctaattatcctttatctgaccatttatattatcatatatattacatattatcctactcccgatcaccaacgtttcatatacaactcaatgatacagtagtcggtggcctgaatatgattaattttatgaatgatcgatatgttgtatatctattcaccacacaaactaaaaagaccgcgcgccgcgcctacttcttataacatttatttattgatttacaccatattcaacaagtttgattgtctcatctgttttcttgagctataataaataatactaacctttctacgctcttctactaacatacatcctcgataatatataaatccgacatatattctcatatccgatccgtgcatctacatatgctcactacataacacataccaactaaaatcctcactattatttaactcctctgcatagagcaatgtatcatatctcttcctctcctcttctattccttatctctaaagtaatcaatcgcgcgaaccatataatgtattgtaattaatattaataatttctccccatcaaggttttcatcttcttacagatgatagaaaatacgactatcatctacaaaattattctcatattcccctaccatacatatctcaacaccgcctgattcttaacttctacttttaacttctgtattatacggttattctcaattatataacataacgtcttctccagctcaccccatcacttcattttccttaataatattatatagatgtgttatgactaaccactgaaatgtgacgtcaatcacgtcggaacataaatatctttctcttaaatatccattacatcatataaaaacattaatcattatttccccccctttctcatcccgactaattcatactatcttaaacaaacatcgaataaataataattcttctttctaatgacacttcaaccctcccaaagaggaggaggccccacttcccctaatttcgaaataatacttactactacttactttttcttatactaaattctgtttatatgcccctcccataccttatactcac

SEQ ID NO: 3061 - DNA, 1493 bp, Glycine max
  misc_feature (5)..(5): n is a, c, g, or t
  misc_feature (12)..(12): n is a, c, g, or t
  misc_feature (18)..(19): n is a, c, g, or t
  misc_feature (24)..(28): n is a, c, g, or t
  misc_feature (31)..(32): n is a, c, g, or t
  misc_feature (85)..(85): n is a, c, g, or t
  misc_feature (358)..(358): n is a, c, g, or t
  misc_feature (493)..(493): n is a, c, g, or t
  misc_feature (671)..(671): n is a, c, g, or t
  misc_feature (893)..(893): n is a, c, g, or t
  misc_feature (971)..(971): n is a, c, g, or t
  misc_feature (1019)..(1019): n is a, c, g, or t
  misc_feature (1031)..(1031): n is a, c, g, or t
  misc_feature (1074)..(1074): n is a, c, g, or t
  misc_feature (1081)..(1081): n is a, c, g, or t
  misc_feature (1095)..(1095): n is a, c, g, or t
  misc_feature (1097)..(1097): n is a, c, g, or t
  misc_feature (1104)..(1104): n is a, c, g, or t
  misc_feature (1173)..(1173): n is a, c, g, or t
  misc_feature (1253)..(1253): n is a, c, g, or t
  misc_feature (1311)..(1311): n is a, c, g, or t
  misc_feature (1346)..(1346): n is a, c, g, or t
  misc_feature (1376)..(1376): n is a, c, g, or t
  misc_feature (1414)..(1414): n is a, c, g, or t
  misc_feature (1418)..(1418): n is a, c, g, or t
  misc_feature (1430)..(1430): n is a, c, g, or t
  misc_feature (1439)..(1439): n is a, c, g, or t
  misc_feature (1493)..(1493): n is a, c, g, or t
  Peptide Sequence Number=SeqID_6594
  Probeset Number=SeqID_12840
aaaancccaccnaaaccnnccccnnnnnaanntatctattcaacacccacacccatcttccttcctccctctcccactacatgtnggtatgtgagctcttcgcctctacggagagtcgtatgtgtcatacgtataaagaagtttatttatattgttatttgttctgtgcttataggttaagttgattacatcttattctaaatatatcatgaaggagcaatgctaataaacaatctagaaagatatttaaaacagcgcccatatcgtcacaagactcatatgtggcacaccacagtgccacacagtccaagacattatgtcttcaagttactgtcatattgttcctaatagcgcctanacagcttaatgtaatctctacgtccaagccccacatatttcttctatttcttcacaatgccatcaacttcctctccaaacccgggccaaaacgcccaacagctagatggagtctctaatacaccttctatgcaangtgatacgcaattccatacctccaatctttattgcaactataggtttacgtctctattactacctctttagagtttaatacatcctgaattaattacactgcactcgctacacctagcatccctatcaatctattagacttctacaaactatagtcggcagccaaactagaaaactcntacactgtatcaaccacaacttcctcactgcccctcctcgacaggcacaacacgcctcacttgcgccacacaatgtatcacccctccttcctctaatgataatatctacgcccgccgcttgaactgaacctcctctaacctctgaatatagtataactttgtttatctacttccccttctctaaacactcctcttttaacttctctacagctgcagccggangctcgatttgattacttcaacttgtcaatgaaacctcttctagatcgttaatctggttacatacattctcccatgtangacgactaggagaaatcaacgcttatcacgctactatatatacatacnaaacatcatagntgacaaagcgcgcatgtacaatgtcttgctccctcacatacanactgcgnacctacacataacnanaatatcncgccgctcgcatatccaaagccgtggccttctctatatctttattgaattctgcgtctcgacattgtgnctgcccctcacattctatcatacaaatcgcttgtccgctcttctctaaaactatcactttcttctctctcttttagctantgagattaatatattgccgtcaatgatagagagacactagtgatcatatctcatccgnttgtaccatcgtacccggcgcaaatctctaaccancaccgcgtaaacgtggcacgcatagatatntatgcgacgcaactaacacactcctagtatccccgtancgcnaatgacgaatcncaaacgaanagagacatcggccactgacctcgccacacaatcattcatctatcacgtacactn

SEQ ID NO: 3062 - DNA, 595 bp, Glycine max
  misc_feature (123)..(123): n is a, c, g, or t
  misc_feature (137)..(137): n is a, c, g, or t
  Probeset Number=SeqID_12841
gaaactcccacattcttcaccagcaatgcacgatcttcaatacgaatgcagtttcgatatttgatatcggagtatcggtgtttgagcggctgaattggaattggaaatgcttgaggcaatggnaagtcgtcaatggntggtcacccatttgcagagctgtgagatagcagcgaagagagtatcggtgcttctcgtcacaccaaagggtcgtaacagaatataccgcaccaatccgtgctcgtcggtctccagggggtgttaaaaagccgttgaatagggggatggaatggcttggtcctacaatggttttgagggaactccaagggatggtcttggggggttaacccccccccgaaacaggaaaattaccccttgaatttaaaaaagcgccgggagggacaaatttgggtccgcacaccaaaatcccccaaaggggggaaaaagggtaaaattttggctccctcccaaaacaaaagggggccctctcggggaaaacaaagaaaaagaactttttttttcaaaaaggcccccccaaaggggtttcaaaaaaacaaaaagggcgtgttggggagaaatacccccctcttttgtgggg

SEQ ID NO: 3063 - DNA, 923 bp, Glycine max
  Peptide Sequence Number=SeqID_6595
  Probeset Number=SeqID_12842
gcgacatcatctggtgacagagatttattatagaaggaatgagattctgattacagagaggattttcacgtgatttctgagctatgaattcctactttccttgtatcgtagcgtatgcaatggacaaatccacatttggcagtgtgatcccaacacacgaaaatcacttgagttctgaggttggtccaagaatggcgattgatccacacttattactgttcctgcttctggccccgtcaaacgcacattgctccaaactccaacgccgtcatcttcctccctttgttttcaccgacgcaaccgccctcctcgtcttcaaactaaaagccgacgttaacaaccaccttgacttctcccccctcacgcgcggcctccgcttctgcgcgtggcatggcgtggaatgcaacggccccaaagtgctgcgtctcgttctccaaaacttagatctcggaggcgcgtgggctcccaaaacactcacgcgtctcgaccagctccgagtcctcagcttgcagaacaactcactcaccggacccattccagacctcaccggcctcttcaatctcaaaagtctcttccttgataacaaccacttcaacgcctctctccatccctcactcttctctctccaccgtctccgaaacttggatttctctcacaacaacttctccggacctattcccgccgccttcaccaccatagaccgccacctcagcctccttataagcttcaactccttcaatggttcaatcccgccgtataaccaatcctctcagataatcgtccgagccaaagacaacaacctttccggagcagttctcgtaacaccgccggtagtacgtttagcaccttcccccttagcgttgaaacctccactatgaatcgaaatcataagcgtagaatgccgttgagcacagcctttcttc

SEQ ID NO: 3064 - DNA, 1489 bp, Glycine max
  misc_feature (7)..(7): n is a, c, g, or t
  misc_feature (17)..(18): n is a, c, g, or t
  misc_feature (46)..(46): n is a, c, g, or t
  misc_feature (58)..(58): n is a, c, g, or t
  misc_feature (62)..(62): n is a, c, g, or t
  misc_feature (67)..(68): n is a, c, g, or t
  misc_feature (82)..(84): n is a, c, g, or t
  misc_feature (129)..(129): n is a, c, g, or t
  misc_feature (185)..(185): n is a, c, g, or t
  misc_feature (270)..(270): n is a, c, g, or t
  misc_feature (273)..(273): n is a, c, g, or t
  misc_feature (287)..(288): n is a, c, g, or t
  misc_feature (323)..(323): n is a, c, g, or t
  misc_feature (373)..(373): n is a, c, g, or t
  misc_feature (403)..(403): n is a, c, g, or t
  misc_feature (545)..(545): n is a, c, g, or t
  misc_feature (683)..(683): n is a, c, g, or t
  misc_feature (745)..(745): n is a, c, g, or t
  misc_feature (747)..(748): n is a, c, g, or t
  misc_feature (857)..(857): n is a, c, g, or t
  misc_feature (1009)..(1009): n is a, c, g, or t
  misc_feature (1047)..(1047): n is a, c, g, or t
  misc_feature (1184)..(1184): n is a, c, g, or t
  misc_feature (1195)..(1195): n is a, c, g, or t
  misc_feature (1200)..(1200): n is a, c, g, or t
  misc_feature (1222)..(1222): n is a, c, g, or t
  misc_feature (1272)..(1272): n is a, c, g, or t
  misc_feature (1290)..(1290): n is a, c, g, or t
  misc_feature (1360)..(1360): n is a, c, g, or t
  misc_feature (1389)..(1389): n is a, c, g, or t
  misc_feature (1406)..(1406): n is a, c, g, or t
  misc_feature (1474)..(1474): n is a, c, g, or t
  Peptide Sequence Number=SeqID_6596
  Probeset Number=SeqID_12843
ggggggngggggtggtnnttttgttgtttttgttgtgtgtgtggcncggggcggttcnctancttcnnctcccctctctccnnnaccacctcgtgtgtgactccccccaccggtgtgtggacgcgcgtntctccctagcaaagtcaggtggggtaccccccgcggggggcggggcggggagagcngcgtcttgtctctctcttcctcttctcttcgaccgcacagacgaaccactgcgtccctgtttcttctttttttttattctttgtnctntctcctggtggtcnntgggcgctggaccgccgagcagcgagcgacgtggngcgatgcgtgcgtggtgctccatctcatcttactactccgctgttctcgnggttactgtttcgtggtgtgtttgtctgcntgtgccgcacaacacacgagaatgatgatatagatataatgtgataggtaaacagtagtgagcgcagacgcatcgacataaaacgtagtataacatgaacgacgcactaccttaatattaatccttcatttacgtgatgtcnttattcttctcttctccgtattgtttcgctatcactctgatactcctctcttctccgctcttacttctccttgtgtattatattgtgctgatctctcttgacagtgagtcgtgaagacaacaaacacaacgacaatanctatattgagcatatatattatactcaactaattttatataacaagaaaataaagacaacanannacaaaagacactcgcagatcacatgaatcgcacgtcatatgagtacctcctgtttacgctatgattgatgtgtcgaatgtagtttatcatctccggcgtccagtgtctngtcatcgattcccagacgtatgtgagtactatacccacccacacccactctcctgtctctacgtatccacactaatactactcatactgcgtcgtggtctctgtgatatacctcacactgacacacagccgacaccgcacacatcgacgcgntcgatgtttagttagttgtagcttcgcctcaaacagcntagacgaatagtgtaggttcgtgtagcgctgctgtatgccggcgctgtggatactatactcactcatgctctcaacccatctactcacgcatcgcacagcacaggtccactcgcggaacgcgccacctcaaggctancacagacacancaacnaacacttatgaagatacgacgnaagaacatgtactataaagactcataataatactcacacatatcagtaangacaactcgagaaactcnacatattgtgttccgcatctctctctgtgttcttcgctcgcgtgcgaatgctgctttgcctcttatgtcnctgattctgcgtgtgtctgttatcacttntgatgagagtgagtacnactatctcctacactctaccgctagcttgactctctcgttcttgtgtgcttcgttcgctctgcgtctngcgtacgtgcgctga

SEQ ID NO: 3065 - DNA, 2065 bp, Glycine max
  misc_feature (9)..(9): n is a, c, g, or t
  misc_feature (61)..(61): n is a, c, g, or t
  misc_feature (71)..(71): n is a, c, g, or t
  misc_feature (83)..(83): n is a, c, g, or t
  misc_feature (99)..(99): n is a, c, g, or t
  misc_feature (106)..(106): n is a, c, g, or t
  misc_feature (122)..(122): n is a, c, g, or t
  misc_feature (148)..(148): n is a, c, g, or t
  misc_feature (197)..(197): n is a, c, g, or t
  misc_feature (231)..(231): n is a, c, g, or t
  misc_feature (234)..(234): n is a, c, g, or t
  misc_feature (262)..(262): n is a, c, g, or t
  misc_feature (291)..(291): n is a, c, g, or t
  misc_feature (295)..(295): n is a, c, g, or t
  misc_feature (298)..(298): n is a, c, g, or t
  misc_feature (311)..(311): n is a, c, g, or t
  misc_feature (314)..(314): n is a, c, g, or t
  misc_feature (317)..(317): n is a, c, g, or t
  misc_feature (337)..(337): n is a, c, g, or t
  misc_feature (367)..(367): n is a, c, g, or t
  misc_feature (370)..(370): n is a, c, g, or t
  misc_feature (395)..(395): n is a, c, g, or t
  misc_feature (398)..(398): n is a, c, g, or t
  misc_feature (413)..(413): n is a, c, g, or t
  misc_feature (426)..(426): n is a, c, g, or t
  misc_feature (469)..(469): n is a, c, g, or t
  misc_feature (503)..(503): n is a, c, g, or t
  misc_feature (527)..(528): n is a, c, g, or t
  misc_feature (535)..(535): n is a, c, g, or t
  misc_feature (537)..(537): n is a, c, g, or t
  misc_feature (539)..(539): n is a, c, g, or t
  misc_feature (553)..(553): n is a, c, g, or t
  misc_feature (608)..(608): n is a, c, g, or t
  misc_feature (641)..(641): n is a, c, g, or t
  misc_feature (716)..(716): n is a, c, g, or t
  misc_feature (831)..(831): n is a, c, g, or t
  misc_feature (863)..(863): n is a, c, g, or t
  misc_feature (931)..(931): n is a, c, g, or t
  misc_feature (966)..(966): n is a, c, g, or t
  misc_feature (970)..(971): n is a, c, g, or t
  misc_feature (973)..(973): n is a, c, g, or t
  misc_feature (975)..(975): n is a, c, g, or t
  misc_feature (979)..(980): n is a, c, g, or t
  misc_feature (989)..(989): n is a, c, g, or t
  misc_feature (1008)..(1008): n is a, c, g, or t
  misc_feature (1010)..(1010): n is a, c, g, or t
  misc_feature (1013)..(1013): n is a, c, g, or t
  misc_feature (1017)..(1017): n is a, c, g, or t
  misc_feature (1019)..(1019): n is a, c, g, or t
  misc_feature (1053)..(1053): n is a, c, g, or t
  misc_feature (1114)..(1114): n is a, c, g, or t
  misc_feature (1116)..(1116): n is a, c, g, or t
  misc_feature (1197)..(1197): n is a, c, g, or t
  misc_feature (1201)..(1201): n is a, c, g, or t
  misc_feature (1235)..(1235): n is a, c, g, or t
  misc_feature (1260)..(1260): n is a, c, g, or t
  misc_feature (1285)..(1286): n is a, c, g, or t
  misc_feature (1293)..(1293): n is a, c, g, or t
  misc_feature (1318)..(1318): n is a, c, g, or t
  misc_feature (1321)..(1321): n is a, c, g, or t
  misc_feature (1329)..(1329): n is a, c, g, or t
  misc_feature (1338)..(1338): n is a, c, g, or t
  misc_feature (1369)..(1370): n is a, c, g, or t
  misc_feature (1376)..(1376): n is a, c, g, or t
  misc_feature (1412)..(1413): n is a, c, g, or t
  misc_feature (1424)..(1424): n is a, c, g, or t
  misc_feature (1453)..(1453): n is a, c, g, or t
  misc_feature (1482)..(1482): n is a, c, g, or t
  misc_feature (1513)..(1513): n is a, c, g, or t
  misc_feature (1515)..(1515): n is a, c, g, or t
  misc_feature (1521)..(1521): n is a, c, g, or t
  misc_feature (1551)..(1551): n is a, c, g, or t
  misc_feature (1565)..(1565): n is a, c, g, or t
  misc_feature (1597)..(1597): n is a, c, g, or t
  misc_feature (1606)..(1606): n is a, c, g, or t
  misc_feature (1635)..(1635): n is a, c, g, or t
  misc_feature (1657)..(1658): n is a, c, g, or t
  misc_feature (1699)..(1699): n is a, c, g, or t
  misc_feature (1702)..(1703): n is a, c, g, or t
  misc_feature (1717)..(1717): n is a, c, g, or t
  misc_feature (1751)..(1752): n is a, c, g, or t
  misc_feature (1754)..(1754): n is a, c, g, or t
  misc_feature (1836)..(1836): n is a, c, g, or t
  misc_feature (1940)..(1940): n is a, c, g, or t
  misc_feature (1946)..(1946): n is a, c, g, or t
  misc_feature (1952)..(1952): n is a, c, g, or t
  misc_feature (1989)..(1989): n is a, c, g, or t
  misc_feature (1992)..(1993): n is a, c, g, or t
  misc_feature (2006)..(2006): n is a, c, g, or t
  misc_feature (2009)..(2009): n is a, c, g, or t
  misc_feature (2020)..(2020): n is a, c, g, or t
  misc_feature (2023)..(2024): n is a, c, g, or t
  misc_feature (2035)..(2035): n is a, c, g, or t
  misc_feature (2045)..(2046): n is a, c, g, or t
  misc_feature (2062)..(2065): n is a, c, g, or t
  Probeset Number=SeqID_12844
catatgtcngcactagtcgagtacgtcagacgagtactgcgatcgacgcgagtcgtcgtcnacagtcacgnacgctgatcagngcacatgcagcgacanagtccgntgcttcgctcgacgtnaactcgatcagcgactgagcaacgancgagcgctgccgcgaagtacatcgacacgcaccgtagcgagctatgacntcatcagctaccgatatcgacccgtagcagccangcncatagtgacgatggcgcgtagcactcangagtcgtgcgttcgttctgtacattagancacnttntcatcacgaacgntgntgncaccagtcgacacacagcgngcacgacgcgcagcatgtcggaatgagagnctncgagacagcacgacggaactgacantcnacctacggaccgcgnccacgctagcatnatcactagctgacgagtatcagcgatctagaacgagcctgcanctgtgtaagtgatagtgacgtgcccgtacacgcngctctcaccaacgcgacgcgtagnncgcgtgngnangccgatagtacgancgtacgactacatgcgtcgtacgacacgatactctgtgctgtcacgacgtcgcantcgactcaacgatgtcatgcacgtacgcatagngcacgcgagacgtcggtactcgaacgcgcacgagcaggacaaagtgagacgacgcgcatactgatcggagatagngtgatgccacatcagacgcgcagaaggatcgatgcgtaaccacaccacacgaccacccataccaacgcacacagacgtcacatacgtatctaagcatatagattgtacacgcgcncgcttgcgggggtgacgcgcgcgagctcgcgncatcgacacgcatacatgccatataacatcatacgtgtatacatagaactcgtctagaggtgttatancctgtgtctttatttatacctcgcgtttgtgtctntttnntntntttnntatttatcnttctaatcttatattatgncnaanatantnattatctaatcacttcagatttctcactcactgncatactactcatgtcgccgggttatggtgcgtcgtatatgattcctcgcggtgattacagngnccagcctgcgagacaggctgtgaggaggctgtcgctctgagtaacgcagtcgacgacgggagacagtgacacagacttcanctantacatcgagacatgacacacgagcgaacagacancgtagagagcaaatacatacacgancgcgcgcgccagacagggagagganngagcganacagctcgatcagcggagccagcanagnagacaganatctcattntagtgtgcgatctcgagcactttatatcaanngattangctaagtagcgcatgcactatctcatcgtctggatnntgtctacactnactgtgatgtcgtagtgataggagaaganatgtgtgtatcaggtgtaagcgctaagtngactctccgacgcctccgcgcatagcatccntnctcgcntgtacgctacagcgtcgtacgtcagcgctncgccgcgtgtcagngcgcgcgtactgcgagaggcgatggtgcgctnacgctacangcgcgcgccgcgtgccgcgagctataganagacctatgtgggcaaatgcgnngacgtgacgtactctcggcgcgccagcagagcgcaccaacncannccaccagactacanagaagacaacagacgtaagtacgccagataaaannangcgccgcagaccagtgcgatgcaataacacagacaggacatacggcacgagtgtatagtgtctgtgcctatgataggagtanagaagagcgcatcctcctctgcctcgtgtcggcgcgtgcagagaaggtgtggatgtctgcatcgcctctcctctccgacatagtagacgacctactcctatcgnctctcncaccantctggtagagtaaataagagggcgcccgcagcgacgnggnnggcagccgggtgnggnggaaaagaggnagnnagaacgagagngagatcagannaagggaaggaggtttnnnn

SEQ ID NO: 3066 - DNA, 458 bp, Glycine max
  Peptide Sequence Number=SeqID_6597
  Probeset Number=SeqID_12845
aattagtcttgcaggagcaagagcgatgtctccgactgatccccgcctcctcttcatcctgtttgtcgtctttgccccggttccggccagggcggtcgacccgaccgtattggccacttttgcgggcatggggatccgcgtctccaccatggagttcgtcatcgacctggacgacctcaacatgaggcaggacatgctgataaccgtggcgacggcgagaagcatgaagagcgtcgagggactaaaggtggcgctcaagcagaccgacatcacggagctgccgacggaagtagtcctcctcaacttggtggtgccggagcggggctcctgcacgctggcgattcgagctgacaatttttatctgttagcatacacaaatgaccgtttggagtggcaggcattcctcgggagggagcacctggttccgacatcgaccccgctcccgttcacgtcggagt

SEQ ID NO: 3067 - DNA, 1661 bp, Glycine max
  misc_feature (1)..(1): n is a, c, g, or t
  misc_feature (11)..(11): n is a, c, g, or t
  misc_feature (18)..(18): n is a, c, g, or t
  misc_feature (41)..(41): n is a, c, g, or t
  misc_feature (60)..(60): n is a, c, g, or t
  misc_feature (75)..(75): n is a, c, g, or t
  misc_feature (86)..(86): n is a, c, g, or t
  misc_feature (119)..(119): n is a, c, g, or t
  misc_feature (132)..(132): n is a, c, g, or t
  misc_feature (150)..(150): n is a, c, g, or t
  misc_feature (309)..(309): n is a, c, g, or t
  misc_feature (393)..(393): n is a, c, g, or t
  misc_feature (408)..(408): n is a, c, g, or t
  misc_feature (432)..(432): n is a, c, g, or t
  misc_feature (434)..(434): n is a, c, g, or t
  misc_feature (456)..(456): n is a, c, g, or t
  misc_feature (484)..(484): n is a, c, g, or t
  misc_feature (501)..(501): n is a, c, g, or t
  misc_feature (519)..(519): n is a, c, g, or t
  misc_feature (530)..(530): n is a, c, g, or t
  misc_feature (567)..(567): n is a, c, g, or t
  misc_feature (569)..(569): n is a, c, g, or t
  misc_feature (574)..(574): n is a, c, g, or t
  misc_feature (620)..(620): n is a, c, g, or t
  misc_feature (651)..(651): n is a, c, g, or t
  misc_feature (654)..(654): n is a, c, g, or t
  misc_feature (901)..(901): n is a, c, g, or t
  misc_feature (929)..(929): n is a, c, g, or t
  misc_feature (946)..(946): n is a, c, g, or t
  misc_feature (1088)..(1088): n is a, c, g, or t
  misc_feature (1094)..(1094): n is a, c, g, or t
  misc_feature (1096)..(1096): n is a, c, g, or t
  misc_feature (1182)..(1182): n is a, c, g, or t
  misc_feature (1363)..(1363): n is a, c, g, or t
  misc_feature (1385)..(1385): n is a, c, g, or t
  misc_feature (1389)..(1389): n is a, c, g, or t
  misc_feature (1526)..(1528): n is a, c, g, or t
  misc_feature (1530)..(1530): n is a, c, g, or t
  misc_feature (1538)..(1541): n is a, c, g, or t
  misc_feature (1543)..(1543): n is a, c, g, or t
  misc_feature (1651)..(1652): n is a, c, g, or t
  Probeset Number=SeqID_12846
ngatgagacgnacgatcntcgagagtttgatgtcgtagcanagtatacgaagatcgagcngagaggctaggtganagagagatcantgtatcagtatgtacgtgatgatgttaggaccntcatcactcatcnatcgagggatgttaccgnatccatcatcctagtacgtcggatatctgtgttgtggcgcacagtcgattcgtctcgtactcgcacgcggcttgtatacttcttctcagtagcttcatcatgcatatcatacatatgtgacgagtacatcagtgctcactcacgactatcatagatgantgattcgcgtgggtgtgagcgcatgtcgtatagtcaatgcatagcgctgacataacgatccgtagtattccaattactgtgtantaatgtatctacgantaatgcagcgtggatgacgacggnangggggagagaggagaagagatntcaagttgtctcataactaaatattcangtgaaaatagtgagtanaagaaatgagtctatcancaactactacncatagacgacatcatatgtatggagggtgtgtctgtntntcatnctaatggtcatcacacctccacacacacaccatcctcatgatatgngatgagtagacaacgtacacgacatagcagncgnaggtggggggtccactactgcgcactacactatgaaggcgtataatattgtcattcattatatagtaggttcaggcataacgatgatgatcgagcgcgctatgttttagagtgctctacaacttagaatactgagtgtctaagaagatggtagaagttatatagctatagtctacatatatcttatcagcattctctatgtcgatgtgtgagtgatctgagtctgtatgctatgatctatcatatgnttatatgtattgcatgatagtatattanctactaccaccaatatntacaatccaggagggcatactcgcgaatctactctatcgtctttatgattgagtgtgtgcacgttgcgtcgatgtagcacatatgatatctatgtatatgatcatattatatatatatgatagtcagtctttacttatatantttttntntactcgatatataatatatttaatatttattaattataatatttgtatgtgaggttatactattagcgtcatctcccatctataanatccatatgtgtgtgtgtggacactctctacaacatattcttactgtatatattatgtatatgagtgtgtgaaagaatgtacatcatcctactccgctcataaaatatttatatatatacttattagcacatatcgtcaataacctatacaacatatagagcgcacgcagtgttccctcgnacgatacctatcatgtcagccnacanaccctctcgcaccgtctttacttcgtctgctgcagcatgtatgcgtcgcgtgtggtgaaaatcacatcacgagtatttaggtagtggtattaccacatacttccgtgaacgcactgaagttaccataaacgcggggnnngngggcggtnnnntncctcctcccgattttttacggctgactatcataacgtagctcttgttgcgtgactttgatatagaagatattagaatatatgtataaacgcaacatcgttaaaaattnnatattataa

SEQ ID NO: 3068 - DNA, 525 bp, Glycine max
  misc_feature (19)..(20): n is a, c, g, or t
  misc_feature (105)..(105): n is a, c, g, or t
  misc_feature (294)..(294): n is a, c, g, or t
  misc_feature (306)..(306): n is a, c, g, or t
  Peptide Sequence Number=SeqID_6598
  Probeset Number=SeqID_12847
tcgagtcagctacgtaggnnccccccccccaaataaaacaatttcaggaacggtaattcaattaccaatataagcaaatataaacacaaatataacacacattantaacaccaccacaaccaacaacatcattctcggacaatctacaaatccaaaccaatctacaaatcacaatgctacaaataatacctattctacaaatcctgctgcttctaattctagtaataatatcgtttcttctacttttgcgggatcttccattggaggtgggatctcacatttgggccaatctanaacaaccacgcntggtcaatctacaactcacttataccatcctacaaatgccaactcatcacttcctctccctctctctcatcatcctctcccacatccacttcctcttcatccacgtcccctggccagtatttcagattccagtttacaaacaaataatcatcatacgtcatcagatgccacgtcatcatctgcatcaatacacgctacgtcggtttcgctttcgaatct

SEQ ID NO: 3069 - DNA, 397 bp, Glycine max
  Probeset Number=SeqID_12848
cattagcagctgtattcctcctcctccgtaacgagatctcctgtgctgctctccgtctaccagggtcgagacaccatcacctcgtatcgccgacgtcctgcaccatcgtgtaccagtccctgggctagagggcatcttctactcttgaacctggtgagcctatgacttgtggaagacctacagccctcctcagagatgttcaagcacggagcatccatccggtttccaagaatccttcagtcatatgatgtgtactctgcagctgctgtcattcaagatgactgtgctacactgaagactgatactctgaacctgagagactttagtttctgccctagttccacgatccagtcagtcgtggaagctcctgatccatccacatgacgatgtcatcctt

SEQ ID NO: 3070 - DNA, 1970 bp, Glycine max
  misc_feature (1)..(1): n is a, c, g, or t
  misc_feature (37)..(37): n is a, c, g, or t
  misc_feature (48)..(48): n is a, c, g, or t
  misc_feature (50)..(50): n is a, c, g, or t
  misc_feature (53)..(53): n is a, c, g, or t
  misc_feature (78)..(78): n is a, c, g, or t
  misc_feature (84)..(84): n is a, c, g, or t
  misc_feature (87)..(87): n is a, c, g, or t
  misc_feature (94)..(94): n is a, c, g, or t
  misc_feature (106)..(106): n is a, c, g, or t
  misc_feature (115)..(115): n is a, c, g, or t
  misc_feature (142)..(142): n is a, c, g, or t
  misc_feature (145)..(145): n is a, c, g, or t
  misc_feature (166)..(166): n is a, c, g, or t
  misc_feature (169)..(169): n is a, c, g, or t
  misc_feature (203)..(203): n is a, c, g, or t
  misc_feature (212)..(212): n is a, c, g, or t
  misc_feature (217)..(217): n is a, c, g, or t
  misc_feature (271)..(271): n is a, c, g, or t
  misc_feature (297)..(297): n is a, c, g, or t
  misc_feature (310)..(310): n is a, c, g, or t
  misc_feature (316)..(316): n is a, c, g, or t
  misc_feature (329)..(329): n is a, c, g, or t
  misc_feature (354)..(354): n is a, c, g, or t
  misc_feature (356)..(356): n is a, c, g, or t
  misc_feature (393)..(393): n is a, c, g, or t
  misc_feature (413)..(413): n is a, c, g, or t
  misc_feature (415)..(415): n is a, c, g, or t
  misc_feature (448)..(448): n is a, c, g, or t
  misc_feature (458)..(458): n is a, c, g, or t
  misc_feature (546)..(546): n is a, c, g, or t
  misc_feature (622)..(622): n is a, c, g, or t
  misc_feature (637)..(637): n is a, c, g, or t
  misc_feature (696)..(696): n is a, c, g, or t
  misc_feature (708)..(708): n is a, c, g, or t
  misc_feature (850)..(850): n is a, c, g, or t
  misc_feature (940)..(940): n is a, c, g, or t
  misc_feature (1084)..(1084): n is a, c, g, or t
  misc_feature (1358)..(1358): n is a, c, g, or t
  misc_feature (1360)..(1360): n is a, c, g, or t
  misc_feature (1362)..(1362): n is a, c, g, or t
  misc_feature (1432)..(1432): n is a, c, g, or t
  misc_feature (1534)..(1534): n is a, c, g, or t
  misc_feature (1546)..(1546): n is a, c, g, or t
  misc_feature (1574)..(1574): n is a, c, g, or t
  misc_feature (1728)..(1728): n is a, c, g, or t
  misc_feature (1831)..(1831): n is a, c, g, or t
  misc_feature (1875)..(1875): n is a, c, g, or t
  misc_feature (1897)..(1897): n is a, c, g, or t
  misc_feature (1901)..(1901): n is a, c, g, or t
  misc_feature (1905)..(1905): n is a, c, g, or t
  misc_feature (1908)..(1908): n is a, c, g, or t
  misc_feature (1919)..(1922): n is a, c, g, or t
  misc_feature (1939)..(1939): n is a, c, g, or t
  misc_feature (1942)..(1942): n is a, c, g, or t
  misc_feature (1944)..(1944): n is a, c, g, or t
  misc_feature (1949)..(1950): n is a, c, g, or t
  Peptide Sequence Number=SeqID_6599
  Probeset Number=SeqID_12849
ntcgtcagctcacgtagtcgtgtatcacgaagcgtangtcgagatgcngntantgatgggagcacactagtagtacgntcgganagnatggacnaaatgtattacnaaccgacgnggcatgggataagtagctacgaggatnatnggttaaagtctatgtgatgangangaagtacggtggtagtggtcagagtggacatgtnagagatagnagatntagtcgaagtatcagatcatgatggtgcggccacgcagtcgtgtcgtcgtgtcntcatcgtctgcgttcctggcgtcgcnacattcatactgntgctcnctcccgtctcgtnagtcgagccgtcctccgctcgtgcncnccgacacacaccgcagccacatacactcagactcgangctcggtcacgatgacgacntnattcgagacgagacacgacacacagcatcagcnccagcgtagnaggagtcacgagtcatagtcgcagagcatggatgtgtatgatgaagtagcaccacaagcgtagagactatgtcgcggtgagactaganttagtcagaatatggatgcaagcatgcaccacgagcgtgtcgtacgcgcagtgttagatgtgcacgacgtgacganctgcacagtggatgncgcgccgtgagcgagcggatgtgacatgggcgtgacgtgggtgagtgatagcaggaganacggagcggcgntgcgcgatgagagagacagcacggaggcgcgcgctgcgcgcacacagtcgtgacagccgaggaagagcgacggagcgcatcgcacgtcgtgtcgcaacacacaaggacgactcgcgtcgtcgccgccacgctgagagcgtgncccgcaagcacctcgcggctgctgctctatccagacaacagagcgcgaccatcgaacaaccgacgcatacacgtacgcgcccatgattantcgtgaggagcgtccgtagtctgtgagactgagtactgacagagagagaataaggcgagtcgatacacatcattcgtcaaagcatagggactatcattataggtaatccgtagacacgatgctacattatcatcatactaaganatgacagtcataatatcacatatacgacaccaaaacataaacatacaatatatcggatagtaattatcacgatattatacgattgcgagtagtactaacgaagacataggtgcggtggagagcacgcgcgaccatgcgctgcggcaatgtgcgcagaactgtcgcgcgcgatacaaataggaacgctatcggtgacacagcgggtgatgtcggtagaaacaagactgtagcaaccactcctacgaacatttgatgccacatggttgcgttctantncntccacacacaccaacactagtggtgccagacacagatagcatctacaacggcgcgtcgctgtctgacaanttacaacatccaatcactcctcctgtaccgcgatactcaacgcctccaccgagcacgccgagcaagacgcagcatcaacgcgcagcggccaagcaacgccgncgcggcgcaccncctccccgcgccgcgcgcgcgctgcgcngggcgtggtcctgaaccactagcacggcgatctgggcaggaggacgcgacaaaaacaccacacaacggactacgacgggcgtgccgcacataccaccgaccaacaccgagacgccgcacacatacacggacgacgcgccggccatcggcgcgcnctgtcagcgaggacccgcactccgaccacaacgacacccacgcaaggagcactcattcggccggcgctagctggcggggtcatttctttcatcaaatacagcnacccctgcgctcctcccacgcacaccccgggacggcggcacccnaccccgcctctcatcaacaaanaaancaancanaagagggagtnnnngaagataagagggaganagnangagannggagagggggggaggggggg

SEQ ID NO: 3071 - DNA, 1869 bp, Glycine max
  misc_feature (1)..(1): n is a, c, g, or t
  misc_feature (37)..(37): n is a, c, g, or t
  misc_feature (94)..(94): n is a, c, g, or t
  misc_feature (119)..(119): n is a, c, g, or t
  misc_feature (130)..(130): n is a, c, g, or t
  misc_feature (223)..(223): n is a, c, g, or t
  misc_feature (226)..(226): n is a, c, g, or t
  misc_feature (270)..(270): n is a, c, g, or t
  misc_feature (299)..(299): n is a, c, g, or t
  misc_feature (346)..(346): n is a, c, g, or t
  misc_feature (353)..(353): n is a, c, g, or t
  misc_feature (517)..(517): n is a, c, g, or t
  misc_feature (586)..(586): n is a, c, g, or t
  misc_feature (596)..(596): n is a, c, g, or t
  misc_feature (649)..(649): n is a, c, g, or t
  misc_feature (700)..(700): n is a, c, g, or t
  misc_feature (717)..(717): n is a, c, g, or t
  misc_feature (778)..(778): n is a, c, g, or t
  misc_feature (784)..(784): n is a, c, g, or t
  misc_feature (796)..(796): n is a, c, g, or t
  misc_feature (896)..(896): n is a, c, g, or t
  misc_feature (948)..(948): n is a, c, g, or t
  misc_feature (960)..(960): n is a, c, g, or t
  misc_feature (983)..(983): n is a, c, g, or t
  misc_feature (1097)..(1097): n is a, c, g, or t
  misc_feature (1280)..(1280): n is a, c, g, or t
  misc_feature (1284)..(1284): n is a, c, g, or t
  misc_feature (1376)..(1376): n is a, c, g, or t
  misc_feature (1431)..(1431): n is a, c, g, or t
  misc_feature (1477)..(1477): n is a, c, g, or t
  misc_feature (1625)..(1625): n is a, c, g, or t
  misc_feature (1627)..(1628): n is a, c, g, or t
  misc_feature (1631)..(1634): n is a, c, g, or t
  misc_feature (1697)..(1698): n is a, c, g, or t
  misc_feature (1782)..(1782): n is a, c, g, or t
  misc_feature (1834)..(1834): n is a, c, g, or t
  misc_feature (1847)..(1847): n is a, c, g, or t
  Probeset Number=SeqID_12850
ncattcacgtagtgatagtcatgcgacgatgactcancgatctacgacaaaggatcaactaacagcacgagcagcagtactcgctctgcgtgtngatagtgagtatcgccgtggcgagnggcccgcaagngagtgtactgacgagtagcgtagttgcgtgttaagataaatagagtggagactaacgagcattacgagtcatcacacacacgacacgtaggtnacnagaaagttgcatatactataatacagtaaaccacatcacgaaantatatagactaatgtatacagcgcgacancaacttaactgctctatgacgtcagtatatacgctagcatcacgganctatacnaaagctgactactatatctcagtcgcatcgacatagcacatgatcggatctacgtcgatgcagcttcatcgtgatgataaccgaaataacgaagtgatagacgatcatagtgcatacgatgagcacgaccgtatcatgctcgacgtctcagcgtgcttccagcncacccttctcatcagtactcgtgcagtagtcgtcacacgagacgaattacttgtatctcatatgagtantagatgcagngtatgattatgtatgtcgggttatgtgcgcatctcgagcgctactcagtgctntgcgactcgatgtgtcgtatatgtaacagtggatacatcactcactgcgtncatgtgtcagcacacancaaaccgacacacacacgacgcgcatattcactcatcatatctcgatgctacaggatcatnaaacgncagttctgatanttagcgatcgagatatcgacaattaactagagagagagagcggtagtgatagtaagacatatcgagactcacaacatatacataagtaatacatgatacntgtaacgtgcatattggtaagcgcgatcgctaggcgatagtctgtgattatnctcgagatcatnacatcacaatagtgtataacatnagaatcacatcatctagctacgcacggcttacatacgctatcgcgtatgcgatcgtgtactacttgcagtatgtacatgtcacatcgagataatacaatacatcgcatgttcgnttattattatcgcatgtcacacgtaagaccaccacgaaccaactcaaacacaccacgagagcgcgacacgtagacgagagacaacatcacgtacatcagacacacaacaatcccatcatcaaccgtatagatacatcagcagtaagcacggcgacataataggatcgggaaggatgggagtgngtangtgtgagaaatattatgttgttcgtgtgtgttgttggctttgcgtctgtgtctattttctctccctcactttatgtcgatttctttttgtgntgtcataatatgatacacacacatctcgcctatattgtattcgtggcgagtcatntctgtttgcgttgtgtacatcaacccgattatgatcggacttaagnggagaggaaagtaggaactatcgcagatgcatctacatcacaagtcataacaatgggcggtggacatagctcgcacataagatggacagctaggtctcagcgatcgcaagttgcatagtgcatagtgatgttaagcggagcaatagancnncannnnatatatctctgtttctagtgttgttggtgatagtatgtccacgccaggtgtcgtcgggttgtnntattctcataatcaataataaataatagataggtgatacttacactacataaaatataaacaatatacaatataaaaaaagagnaatcaaagaccagaccggaaagaaaagcagagcaagagaaacaaatcattantatttattttaantaatacgtactaaaagcgctta

SEQ ID NO: 3072 - DNA, 915 bp, Glycine max
  misc_feature (1)..(293): n is a, c, g, or t
  misc_feature (894)..(915): n is a, c, g, or t
  Peptide Sequence Number=SeqID_6600
  Probeset Number=SeqID_12851
nnnnnnnnnnnnnnnnnnnnnnnnnnnnnnnnnnnnnnnnnnnnnnnnnnnnnnnnnnnnnnnnnnnnnnnnnnnnnnnnnnnnnnnnnnnnnnnnnnnnnnnnnnnnnnnnnnnnnnnnnnnnnnnnnnnnnnnnnnnnnnnnnnnnnnnnnnnnnnnnnnnnnnnnnnnnnnnnnnnnnnnnnnnnnnnnnnnnnnnnnnnnnnnnnnnnnnnnnnnnnnnnnnnnnnnnnnnnnnnnnnnnnnnnnnnnnnnnnnnnnnnnnnnnnnnnnnnnnnnnnnnnnnnnnnnnncgaatctatgtgatttgctctgcgacccctaagcacaagcaacgacagggcttggcatcatttgcaagggaaggcccttctctctcagtgtcatctaacaaaagtaattgcgaaactatgaacaagccggctcaaatttcgcgagaaagtcagaattatagtttaccgtcaaaggcatcgattgtctatgttgtatggatggagggtgggaatgggcctctattctgtctattaagttgcataaataattagtaaccttgaacattacaagtaataagtgtgaagagattgataaacaacggaactggattaaactcttaataatgttgtctcctgattgtatcctcgtggttgatgtggtctccaccgttatggggttctgccgtgcgcaattgagagcccccgcctccgtatctcgtcagccgaaggcgagcctcgtttgcaacgtagtgtcctctatatcgatatgttacatagtttttgccattgcgctctcctccttatcacttgagccaaagacgagaattttttgcaacgtattgtcatctatatctatatgttacatagtttttgccatcaaaaaaaaaaaaaaaaaaaaacnnnnnnnnnnnnnnnnnnnnnn

SEQ ID NO: 3073 - DNA, 1425 bp, Glycine max
  misc_feature (1)..(1): n is a, c, g, or t
  misc_feature (15)..(15): n is a, c, g, or t
  misc_feature (39)..(39): n is a, c, g, or t
  misc_feature (42)..(42): n is a, c, g, or t
  misc_feature (82)..(82): n is a, c, g, or t
  misc_feature (110)..(110): n is a, c, g, or t
  misc_feature (212)..(212): n is a, c, g, or t
  misc_feature (365)..(365): n is a, c, g, or t
  misc_feature (380)..(380): n is a, c, g, or t
  misc_feature (391)..(391): n is a, c, g, or t
  misc_feature (432)..(432): n is a, c, g, or t
  misc_feature (450)..(450): n is a, c, g, or t
  misc_feature (469)..(469): n is a, c, g, or t
  misc_feature (474)..(474): n is a, c, g, or t
  misc_feature (524)..(524): n is a, c, g, or t
  misc_feature (605)..(605): n is a, c, g, or t
  misc_feature (611)..(611): n is a, c, g, or t
  misc_feature (656)..(656): n is a, c, g, or t
  misc_feature (669)..(669): n is a, c, g, or t
  misc_feature (745)..(745): n is a, c, g, or t
  misc_feature (950)..(950): n is a, c, g, or t
  misc_feature (983)..(983): n is a, c, g, or t
  misc_feature (1030)..(1030): n is a, c, g, or t
  misc_feature (1081)..(1081): n is a, c, g, or t
  misc_feature (1086)..(1087): n is a, c, g, or t
  misc_feature (1091)..(1091): n is a, c, g, or t
  misc_feature (1108)..(1108): n is a, c, g, or t
  misc_feature (1116)..(1116): n is a, c, g, or t
  misc_feature (1148)..(1148): n is a, c, g, or t
  misc_feature (1150)..(1150): n is a, c, g, or t
  misc_feature (1215)..(1215): n is a, c, g, or t
  misc_feature (1282)..(1282): n is a, c, g, or t
  misc_feature (1333)..(1333): n is a, c, g, or t
  misc_feature (1335)..(1335): n is a, c, g, or t
  misc_feature (1337)..(1338): n is a, c, g, or t
  misc_feature (1350)..(1350): n is a, c, g, or t
  misc_feature (1354)..(1354): n is a, c, g, or t
  misc_feature (1358)..(1359): n is a, c, g, or t
  misc_feature (1362)..(1362): n is a, c, g, or t
  misc_feature (1365)..(1365): n is a, c, g, or t
  misc_feature (1368)..(1368): n is a, c, g, or t
  misc_feature (1374)..(1376): n is a, c, g, or t
  misc_feature (1378)..(1378): n is a, c, g, or t
  misc_feature (1389)..(1399): n is a, c, g, or t
  misc_feature (1409)..(1425): n is a, c, g, or t
  Peptide Sequence Number=SeqID_6601
  Probeset Number=SeqID_12852
natgtactattagtnatgtatacgccgcgtctctttctnttnctttgtaaataccaggcggcgcgatgtgaacagatacagntaagttttagcatactgtagacgtaatnagagatctaattaaatgttcgtgaggctgatctgccgtgtgtaaatgtgctgcggcgtcgcgttcatcctaagtgctagtattggttccgctgttgcccctncctgcactggtatgcttgtcggtagtctgatcgggagacggaggacgttgcggtcggtgcgcgatgcgggtgagtggtgcgcggaagtatcaataagcggcgcaggtgtaccggtgtgtgtagcgaggcagcgccgtgagaggcagcgggagngcgcgtgtcgcgtgngcgcggtgcgngtcgtccgcgcatcaacgaggcgatggtgtcgctatatctnttcgtgctcgtggtccgntcttctcttctacagcacngcggnggtgtgttgggcgccacactagactagtcgctttcacccgccagcagtanttttaaccgacacacgagacgcgttaccactgtttctatattgcgcggctacagtctatgatcgttacgattgtcaagacncgacanttcgcgtttgtgtttggacgtgacgagtacgaagagcacacgtantcaagcgagtgcnttcctcgacgctctacactactgcactctcacactcaatccgcacacgcagctaactgttagcatcagcacgctcngtatagtccgtctgcaccgctatcgtatgtgcgcatcaccatggtattattttgttccgcgcacactggttgcgcccgtttagtgttgtggctgcgtaattctcattgtcacgtcggcttcactagagacacaagtataatatgtttgacgaggagggtagcgtcatcctcatcatcatatctttcgccccccaccactctccanttgcgctatcgcgtcgttgactcagacacaacncctcattctctcctcattctaacccccatccggtgcagcgagcgcgncgtgccgaggcagcagtgctcgctcatcgtctgttcacatcttcgccgtangcgcnnatcntcccacccacgccctcnctcgtctntttattcttgccgcgagtgcttgccgtgtgcncnttggttgtaggcgtgtaatggacgatgcgagatgagaaggagagagagcgagaattgtgttgtgnagaataccctccctgcgagttctcccgcggggggtgtatctctactacattttccacataggagtcnccctccccccatcatcaccccctcgtggggccctcgccgcccacgtcaggngngnngggttgtgggtngttntggnnggntgntgnccgcgnnntnttttgttgcgnnnnnnnnnnngggggggggnnnnnnnnnnnnnnnnn

SEQ ID NO: 3074 - DNA, 261 bp, Glycine max
  misc_feature (84)..(89): n is a, c, g, or t
  misc_feature (131)..(135): n is a, c, g, or t
  Probeset Number=SeqID_12853
tgggattgttaaaatttagccaattttgggaagatggttgcctgctttcgttatgcttcaattcaccttcattctgtttatctnnnnnnatctaaacttgaattcaactatgatagtcaggactggctacnnnnngaagcaaatgagctgcataacaaggctgaaatactgtttagtgaagtgtgcaacacactgcatcaaatttcagagaaggattttaggaatctaattgctgaacttaaagggatgctgcaggcatgc

SEQ ID NO: 3075 - DNA, 467 bp, Glycine max
  misc_feature (196)..(196): n is a, c, g, or t
  misc_feature (209)..(210): n is a, c, g, or t
  misc_feature (221)..(221): n is a, c, g, or t
  misc_feature (249)..(249): n is a, c, g, or t
  misc_feature (253)..(253): n is a, c, g, or t
  misc_feature (261)..(261): n is a, c, g, or t
  misc_feature (284)..(284): n is a, c, g, or t
  misc_feature (287)..(287): n is a, c, g, or t
  misc_feature (289)..(289): n is a, c, g, or t
  misc_feature (303)..(303): n is a, c, g, or t
  misc_feature (347)..(347): n is a, c, g, or t
  misc_feature (357)..(357): n is a, c, g, or t
  misc_feature (373)..(373): n is a, c, g, or t
  misc_feature (389)..(389): n is a, c, g, or t
  misc_feature (393)..(393): n is a, c, g, or t
  misc_feature (398)..(398): n is a, c, g, or t
  misc_feature (400)..(400): n is a, c, g, or t
  misc_feature (402)..(402): n is a, c, g, or t
  misc_feature (404)..(404): n is a, c, g, or t
  misc_feature (413)..(413): n is a, c, g, or t
  misc_feature (416)..(416): n is a, c, g, or t
  misc_feature (429)..(429): n is a, c, g, or t
  misc_feature (436)..(437): n is a, c, g, or t
  misc_feature (440)..(440): n is a, c, g, or t
  misc_feature (450)..(450): n is a, c, g, or t
  misc_feature (452)..(453): n is a, c, g, or t
  misc_feature (459)..(459): n is a, c, g, or t
  misc_feature (466)..(467): n is a, c, g, or t
  Peptide Sequence Number=SeqID_6602
  Probeset Number=SeqID_12854
gagatggagttctgtccaacatgtgggaacttgctgcgttacggtcaatcacagttcttctgctcgacatgtccttacatcgcccgcatagaaagacaggttgagataaagaagaagcaattgctggttaagaaatcaattgacccggttgtgaagaaagatgatataccaaaaggacctgaaactgaagcaccgngtccaagatgcgnncacgacaaggnatactttaaaacaatgcagattcgttcngcgnatgagccncaatcgagattttatagatgcgncangngcgagcaaacttgncgcgaggaatgatcatccctttatacttttccatccacaagaanagaaagccantctatctaatcattantttcgctcttttgagntttnttttngntngncgtcagttnctngccgcccccggcnactttcnngancttttcccancnnatccgnctctggnn

SEQ ID NO: 3076 - DNA, 1908 bp, Glycine max
  misc_feature (181)..(181): n is a, c, g, or t
  misc_feature (311)..(311): n is a, c, g, or t
  misc_feature (378)..(378): n is a, c, g, or t
  misc_feature (427)..(427): n is a, c, g, or t
  misc_feature (897)..(897): n is a, c, g, or t
  misc_feature (939)..(939): n is a, c, g, or t
  misc_feature (1116)..(1116): n is a, c, g, or t
  misc_feature (1154)..(1154): n is a, c, g, or t
  misc_feature (1302)..(1302): n is a, c, g, or t
  misc_feature (1335)..(1335): n is a, c, g, or t
  misc_feature (1432)..(1432): n is a, c, g, or t
  misc_feature (1523)..(1523): n is a, c, g, or t
  misc_feature (1535)..(1535): n is a, c, g, or t
  misc_feature (1554)..(1554): n is a, c, g, or t
  misc_feature (1561)..(1561): n is a, c, g, or t
  misc_feature (1635)..(1635): n is a, c, g, or t
  misc_feature (1648)..(1648): n is a, c, g, or t
  misc_feature (1699)..(1699): n is a, c, g, or t
  misc_feature (1732)..(1732): n is a, c, g, or t
  misc_feature (1736)..(1736): n is a, c, g, or t
  misc_feature (1750)..(1750): n is a, c, g, or t
  misc_feature (1784)..(1784): n is a, c, g, or t
  misc_feature (1802)..(1802): n is a, c, g, or t
  misc_feature (1836)..(1836): n is a, c, g, or t
  misc_feature (1849)..(1849): n is a, c, g, or t
  misc_feature (1868)..(1868): n is a, c, g, or t
  misc_feature (1908)..(1908): n is a, c, g, or t
  Peptide Sequence Number=SeqID_6603
  Probeset Number=SeqID_12855
acaacaccacaccaacatcagaatacacgataatacgctcgtagtgctgtattgcccgatcacaactcgtccatccccacacatatatcatttatatatgaattacctctcacgccggtagcccgcgagcgcagtaacgacttacatatgtatagaaggtgagaagaagagcccgcgcggngcgcacagccacaggtaatagtctggtgtacgcagagtatgtatgtatatattgtgtgtgtggcgcgagttgcacgcactactattagtggtcattattacgtctcgacgtcacgactgcttgtgattgnttctcctcgtgttgctggcagcctcaccacaatgtgtcttatatatatattatttagagagtatggnagtgagacgaagagatctaagagatatgtatagtagcatgcatgatagncgcgcagagacaacgttattcagtatgttttacgactgtcgtcttgtatattcaccaaccagctgtgttcatatcgcacccagtgatgcgtcgtgcggtcagaccagcacaccgccgcgcggcatggtgtgcgcagtgggattagtggtgcgcgatgcacgagagagcctatgacgtgcggagcataatggaaataggtagtggaggttgtattgtagtgcaactcacgcggcccgcataggtagttatgaattgtgttgtgtcagacgagccgacccaacgccatggagctgcaccgatatgcgaaagagtgaagtagagaggagagttactcgtgcggaaatgtatgcgtgtcagcgtcacaagtacgaacatagtatcgaattatcgtgcgcgcacatcagtgataatcagctacccgcgtcaccatcacgttcattactataatcgcgcattataggattagtagntgagtggctgctggattgtcacaggcgcgacgactagtgatnatcttacgagaggtccattaatagacgaacccacagatcgctagtaatcgaacatcacgactcgtcgatctcatgtagtctacgtacttatgacccgtagcatcacccacatagcgcagtgatatagaggaagacggtgttgagagagatactgacttctatgtgcatctcacagtngcagcatgtacgcggccagcgcacagactagtcaagantagacattcgctagatcgcacgccgaagcgcacgacactatgcgtgtcagttagctatatgacggctactaatatcgccgcgacctcaggcacacgcatacgactcgtccataatgatcacgcgtcgcgagcgctactctacgcacgntgcgctcgcacaagcggcgcgctacatgactcngcgtagatagcgtacgtacgactagggatatactcgtaactgtacagatatgtacgaatagtacgaccttgcgtcagatgtagtagtacgctcggangtagatacatactaatcgatctgacgtcacccagatgctatgatagaagcgcgatcatcggatgcatcacatcataagatagatatggggnatagctgcggantgaacacaccgagatgaanacagtantagcatgagctgtgtgacgtcagttacactaagagctgtacgcgtgagtcgagattacgtgtagcgagttgtanacatgcactaatntaactctatttacgttcgtccgcgtgcctcatagtagacgtgcatatatgngacggagcaacgcgactgactgaatcggatacngtantgctgcgatattgntaatagtgcgtcgataatatgagagagcagaacngcgactacaagggtctcnactgtgatgtacgaacactatggtcatgtactantgccgacgaatanacgcgcgatagagacaganattacgactaagaggtgaagatacatcgtcttcatcgtan

SEQ ID NO: 3077 - DNA, 514 bp, Glycine max
  Probeset Number=SeqID_12856
cgttacactgggtagaaaaaacaatatccggtatgctatggctcacaccatacggcttgcattcttgcaaacgacttaaccactaatggatcacaactaccccgagggagatcatgtacatcagaaaaatgactagaaatatattagaagaccacgagatcgcagactcgccgaaaaacatgactatcagacctctgatttgctagctcctgaatacatttcatcgggtagacgtcttatagactcgagagttctaaggggtttgaatacatgatagtgagctagtatgcgtagaaacgcagtgtttgatagtccaaatagagtccaaaatggtttgccacttttgactaataaaagacaatattttgagaaagatgaaaaaaaactaatgaatgtcaaaatttttctttggccaaaatatcgattagaagatttagcttgtataaatcgatattggtttaatacccatagtggaagccgtttcagtatagtaaggatacatttgtatccgcga

SEQ ID NO: 3078 - DNA, 630 bp, Glycine max
  misc_feature (546)..(546): n is a, c, g, or t
  misc_feature (560)..(560): n is a, c, g, or t
  misc_feature (586)..(586): n is a, c, g, or t
  misc_feature (596)..(596): n is a, c, g, or t
  misc_feature (611)..(611): n is a, c, g, or t
  misc_feature (624)..(624): n is a, c, g, or t
  misc_feature (628)..(630): n is a, c, g, or t
  Peptide Sequence Number=SeqID_6604
  Probeset Number=SeqID_12857
aaaaaaaagatttgttaaaataatctcttattcataaaactccgagtccatgacctcctcatacaaaaagtacttcgaccctgcccaaatcgaatctgaccaaaaggatctcgttgtttcccaacttaaggctgaactcttcgaacttcgtcaaaatgaaagagattataacgaactccactccaagctcaacaacctcgagcatagatacaaccttcttcaagaagaaaagagtttaaatgaacgtgaattcaaaaacagaaatgagctcaatctcagaaccatcaacaacttgaaatctgatattgacgctttaaagcaagaactcaacgttcttagtgctgatgctcaagatctcagattcgataaccaaagcatcaatgaaattgtcaacaacagatcttctgaaatcgctcaattgaaggctgaactcggagacttggctgataacaatgctcacctctctatggagaagaaggacttggaaacccaaatctctagagtagaactgaaacagagaacccacctcgaatggaagaactaccnccaatcggggagcnctgaagaagaatagttgaagactttngagattgatncaaaccaagactggnagaccccagactncagnnn

SEQ ID NO: 3079 - DNA, 1341 bp, Glycine max
  misc_feature (15)..(16): n is a, c, g, or t
  misc_feature (18)..(21): n is a, c, g, or t
  misc_feature (23)..(23): n is a, c, g, or t
  misc_feature (392)..(392): n is a, c, g, or t
  misc_feature (1216)..(1216): n is a, c, g, or t
  misc_feature (1341)..(1341): n is a, c, g, or t
  Peptide Sequence Number=SeqID_6605
  Probeset Number=SeqID_12858
gtgcccccccccccnnannnnanatatatacaaaatggtgtttgcgccctctttcctaaagttgccactcccccgcgggaggagagaagcgtcgtaaaagaagtgcattgctacgggacagacagaagaatctcttatacatattgtgatgatggagggggcgaaggccgtcttctgatcctctacatgtatgaaagcaaccatcggcgaacgacatcactctatccttcaataactaaaaacaacacacggacgccgcgcggggcgcatgtgcggcgcggcgggcgggaggagggggagtagggtagacctctcggggcggcgagggaataagataggaagcggcatattgaacgaaaacgagggattgtcgaccccgcagccgcaccaanaaacctcttaacacatgatgcatcacccaccacccaactcagcatgtgttaacgcatagctgaaatttttatccaactcaaatttcatttttatcttctatcaaaaactgctatgtagctatctctcgacttctcgtaccgttattaatatgttcgttgaggatgtaagtaaatttaaactaccgaggaatccttctggccactctccgtactctaccgagaactaatataactccggcacacgtgaatgagtggataacagcgctccggtgctcacaacgcccggcattggcaacgatgaacgatagatccaagcgatatccctgccagtcacttctgcacatatgctcaagccgctgctctgcctcctttactagagagccgcctgtgagaagcgggactacacgaatcacaaccatatcgacgatgactagaagcagcccgacccaaacacctctcactatcttatcaacccaccgcaccgtcacgaggcggcaaaaaaactacgacgcgctccatgtaccagcctccgacccggacgcaccatgcgcgtgcgggcgttccacacgacgaccttgcatcctgtgatcgagccggcaccgcgtagacgtacgtccgctcgatgcgcgtcgcagatctgatgcgcccaaccacgccccaaccctctacaaccactgtaatctcaaaacaatcatatgccaagatgtagcacgtaaagacaagaaacatccagtcaacatcacacgtataagaaaaatcatacacgaatccacaacacactacgaagcaaacctctgagaccggcgaatcgtcggatccgctanacacctcgcggataactcgtcgggcaaacatcgacgaggcgaaatgtgaggactaatactcctcgtcgatgttgctctctatcagtccacagcgacgcgtcgcgcccgcccgcacacacgccacn

SEQ ID NO: 3080 - DNA, 1933 bp, Glycine max
  misc_feature (44)..(44): n is a, c, g, or t
  misc_feature (48)..(48): n is a, c, g, or t
  misc_feature (64)..(64): n is a, c, g, or t
  misc_feature (83)..(83): n is a, c, g, or t
  misc_feature (116)..(116): n is a, c, g, or t
  misc_feature (202)..(202): n is a, c, g, or t
  misc_feature (270)..(270): n is a, c, g, or t
  misc_feature (294)..(294): n is a, c, g, or t
  misc_feature (319)..(319): n is a, c, g, or t
  misc_feature (363)..(363): n is a, c, g, or t
  misc_feature (458)..(458): n is a, c, g, or t
  misc_feature (497)..(497): n is a, c, g, or t
  misc_feature (519)..(519): n is a, c, g, or t
  misc_feature (659)..(659): n is a, c, g, or t
  misc_feature (679)..(679): n is a, c, g, or t
  misc_feature (1091)..(1091): n is a, c, g, or t
  misc_feature (1302)..(1302): n is a, c, g, or t
  misc_feature (1326)..(1326): n is a, c, g, or t
  misc_feature (1328)..(1329): n is a, c, g, or t
  misc_feature (1385)..(1385): n is a, c, g, or t
  misc_feature (1441)..(1441): n is a, c, g, or t
  misc_feature (1450)..(1450): n is a, c, g, or t
  misc_feature (1480)..(1480): n is a, c, g, or t
  misc_feature (1482)..(1482): n is a, c, g, or t
  misc_feature (1487)..(1487): n is a, c, g, or t
  misc_feature (1499)..(1499): n is a, c, g, or t
  misc_feature (1532)..(1532): n is a, c, g, or t
  misc_feature (1548)..(1548): n is a, c, g, or t
  misc_feature (1571)..(1571): n is a, c, g, or t
  misc_feature (1576)..(1576): n is a, c, g, or t
  misc_feature (1593)..(1595): n is a, c, g, or t
  misc_feature (1610)..(1610): n is a, c, g, or t
  misc_feature (1642)..(1642): n is a, c, g, or t
  misc_feature (1678)..(1678): n is a, c, g, or t
  misc_feature (1688)..(1689): n is a, c, g, or t
  misc_feature (1712)..(1714): n is a, c, g, or t
  misc_feature (1718)..(1718): n is a, c, g, or t
  misc_feature (1720)..(1720): n is a, c, g, or t
  misc_feature (1726)..(1726): n is a, c, g, or t
  misc_feature (1740)..(1740): n is a, c, g, or t
  misc_feature (1742)..(1742): n is a, c, g, or t
  misc_feature (1745)..(1745): n is a, c, g, or t
  misc_feature (1747)..(1747): n is a, c, g, or t
  misc_feature (1749)..(1749): n is a, c, g, or t
  misc_feature (1759)..(1759): n is a, c, g, or t
  misc_feature (1782)..(1782): n is a, c, g, or t
  misc_feature (1791)..(1792): n is a, c, g, or t
  misc_feature (1813)..(1813): n is a, c, g, or t
  misc_feature (1816)..(1817): n is a, c, g, or t
  misc_feature (1819)..(1820): n is a, c, g, or t
  misc_feature (1824)..(1826): n is a, c, g, or t
  misc_feature (1836)..(1836): n is a, c, g, or t
  misc_feature (1838)..(1838): n is a, c, g, or t
  misc_feature (1840)..(1842): n is a, c, g, or t
  misc_feature (1844)..(1845): n is a, c, g, or t
  misc_feature (1847)..(1850): n is a, c, g, or t
  misc_feature (1853)..(1853): n is a, c, g, or t
  misc_feature (1864)..(1866): n is a, c, g, or t
  misc_feature (1884)..(1884): n is a, c, g, or t
  misc_feature (1886)..(1887): n is a, c, g, or t
  misc_feature (1889)..(1889): n is a, c, g, or t
  misc_feature (1905)..(1905): n is a, c, g, or t
  misc_feature (1913)..(1913): n is a, c, g, or t
  Probeset Number=SeqID_12859
ggcagtcgtacgatagcaacagacatgtatgtaaggcccaatcngacnagactcaaattagcanctatccaccatacgatccngtacgcgtcaccaaaccaccaaacccatctatnccatatactctcactcacatatacacagactactcagccgacatactaattacagtcagcacgcgccatgtaagagtagcacgcgncactcattccgactaggcatactagccagtgtacagccgctacacgccgcgcgcgcgtgttctctctntgatgattcaggagtgtggcttcntagtagtgaaaggtgaacgccggangacgcagcacgctagtatacgatgagaatgaatctgtgatcagncacacgtattgacagagcatcgtgtcacagcactacacgcagagcgaccacataacagaacagaccatatattacacatcgtcttgtcgtactancctacgactaccgcgtccagactccatacacactctatntacctcactcgatatatattancacatagtcatgtggttcctcatcacaacactgcagtgagagagagtagatgacgagcgcgcacgacacacgcgcagtacaacacaaacgcgcatcatatagcagaatacatgtatcatgcgaggcatgctcacatctcngctcttcgtatgacgtagcncatcgtgacgatgcgatagagtgcgtcttgctgcgctagcagcagtaatgtagatcgaccatccacgcacgaccgcgcacgacagcgacgcacaccaacacagcacacgcttcagcagtatattactagtagtgtatctatcataatcactctgacgtatccgcgcgccatcactcagatcactcttatcagcaggatacatatacacaaactatcaactcgactagatataacacacgagcacagtggcgcgcacaagctagaaggcggagagcgaatgctgtcaacggtgatacacgagacggtcgttaggagacacagacactgcatgcaagagacgcaatcatagcgacgttatagtagagtatcataccagtatgatatcgttctgcgactgcagacatcccgaacncgcccaccagctccactatatgctcctgctcactatagactactcacacacgcgcggacgatgaagactgacgcgtccatcagacagcgcgaaacgaggcgcagtgtgcatagcagcctcgcatcgggagagctgaggagctggtgaccggcgtcaaggcgggagaccgcggagtccggacccgaggagccgagcgcgaattacaggcacntcggccgcgtaggactgagtggcntnntcatatcatgtcagtttattctcatagtgagtgtatattatctgtgtatgtagctnccagactctcaacacgcacacagttagctatgcagcatcatataggtacacgtatncactaccanaattatcctctctgtcgccgctgctctgcntngtgcncactctcacagngtactcactctcctctacgacgatggtcacttngtccccctgcacagcnagcaccgccacacatagctgatnacacncacacccgccacgacgnnnctcagcgactgccgnaatcatactagatagttatgatataatcatcnacttcacatacagtcagacacatactcacatacacnatagaaggtnnaacactgactattccacatgttnnnaagnanttcgtnatatatgcctcgcntngcncncnttttatatantatgattattagcttttctttgnttttttatnntataaatcctctgttattctncanncnnatannnccagaaaaangngnnntnngnnnncanaaaagactctnnnatataagactgttattantnnantaataaataattatantaaaatanaaaataaaattatttattta

SEQ ID NO: 3081 - DNA, 1536 bp, Glycine max
  misc_feature (1)..(1): n is a, c, g, or t
  misc_feature (112)..(112): n is a, c, g, or t
  misc_feature (139)..(139): n is a, c, g, or t
  misc_feature (189)..(189): n is a, c, g, or t
  misc_feature (307)..(307): n is a, c, g, or t
  misc_feature (354)..(354): n is a, c, g, or t
  misc_feature (441)..(441): n is a, c, g, or t
  misc_feature (495)..(495): n is a, c, g, or t
  misc_feature (518)..(518): n is a, c, g, or t
  misc_feature (590)..(590): n is a, c, g, or t
  misc_feature (647)..(647): n is a, c, g, or t
  misc_feature (770)..(770): n is a, c, g, or t
  misc_feature (945)..(945): n is a, c, g, or t
  misc_feature (1406)..(1406): n is a, c, g, or t
  misc_feature (1458)..(1458): n is a, c, g, or t
  misc_feature (1461)..(1461): n is a, c, g, or t
  misc_feature (1464)..(1464): n is a, c, g, or t
  misc_feature (1513)..(1513): n is a, c, g, or t
  Peptide Sequence Number=SeqID_6606
  Probeset Number=SeqID_12860
nttactagacgcaggccacccgtgcgtttgtgtaatactagcgttattaccgagcagttggtgcgtgtgtattagatttagtctatgtattcatagtttacacgcatactanataaatgtgatagctgtgttgtactgngctctcacagtgacgttatttgatgtggttgctcatgtacgtcgcgtgcntgttatgagtggtgtgaaatagtagattgcgctgagtagtggcaagagaagaagaggcgagacacggagtaagtgcgagtagtaggccgacaataatcgtcgagaggtcacaggtgtngatatgtgcttctgtgtgaggtgcgctgcgtgaggtggaagagcgcncacatattagtcagaggaggtattcagtcgaggtcgagtgcctgtcggaggacgcattcactcgttgtgtgtgtgttctcctcgtangcttgaaggtctgtaccccgtgagatggagggagtgctaccaaggggagaatgnattctctcacttatcagagttanagcagtcagatggctgcgagctatgtatgttgagtacgagatagtgtaagaatgagattatattctatatanaagaagcccacgaccggcggtcgacactcagatgatacgtaatactagacagcgggntgtaccacactgactgtagtattaagagcgtgtagaggacagcggcgcttcgcacgacacgatccactgctagtagatgaatgggggacaatcatctatgtgagtaattaagcaccgaagacncccgtcttctctgacctcctgaggagtcgtatgatataatatgcaagggcacctagtccatccaccattcaagttggtggtgtaggcatgggtctgtcgccgcggagtggttcagttcatgaggtacactctgatgaacaactatacaacaacatgcggcagtgtggagtgtacnacaatggaggaaacgaaggagtaaatacgcgaatagcgctaaaggcgcagtggtattgagagtcatcgcattgcgtgtcagctaggcgcggtgtggctgctcgtggtctcattatgagtctaacacaggtatctacaatgagcacaccgcggctgaagtaactagagcagaggcgcgaacaaaagtgcgcggcatagggggaaagggcgtaacaggatattcgtgagaagcgtggctgacaatcgtgtgcaatatcatccgctcactctattggggaggttggtatgcttctatagttgctatcactgcccccttctctcagctgtggaggaatagcaagaacaccgagcttgagagtactcaaataaatgattataatgagagaatagaagagatagtgtaatctgcgctgtcatgccgtgcgggaggagcatggaggattaatatcacactaagatgcncggcgccgcgcccgcctcagccgcgtggagagtgtaggcgacccttctgcanttngtngtgcggtggtgtggggggagacggaggggaagagagagaggagtcgaancgctctgcgtgtcgtaggattga

SEQ ID NO: 3082 - DNA, 1826 bp, Glycine max
  misc_feature (13)..(15): n is a, c, g, or t
  misc_feature (24)..(24): n is a, c, g, or t
  misc_feature (46)..(47): n is a, c, g, or t
  misc_feature (49)..(49): n is a, c, g, or t
  misc_feature (54)..(54): n is a, c, g, or t
  misc_feature (66)..(66): n is a, c, g, or t
  misc_feature (75)..(75): n is a, c, g, or t
  misc_feature (147)..(147): n is a, c, g, or t
  misc_feature (169)..(169): n is a, c, g, or t
  misc_feature (182)..(182): n is a, c, g, or t
  misc_feature (193)..(193): n is a, c, g, or t
  misc_feature (199)..(199): n is a, c, g, or t
  misc_feature (201)..(201): n is a, c, g, or t
  misc_feature (227)..(227): n is a, c, g, or t
  misc_feature (238)..(238): n is a, c, g, or t
  misc_feature (242)..(242): n is a, c, g, or t
  misc_feature (259)..(259): n is a, c, g, or t
  misc_feature (311)..(311): n is a, c, g, or t
  misc_feature (317)..(317): n is a, c, g, or t
  misc_feature (373)..(373): n is a, c, g, or t
  misc_feature (394)..(394): n is a, c, g, or t
  misc_feature (443)..(443): n is a, c, g, or t
  misc_feature (445)..(445): n is a, c, g, or t
  misc_feature (680)..(680): n is a, c, g, or t
  misc_feature (733)..(733): n is a, c, g, or t
  misc_feature (752)..(752): n is a, c, g, or t
  misc_feature (775)..(775): n is a, c, g, or t
  misc_feature (963)..(963): n is a, c, g, or t
  misc_feature (969)..(969): n is a, c, g, or t
  misc_feature (991)..(991): n is a, c, g, or t
  misc_feature (1069)..(1069): n is a, c, g, or t
  misc_feature (1124)..(1124): n is a, c, g, or t
  misc_feature (1178)..(1178): n is a, c, g, or t
  misc_feature (1281)..(1281): n is a, c, g, or t
  misc_feature (1352)..(1352): n is a, c, g, or t
  misc_feature (1364)..(1364): n is a, c, g, or t
  misc_feature (1369)..(1369): n is a, c, g, or t
  misc_feature (1448)..(1448): n is a, c, g, or t
  misc_feature (1453)..(1453): n is a, c, g, or t
  misc_feature (1485)..(1485): n is a, c, g, or t
  misc_feature (1513)..(1513): n is a, c, g, or t
  misc_feature (1565)..(1565): n is a, c, g, or t
  misc_feature (1588)..(1588): n is a, c, g, or t
  misc_feature (1613)..(1613): n is a, c, g, or t
  misc_feature (1696)..(1696): n is a, c, g, or t
  misc_feature (1774)..(1774): n is a, c, g, or t
  misc_feature (1783)..(1783): n is a, c, g, or t
  Probeset Number=SeqID_12861
cccaaaacccccnnntaagcttcnactacagattgaactatatacnnanatatnactcactcaacntccgactcncagcacacgacatactatccgcactatcatcgtgtgagtactcaggagcgtgctctccgccgcccattcgancagagatacagcaacggagatnaatactgacactnacacggcctcntctctncntatactctctgtctgtgtgtacttcntcgcgaacacnacangtgagacgagttctgcncgcaaatctgatactctctctatactcaccgtgactatatcggccagtaaantatacntgctctatctcatctatcagactactcatagacgaccaacaatcgcagagccaccnatacgcaaagctactaaccanatctagctactctgacaacgaacatcagcaaccagtcgtcatcatatcntntctctcgtccgattataacacaccacgacacaaacgacacatctgctacagaccctcatctcgtgaattacatcagtgagacacacactctacgtcatcttgcacctcctgcactctgactcatatctatacatacgcagcgctaataccctgcttatagccgcacaatttacatatgacagagcaacaatactacatgactcacacatcatgcagtgctaatgggaatactaantcgtcacactatacctacagtatcgctcttacgcacgccgctacatctcacgntacgacttcctctttagcngtcataccctaccataaatcaanctgtgtgtatccatatgagagctcagatcataagctgcgacacgcgtacacgccaggtgagaagagtacatatgtgtaacgtatatgtcgtagagtcgccgcattggtctattgtcgtgccacctcgaccacactcccgcgtccatcgttcatgtcttctctctgttccgtcagcggagccaactgancatganctcactcatcttgttacttccntgcgggaatacataccaccatcgacttgaccacgactactcccgtgtcataatatgcgactacactagacggcagacncgccgtctcgatctctccacacacgcacgaacataactcacaacagcagactctncttccacggggaatcacgctcctctcaggtctgcctccgaccccacgctaacantctatgtatgtgagatctattaaatcatgcccacatgaccgatcaccgacgtatacgagcgctctcctcagatagccacttgtagtatatatgagatcatcgncacattctaccactccataccatataatctcgatactactataccgtgtacctatgatatatataaaacancaggacttattnacaanatctgtaccgtctctcacacgcaactatcgactaacacgagatcatcactatgacgatagtctatcactactcgactanccacnatagcaagactatatctcttcatcgattatantctattagcgtagcgcgtctctcatctntcgtcttttgcgatagtcttaatacagactatcgtcatgcactccctctatnttactcagcactcatcaccgtantgcatcgttcgcacacacacgctcnacgtacagctaccgtaccactactcgaccgtcaagagactcgttctatctctgtaccttatactgctactgagtatctatctnacatagtaaacgatgatcgcatctatcgctatatgcgagacgtgctaaccctaatacttcgcacggctcgatgtccgntatagtgtngcgccactgcgatacacgacgatatagcatcatagcgatctta

SEQ ID NO: 3083 - DNA, 505 bp, Glycine max
  Peptide Sequence Number=SeqID_6607
  Probeset Number=SeqID_12862
agcatggaatgaaaagtgtgattcgtcgataacaaaagactaagagtatcaccttcatgatggccgcccaatcagggctgccatcatgacgagcaggaagaatcaggttaatagggcatttgatggaatcaaagacctcgggcttccctacaagcaaggtgaagataagcgccaaatcactatgtactttttccttccagaaacaaaagaggggatgctagctttggctgagaagccggcttctgaataagggtacttggaacgcaagcttcctaataacaaattggaaggaggagacttcaggatcccaagatccaaaatttcttttgggtctgaagcctctaatgcgctgaaggaactgggagaggcaatgcctttcaccgtcggaggtgggacagaaatggtggaaacagctgtggaacaaaactcgtttgagtccgatatattgcataaggcttttaaagaaggaaaagaagaaaggaatgaagctgcagcggccacggct

SEQ ID NO: 3084 - DNA, 406 bp, Glycine max
  misc_feature (56)..(56): n is a, c, g, or t
  Peptide Sequence Number=SeqID_6608
  Probeset Number=SeqID_12863
cggctcgagctcgagccgtatcggctcgagttctcactctctctctactcgatctntatgccccggctcacaaggactgaggatgaccgatgagtcaacaccttttctcccgaaggccgtttgtttcaggttgtgtatgcaatctaagccatcaagctgggatcaactgcgattgggttgaagaccaaagatggagctgttcttgcaggttaaaagcgcattacatcgtcgctcctggagcctaatagtgttgagataattatggtatttgacgagcacatcggttgtgcaatgatgtgggttgattgcagatgctcgaacacttgtgtgagcatgcacggttggtaactcataatcacaaggtctgctatggtggacctattactaggggagctcaccacccaag

SEQ ID NO: 3085 - DNA, 416 bp, Glycine max
  Peptide Sequence Number=SeqID_6609
  Probeset Number=SeqID_12864
acctcctctgccactgccaccccatcgccacctttcttcataggctcctactgctccacatcagtgccctcctctgtctacttacttgagcatacgcacaccatgtgcggcggcgcgatcatctccgacttcatcccggagcgcgaccaccgcggcggcagcaagcgcagcctctgcaccgccgacttctggccgcatgccgccgccgccgcgttcgacgaccctaccgaccaccacgacttatacccagccgacctgaccggcgccggcgccttcccgccccaacaccaagcagaggaggagccgagcaggaagcgggagcgcaagacgatgtaccgcggcatccggcggcggccgtggggcaagtgggcggcggagatccgtgacccggccaagggcgcgcgcgtctggctcgg

SEQ ID NO: 3086 - DNA, 435 bp, Glycine max
  Peptide Sequence Number=SeqID_6610
  Probeset Number=SeqID_12865
acaaaaacggagtggctcgacggaaagcacgttgtgttcggacaggtcgtcaaggggatggacgtcgtcaaggaaataaaaaaggttggatccagctccggcaggaccgccaagcctgttgttgtccccgactgtggtcaacttttttagatagacgacgttgaccctaggcttttatttttgtgtcgggggctctgaaagtgtcgtttctttcggggtggtttttgccttttttttttctttcccaagtcgtttaggggaatgcggtgttatggaaatcattttgaaacccttcccctttgaaaccttcctttcctttttaaaaaatcaggatcatgtggttcgttcaaagagggaatggagtttgttattagaaacataaaaaaatatgatgggctcccttcaataaaaaatagggcctttattatttgcctt

SEQ ID NO: 3087 - DNA, 210 bp, Glycine max
  Peptide Sequence Number=SeqID_6611
  Probeset Number=SeqID_12866
cccctcggctcatatttggcgcactgttttactacagccattgacgtctggtctgttgggtgtgttttagctgagctgcttcttgggcagcctttgttccctggtgtgtgtggtgttgttgaggtggttgcgtttttcatggtgatctttgtgctttctccctctctttgttcctgtcttctgccctcgttttgttcctttgttgtgtgt

SEQ ID NO: 3088 - DNA, 1105 bp, Glycine max
  misc_feature (897)..(897): n is a, c, g, or t
  misc_feature (902)..(902): n is a, c, g, or t
  misc_feature (913)..(914): n is a, c, g, or t
  misc_feature (916)..(916): n is a, c, g, or t
  misc_feature (921)..(921): n is a, c, g, or t
  misc_feature (932)..(932): n is a, c, g, or t
  misc_feature (938)..(938): n is a, c, g, or t
  misc_feature (941)..(942): n is a, c, g, or t
  misc_feature (945)..(946): n is a, c, g, or t
  misc_feature (968)..(968): n is a, c, g, or t
  misc_feature (974)..(974): n is a, c, g, or t
  misc_feature (977)..(977): n is a, c, g, or t
  misc_feature (982)..(982): n is a, c, g, or t
  misc_feature (989)..(990): n is a, c, g, or t
  misc_feature (999)..(1000): n is a, c, g, or t
  misc_feature (1007)..(1007): n is a, c, g, or t
  misc_feature (1010)..(1010): n is a, c, g, or t
  misc_feature (1017)..(1017): n is a, c, g, or t
  misc_feature (1055)..(1055): n is a, c, g, or t
  misc_feature (1058)..(1058): n is a, c, g, or t
  misc_feature (1067)..(1067): n is a, c, g, or t
  misc_feature (1081)..(1082): n is a, c, g, or t
  misc_feature (1105)..(1105): n is a, c, g, or t
  Peptide Sequence Number=SeqID_6612
  Probeset Number=SeqID_12867
gcttgaagggacccccgcgcggctggaggtccccacgcgcgggcggcgtcagaaagccttaagtgtatctcctaagagtaaccatcggggtttgacaaagtcattatccgaaaaatactcaagtgcgatagccccccgcaccgagcagaagcccacatttgaatcgcccgcacctacaaaacttatttcccatattacacatggcggcttgtcagactctcgtcgatcaaaattaacagcagagaagcaccaggataactatgaactcctctctaggtgcatcaaagaggatttggggttcaaaaatggtaaacctctggcagctagtatcatatacaaatgtcttcatcattggcatgcatttgaatctgagcgcacagccatatttgattacatagttgatggaattaatgatgttcttaaggttagagacaatgacattgtcttgccatattggctgtccaatacatctgcacttctatgcctcttgcaaaggaacttgcatccaaatggttttttaacaaccactgctcaacgttatgccagatcatctggcttgaccagccgaatagggaatggactgaggtcctccattgaagcttattgtatatgatgataatacatcacaggtggaggcaagatatccagctattctttttaaaacaacaactaactgcttgcgtagagaagatttttggccttatacgtgataatttgaaaaaggagctgtctccacttctgggatcatgtattcaggcacctaaggctaaaatgggtcgagtgcaaggtggaaaatcatctagatctcctggtgggcttcctcaacaatcacctgttgctcaatggacaacatcatcaatttttggattctctcatgaccgctatgtcaaatcatgntcctncttttcatccnnanctagnactcaggtttntcttcnaannttnnttcttcacaacctttgtggcgngggaangtnacttntaaatgnnatatggaanntgtctgnaanttgaaanggtgcaatgcaaaaagatttctgaacttctggatggtnatnttagaaagngtgggtttggaaannacaagaagaaaatttgaaaattn

SEQ ID NO: 3089 - DNA, 1733 bp, Glycine max
  misc_feature (1)..(1): n is a, c, g, or t
  misc_feature (21)..(21): n is a, c, g, or t
  misc_feature (63)..(63): n is a, c, g, or t
  misc_feature (70)..(70): n is a, c, g, or t
  misc_feature (78)..(78): n is a, c, g, or t
  misc_feature (96)..(96): n is a, c, g, or t
  misc_feature (107)..(107): n is a, c, g, or t
  misc_feature (133)..(133): n is a, c, g, or t
  misc_feature (145)..(145): n is a, c, g, or t
  misc_feature (182)..(182): n is a, c, g, or t
  misc_feature (187)..(187): n is a, c, g, or t
  misc_feature (222)..(222): n is a, c, g, or t
  misc_feature (367)..(367): n is a, c, g, or t
  misc_feature (371)..(371): n is a, c, g, or t
  misc_feature (382)..(382): n is a, c, g, or t
  misc_feature (424)..(424): n is a, c, g, or t
  misc_feature (441)..(441): n is a, c, g, or t
  misc_feature (445)..(446): n is a, c, g, or t
  misc_feature (453)..(453): n is a, c, g, or t
  misc_feature (478)..(478): n is a, c, g, or t
  misc_feature (535)..(535): n is a, c, g, or t
  misc_feature (551)..(551): n is a, c, g, or t
  misc_feature (567)..(567): n is a, c, g, or t
  misc_feature (573)..(573): n is a, c, g, or t
  misc_feature (577)..(577): n is a, c, g, or t
  misc_feature (718)..(718): n is a, c, g, or t
  misc_feature (736)..(736): n is a, c, g, or t
  misc_feature (769)..(769): n is a, c, g, or t
  misc_feature (820)..(821): n is a, c, g, or t
  misc_feature (842)..(842): n is a, c, g, or t
  misc_feature (847)..(847): n is a, c, g, or t
  misc_feature (876)..(876): n is a, c, g, or t
  misc_feature (882)..(882): n is a, c, g, or t
  misc_feature (944)..(944): n is a, c, g, or t
  misc_feature (970)..(970): n is a, c, g, or t
  misc_feature (982)..(982): n is a, c, g, or t
  misc_feature (992)..(992): n is a, c, g, or t
  misc_feature (1069)..(1069): n is a, c, g, or t
  misc_feature (1084)..(1085): n is a, c, g, or t
  misc_feature (1088)..(1089): n is a, c, g, or t
  misc_feature (1097)..(1097): n is a, c, g, or t
  misc_feature (1155)..(1155): n is a, c, g, or t
  misc_feature (1189)..(1189): n is a, c, g, or t
  misc_feature (1217)..(1217): n is a, c, g, or t
  misc_feature (1219)..(1219): n is a, c, g, or t
  misc_feature (1221)..(1221): n is a, c, g, or t
  misc_feature (1223)..(1223): n is a, c, g, or t
  misc_feature (1227)..(1227): n is a, c, g, or t
  misc_feature (1278)..(1278): n is a, c, g, or t
  misc_feature (1283)..(1283): n is a, c, g, or t
  misc_feature (1388)..(1388): n is a, c, g, or t
  misc_feature (1410)..(1410): n is a, c, g, or t
  misc_feature (1414)..(1415): n is a, c, g, or t
  misc_feature (1420)..(1420): n is a, c, g, or t
  misc_feature (1447)..(1447): n is a, c, g, or t
  misc_feature (1449)..(1449): n is a, c, g, or t
  misc_feature (1486)..(1487): n is a, c, g, or t
  misc_feature (1538)..(1538): n is a, c, g, or t
  misc_feature (1543)..(1543): n is a, c, g, or t
  misc_feature (1546)..(1546): n is a, c, g, or t
  misc_feature (1558)..(1558): n is a, c, g, or t
  misc_feature (1561)..(1561): n is a, c, g, or t
  misc_feature (1579)..(1580): n is a, c, g, or t
  misc_feature (1591)..(1591): n is a, c, g, or t
  misc_feature (1597)..(1597): n is a, c, g, or t
  misc_feature (1611)..(1612): n is a, c, g, or t
  misc_feature (1631)..(1632): n is a, c, g, or t
  misc_feature (1651)..(1651): n is a, c, g, or t
  misc_feature (1675)..(1679): n is a, c, g, or t
  misc_feature (1681)..(1687): n is a, c, g, or t
  misc_feature (1691)..(1695): n is a, c, g, or t
  misc_feature (1703)..(1703): n is a, c, g, or t
  misc_feature (1705)..(1708): n is a, c, g, or t
  misc_feature (1710)..(1710): n is a, c, g, or t
  misc_feature (1712)..(1712): n is a, c, g, or t
  misc_feature (1714)..(1714): n is a, c, g, or t
  misc_feature (1718)..(1718): n is a, c, g, or t
  misc_feature (1720)..(1720): n is a, c, g, or t
  Peptide Sequence Number=SeqID_6613
  Probeset Number=SeqID_12868
ncactgcgcgtacgtcgacgnagtagagatatgacgggctagcagcagaagcagctactcagnagatcgnctcgacgncacggcgtctgctgacgntcacatcgatntcacagcgcgtccgacagtaggagtnttgaccgattanctcgtcgtcgtatgcccgtcgagcatagcactacatncctcnatcatttcatcagtgagtcatgatgatgattactnctcacgtgcatcgtacagaacgtgtgcatctggagtctagtagatcagcgtctcgattcgcatgtcatatgatggatgtgacactactgtgccgacgatattcagcatctaccagcgccgctcgctgcaaggtacacacgactancacnggatacgtgtngaacgaactacagcgagcagcgagcgccagcagacaaagacncgcagtcgcaggcgatnaagnngacagtncgtagtggctgtggcgatacgtacnctagacatcgagtgcgtgtcgcgtgagtactacatcatgcgcgctgtgctaggctcntacatccatcactctntgcatacatcgatatncggtangtangactagcacagcgtgtgtgtgatgtgtatgaggtgtcacacacgcacgaatgagagcaacagcacacgcagatgcacgcgtaatcttgtctcatgatcagtcatatacacacccgatgctatcagggcgctgacactcacnaagagcaccgcgcgacgnggaggagagtggagtgtgtgtgttccgcagccnctacatgtacatatatctatcaatttgcatatatacacaacgatgagcganngcgcggcatcgtgtgttgtgntgtcntttgcttcatatgtatactcgcgtgtcgncctacncatctctacgtagtctcatatatatatcatcaacctctctgcgtcctgagtacacaccacgncatcgcacgccaccatgcgacgctcntatactgctcgnctagcaatcnctatcccgagcgctcgcgcgcaacacacctcatagcagaccatcacatatagcaccgacttgcagcacacacagcgncgtgctcagagtcgnnccnncccacgcncagaagacgcagagtagtgtgctgagagaggattagagagtaggaaaccgaaagacgntagaagagaagatgatatatgtctgtcatctacnagtagtatagacaacgagatacagaaantntnancctntcatgtgagttctaagctcgctacgtgagtgatcagagtatacgtgtagtngacgngcctcccgacgcactatcatcgcaatactggtcgtgaactacatactatcattactgtgtgttgtatgtatggacgagtgcgatgtgttgatagtggtcggcatnaggtgtagagtcgctggcgtgntttnnccgtnttattagctcatcatctcataataaananagatcgaccgaacacgcgcgcgagacagaataaaaannatcgcagcgctgtacactccagcgcgcattagctcccctctcaccatctanacaanctngtgcgcgccgcngtnagtggtttatgttttaannctcttctaatntatatntcgagagtctcggnnttctttgttaattttttgnntgcatcttctacccagacntcacactcagcgcatgccccgcgnnnnncnnnnnnnttgnnnnncgagagangnnnnangngncccncncgcgccacccccc

SEQ ID NO: 3090 - DNA, 433 bp, Glycine max
  Probeset Number=SeqID_12869
gtgtctacttcaaccctaatttttatttcttcagaagactcacaaaataaaaagacactgaattgttctcgcagtgatcacattcccctccgaaatctgagtcagagttataacagcgtgatgggtgttcctaagcataaatggagtcaaaaagaagagtcagctctaagatctgccgtttccaagcacggccctggtagatggcgcaccatcctcaaagaccctgactttagtcaagtcttgttccttcgttccaatgtagatcttaaggtcatctcatcaccccttcttgatcctttctctcaactttatagtgattcagccttgttttgtttttgttggactgagacaggataaatggagaaacattagtgtcatggggtatggatccggatcgcgtcccaagcctgttaaaaggacgcttggctcattg

SEQ ID NO: 3091 - DNA, 1722 bp, Glycine max
  misc_feature (3)..(3): n is a, c, g, or t
  misc_feature (8)..(8): n is a, c, g, or t
  misc_feature (81)..(81): n is a, c, g, or t
  misc_feature (85)..(85): n is a, c, g, or t
  misc_feature (147)..(147): n is a, c, g, or t
  misc_feature (233)..(233): n is a, c, g, or t
  misc_feature (272)..(272): n is a, c, g, or t
  misc_feature (279)..(279): n is a, c, g, or t
  misc_feature (281)..(281): n is a, c, g, or t
  misc_feature (333)..(333): n is a, c, g, or t
  misc_feature (409)..(409): n is a, c, g, or t
  misc_feature (422)..(422): n is a, c, g, or t
  misc_feature (502)..(502): n is a, c, g, or t
  misc_feature (525)..(525): n is a, c, g, or t
  misc_feature (528)..(528): n is a, c, g, or t
  misc_feature (539)..(539): n is a, c, g, or t
  misc_feature (654)..(654): n is a, c, g, or t
  misc_feature (783)..(783): n is a, c, g, or t
  misc_feature (793)..(793): n is a, c, g, or t
  misc_feature (813)..(813): n is a, c, g, or t
  misc_feature (943)..(943): n is a, c, g, or t
  misc_feature (1016)..(1016): n is a, c, g, or t
  misc_feature (1120)..(1120): n is a, c, g, or t
  misc_feature (1170)..(1171): n is a, c, g, or t
  misc_feature (1183)..(1183): n is a, c, g, or t
  misc_feature (1400)..(1400): n is a, c, g, or t
  misc_feature (1500)..(1500): n is a, c, g, or t
  misc_feature (1502)..(1502): n is a, c, g, or t
  misc_feature (1504)..(1505): n is a, c, g, or t
  misc_feature (1507)..(1508): n is a, c, g, or t
  misc_feature (1538)..(1538): n is a, c, g, or t
  misc_feature (1545)..(1545): n is a, c, g, or t
  misc_feature (1550)..(1552): n is a, c, g, or t
  misc_feature (1554)..(1554): n is a, c, g, or t
  misc_feature (1556)..(1557): n is a, c, g, or t
  misc_feature (1565)..(1565): n is a, c, g, or t
  misc_feature (1628)..(1628): n is a, c, g, or t
  misc_feature (1637)..(1637): n is a, c, g, or t
  misc_feature (1640)..(1640): n is a, c, g, or t
  misc_feature (1679)..(1679): n is a, c, g, or t
  misc_feature (1681)..(1681): n is a, c, g, or t
  misc_feature (1684)..(1685): n is a, c, g, or t
  misc_feature (1687)..(1687): n is a, c, g, or t
  misc_feature (1697)..(1698): n is a, c, g, or t
  misc_feature (1703)..(1703): n is a, c, g, or t
  Peptide Sequence Number=SeqID_6614
  Probeset Number=SeqID_12870
ggngcgancggctcacgcgtgtctgagagtagatcgttaatgatgtacatggatcctcgtatttctatctccacgtacctntctnactctcgtgtaatgcatagtagctcgctgtcacttatcctatgtgcactctgcacgcagtangcgcgcgtctgcgcggatctatcacagatcttactgcaccgcgacacgtgcaattatgatctgctgttggatggctcatgtcacantgagacttgtgacagtgtgatgcgagctgatgtgtgtgnggacgtngntacttgtcgtgcgtcctcctgttgtctgtatgtgtctcagatctcgtaccanctaccggcgtccacagctattggcaccacgatgtgtattagcatcatgcttttgtcgcttgacattgtaggcgtgngggcacatggcanatacaacacacgactgacgtgtggtgtggtcagttatatatgattatggagttgagattagttttatgttgtggattttnattatgtaagtgatgtagggtgnggntctgggtctcnacaaacccactctcactggacattgcacctggcgcagcacacagacgcggtctccgattctgcttctctaattttctcgtatataattattctccgagctactgatctcgccacncaccgtccagagaacacaactaacatctgctatgatacttagcagtatactagtcttgagacagcaccaggcgctatactctatagagatgttgatacttactacgtctacgacatcctacacgctcangcaacagcantgcgatccgcttatggttanggtgatgacgtggaatgtgtatgtgcatgttcttggctgagtgatttgtgctctcaccttcatcttcatccactctctcgagtctggtctctggatgattcttgtccctcgtggattagcccagcattanaatgcacagtctatcgcattgtccattctctcaccgtcatgtataggccaagaactgcagggcagtagcactnctctgtacagccagaggcccatatataacagtgagatattgatctgtcaatatcagaagacccggccttctctgcccctcactacataacttctatctataganttattgttttattttcttgtctcatatatcctggccgtctatgccttctnngttagctttccncccactcctgtgtgctgtcttctcttcctctcacaccatatatttcctctatgacatcataatactctgcttttattgagttatattatgtcgcattctcatctgaagagaaataggtaatacagtcaacaaacttctatctctcaactttatctcattctttgtggttcgcttttgttacttccataattctttatctctgatgatagattcctanatcttatactgtatgataggttagttatataattacatttatcttctctgtttacagctgaccgtaatgttattgtgttgtctctcttccacattccttntntnntnncacatacactacagatgaacacaatagagnaataganaaaannntngnnttccctanggcacgcgtgcgatcttgacgcatggtgggggtgtggataatatacagttataatgtttgtgntgggccggnggngggcggggcgaccacacacacaccgaacacaggcgccgngnggnngngggggggggnnggggngcggcaaaggtggtttttt

SEQ ID NO: 3092 - DNA, 1106 bp, Glycine max
  misc_feature (1)..(1): n is a, c, g, or t
  misc_feature (1106)..(1106): n is a, c, g, or t
  Probeset Number=SeqID_12871
ngtcgaccacgcgtccgtgaacagaaaaaagaaaaagaagaatttaaacaaggtgaatcggtcttggcaaattctccaattcggcaaaaggagggaggaatcgcaacccaaccgccattgttccccttcgcatgctctttccatcgcaccaccacaccattcccctgcaccctcacacaccagatccaacgatgaacgatttcgatggcctcttcacctccgatttcggcctcaaaccccagggcaaatccgcgccaatggctccccaatccaagggatcttccaactccgcatctctcaacctcgatttcggatcgcgatcctcctccaacttcgacgatctcctcgccggcgccggatccgacaatcgccgctccgattcccccttcgatttggattccatgtacggcgggccccctgctaggtccgccaactcgccgccgccgccggtctacgacaagccggtgtacgacgacgacattttcgacggcgtcccggggctgaagagcacctccaaggttaaattcgacgatgttttcgcgacgacggcagagagtggtggtggagccgccgcgttcgacgatcttctaggcggctttgggaaggaatcgaagagtttggatgggaagagatcggagaaggatgagaaaggtgtttccgattttgatgatttgcttgctggattcggacacagtaggtcatcatctggtggaaggcacactcctgatatcggtttatcctcagaaccaactggcagtgcatctaaaacaatccccactgcagcagaagaccctttcaaagtatttgaatcagcttcagccccagtggattcatctgcaggcatatgacccattgaaattagtaaatagttcagagtatatatgtttgtgtgtgtgctttttggtaactaggtttctttttcaattggcattgttcagtagtggtgttcatggttttggacttttacttaatgcgcaagaatttatatggtgtgtttatagctctttaccatgtaaagctgtcagagagagctgaaatttggtgttttttggctttttaatctgggaacgtcaatgagaaatgcgaaaatcgactgtgttgagccn

SEQ ID NO: 3093 - DNA, 290 bp, Glycine max
  Peptide Sequence Number=SeqID_6615
  Probeset Number=SeqID_12872
ttttttttttttttttgacacgcaataatgtttaccaatcaaaagattagcaacagtatcaaaaggatccccatcctgttaagtacaatgaattgcttcctaagatggcccacgggcatccatggttgcaatcttttgaacaaggcaccagcaccacaaggatcagtacaagcattcatggttacagtcttctgaacaaggcaccatcaccacaagcatcagtaccagagacatttggaactttgtcacgacgatgagcgccgattgacaataatcaaaagcccaaatca

SEQ ID NO: 3094 - DNA, 1344 bp, Glycine max
  misc_feature (1)..(1): n is a, c, g, or t
  misc_feature (1087)..(1087): n is a, c, g, or t
  misc_feature (1273)..(1273): n is a, c, g, or t
  misc_feature (1314)..(1314): n is a, c, g, or t
  misc_feature (1320)..(1321): n is a, c, g, or t
  misc_feature (1323)..(1323): n is a, c, g, or t
  misc_feature (1327)..(1327): n is a, c, g, or t
  misc_feature (1332)..(1332): n is a, c, g, or t
  misc_feature (1336)..(1336): n is a, c, g, or t
  Probeset Number=SeqID_12873
nggaatatgtagaggtgatggagtggcgatgactagtgtgcatgagagattcacacggagataacggcgagcagggagcgcgagactgggatgcaaacagtatatagagaagatatagataggaaatcagagaagaggagatacagagagataagagatacgatataagaatgtgaggagagaggacaggcgagggcagatcgggaggagaagataccggatgtgaaggtggatgatgaagtcaggagtgcgaagaatgtggacggagaagcagaagaacaatataacagaggacatgaaaggtaagcggacgcgatcggcggtcctgcgcggcacgcaggtggcacagtgtaagagtctgttgtgacttcagactgtgacgtgtatagaaggagggctgagagaagtcttggcgtcgtgcgcgagagctgaggagaggagggaaatagagggaagagtggagaagacgattataatgatagagagcgacgaaaagagatgaaacatacaagtggtgtgtgctcacacatacgagtagatcggcacgcgacgcgggcataccatgtatcgaggttggtggcgctgttctacatcttctcatcaatgagatgattaataagataaatttttgtatgatatatatatatattcaaaacactaaaatcaagatgtgtatgtagggaggaagataatagcaagagaggaatctcaggtgcgggaagacgcaccacgcggggcgcggcgcgcgatgcgtagagaagtaagtaatacatagaaggtaatggtatttcatctacaacacaagatcaactgaatgagtaacgagaacacactaaatagatgactgcatgatatcataggatcttgaataggtatgttgccgacaaggtgtcgttgggccgtgccgtgggtagcacccgacactcggctgggtggaagcgattgcggtgggcgacgggtaaataccaaaagtaaagcagggggagaagggcgggcgagagagcaggagagatggatgtggcgacacgagtgataggtggtggatgtggggaacaaaggaagagacacgaacggatagaggcggagntgcgaaatcgtaataatcggcaaaataataaaggccacccaccaaagcgccggatggatggagggatgcgcgggtgtgtggtggagagggcggataaaagatcaatatagaaccgcaccaagaggtagagaacgcggatagatctcataacataccatttgaggtagaggagagtgtgtgatggantagggagaagaataagaagtgacagaaacaaatacaagaanaaaaannanaaanaaagntgangtgtatat

SEQ ID NO: 3095 - DNA, 1433 bp, Glycine max
  misc_feature (66)..(66): n is a, c, g, or t
  misc_feature (81)..(81): n is a, c, g, or t
  Peptide Sequence Number=SeqID_6616
  Probeset Number=SeqID_12874
tacactaatatgaccacacatattcgtgtgatatttgcgcgcgcagatgtgtgatagtatagtcantattcgcatgtgcgnaggcagtctgcggcgtcgtgattactctgtacatatatctgcggcgcggggcgcgtacacatatatcgcgaggcgagtaattgtgcgcgcgagatatcagcgacgcgccggtgtctatgacgcgttggtgttcccataccgccgccggaccgcggcgcggacgtagttgtttaggacgatcagcatgtgtcggctgtcagtgcgagttattatacatctaatcatatggtttttatatttgcgtgaggcgcgcgagtagggcggtaattctatcattgctattattccgagagaggcggcgctattaattgcgcgtccgcgtttattttattatatataatatagtcgtcacatgacttaactgtcgcgctttcattctcgtgaatggatgataatacagacgtattatgtagttacttcatcattctcaaataatacacagaattacatgtatgtaacatatagagcatataaccgcgcgtagtatggtacaaccgcgtggatgttaagatacaaaagtcatgtacataaccaaagtcacgcgggtatgtagtataataaaagggtgcggagggtataaacaaatgtttttggtggtagtgggatattttaaacacacagagcttataatgtcgttattaggttagacgaggtggtgaagggtcaaacaattaacgaccgtaattttatcgggactgttcttatagtttcctcacccccaggggtgttttttacaccgggggggtggcgtatataactagtgggcgggcattaataactggggggggggaagaagaagaaaagatccgtatgtgcggagaaacgggatatgcgttggcatataataatatttattctgacgcgggcggtctctattgctgggggggaaaaatttaagcagcagaggaggtgataaaagaggttatttgttgtttggggggggggggggggaaaccacccgcggcttctaataaaggctggaatactagaagagatacgatagcgggtagggatataaaatataaggggggagaagagaaatttttaatttcttagcgggatgttttggtggaatcgtggggtaagaatataaaatagtaggggagagtaataatttggtgcggagatatgtgtgcaatccctggttggggtggaaagagtttattgtttgtgtaaggcggggatcgttaacaaatagttccacttatcatttggggacggaggagaaagggtacaataatctggatataaggaggaggagcgggattgaagatcgaacgcaaaattggcggggggggattggggggacaaatggaacagagaataaagattggacgagtgtgggtggggtt

SEQ ID NO: 3096 - DNA, 968 bp, Glycine max
  misc_feature (833)..(833): n is a, c, g, or t
  misc_feature (886)..(887): n is a, c, g, or t
  misc_feature (912)..(913): n is a, c, g, or t
  misc_feature (948)..(950): n is a, c, g, or t
  misc_feature (953)..(954): n is a, c, g, or t
  misc_feature (956)..(956): n is a, c, g, or t
  Probeset Number=SeqID_12875
gctgttttttgattatttgattctttccgccctttttcggagctaggtcccgccctcaaatggtgaccgtcgtttgttttgttttgtggccccaatgccttcgtttcctatctcactactttgggaccaaccaggataattccggccgatgagtgtgctattgcctcggattgttttgttactctccccataatccatttacttttgtagtattgttccattgcttgctttcagtccgggcgattcccggtttggggggtttgccggttaactggtggtttctatgctccgtttggggagctttgccggggatcctaactttgtgatgtgattcttttgcctttgctgcttttattcgcccgtgcccttccatcctcgtacctcagcaatttctttcgatgtccgcgttctttctaattccattttcgtcaattgtgggtttctggcctcgttcccggcaggtttcagggtttgagcatgagtcttttgaatgacgttcaggaattcattgaagcccatccggtctgttcttccggagacattgcggatgcttttgcaggttactcacggcagcgcgttctgcaaaaaacaagcaagttacgtcagagtggtcgtgtggctcaccgttgtgaaggtgatgcacgcagacatttcccgcgcctgagctgagagagcgcaggatccggagcctctgccagttcgtgaaaccagacctgtgctcaatttctatgtcggctctaacgacccgcgggtgattttgtgcctgtccctccaggcggagctcttccgggtcaaaaggtttgtcttctgcgagttcagccgttctctcttcncgtcccgttttcttgggaagggcgtccgtgctcccccccgtgtgcaccccccnnctcggggttccgtacccattttgtnnttatcccccttttttttttgtggtggcgtgttggnnntgnngntttttttttttt

SEQ ID NO: 3097 - DNA, 1344 bp, Glycine max
  misc_feature (19)..(19): n is a, c, g, or t
  misc_feature (21)..(22): n is a, c, g, or t
  misc_feature (25)..(27): n is a, c, g, or t
  misc_feature (29)..(30): n is a, c, g, or t
  misc_feature (33)..(34): n is a, c, g, or t
  misc_feature (38)..(38): n is a, c, g, or t
  misc_feature (40)..(41): n is a, c, g, or t
  misc_feature (46)..(46): n is a, c, g, or t
  misc_feature (48)..(48): n is a, c, g, or t
  misc_feature (52)..(52): n is a, c, g, or t
  misc_feature (54)..(54): n is a, c, g, or t
  misc_feature (78)..(79): n is a, c, g, or t
  misc_feature (105)..(105): n is a, c, g, or t
  misc_feature (129)..(129): n is a, c, g, or t
  misc_feature (131)..(131): n is a, c, g, or t
  misc_feature (137)..(137): n is a, c, g, or t
  misc_feature (162)..(162): n is a, c, g, or t
  misc_feature (202)..(202): n is a, c, g, or t
  misc_feature (204)..(204): n is a, c, g, or t
  misc_feature (210)..(210): n is a, c, g, or t
  misc_feature (216)..(216): n is a, c, g, or t
  misc_feature (276)..(276): n is a, c, g, or t
  misc_feature (389)..(389): n is a, c, g, or t
  misc_feature (929)..(929): n is a, c, g, or t
  misc_feature (1082)..(1082): n is a, c, g, or t
  misc_feature (1092)..(1092): n is a, c, g, or t
  misc_feature (1190)..(1190): n is a, c, g, or t
  misc_feature (1204)..(1204): n is a, c, g, or t
  misc_feature (1274)..(1274): n is a, c, g, or t
  misc_feature (1283)..(1283): n is a, c, g, or t
  misc_feature (1291)..(1291): n is a, c, g, or t
  misc_feature (1340)..(1340): n is a, c, g, or t
  misc_feature (1344)..(1344): n is a, c, g, or t
  Peptide Sequence Number=SeqID_6617
  Probeset Number=SeqID_12876
tggtgtgggtgtgggtgcntnnttnnntnnttnntttntnngtttngnttanantctccttcttttgggtgtgtggtnnattgttgtgtgttgtatagatactangctctccctctcacttgacgagangngatatnttaacgtctcaatatacagaattangagtgtatactcctcatgagtgagatttagatggtaggtntnattcgntactgntggctgtataatactctaatagagtacatctcccactcacacacaacacaataaggtccnatcggcgcgaagggcggcacaaccggcacgcgccgccagagagacgaccggcgagacgcatgagtgcatgcgtcactacaacaagatataaataacacgacagaccggagtgntgcgtagcggaatatatcagtcgttctagggtgatgatggatggccggacggcgcagacacgggaggagcagacacttctatgatgaacgtgctgctgagagagtagagtatgtgtacgaatagtcgggttccgagggagtggttcgctcatccgaacgcgcgatcgccgctcgccgcgccgctggtgattggcggaggatagtggtgcgcagatggggacgtccatacggttaatattacaatagtccacacaagcagtgcccgctggcgcgagcgtggcggagcgctatctgcacgcgtccacatgcatgaggtgcattacagaatgtactaagtcatttggtcattagtgggtgggatattgattctcacccacgatggcaatgcgcgcgcgacgcgccaagagatgacacgccggctggcagtgcacctacgcacccgtcaggacgctagctgtcgcgtagtacgcccaccattgcatgtagagtgagtacttaggcttcgccaactatcggtcgtactgattacacacatgcagngatgatactgtcgtgcaggacagcacacgtcgagccgtcaccgcataccagagaggacgtgtcggcccgcgctacgacgagaggagactggacgtactcatcgccctccatcatatcgtgtatcctccacctgtcgtgaacactagagactanctcggtgagngcgcaaggcacactcctcggccatcagcgtgacaaacgaatgcgtcacacacgcggccacgacaagatcggtgagtgaatggagatgcagaggagagngtgacacagaggtngtagccgcgcgctcgcccctctgtctagcgtcctgtgatggctccgtaggtaggagtgcgcgtaggatgncgcatctanctatctgngatggccaccgccgatacagagtgacagtcctagaacagcacgtcgaancagn

SEQ ID NO: 3098 - DNA, 1430 bp, Glycine max
  misc_feature (1)..(25): n is a, c, g, or t
  misc_feature (1403)..(1406): n is a, c, g, or t
  misc_feature (1410)..(1430): n is a, c, g, or t
  Probeset Number=SeqID_12877
nnnnnnnnnnnnnnnnnnnnnnnnnagatttagtttagtttcttattggatgagcattttcgagccctttcatttcattggccagtatctatttataattctattaatttcaagtttttttgtggttaatgtagttgatacttgctgtgcttcactattttctgtcatgtcaaatgtctcaaaaagttcctttgcatctgataaatatgaaagagtaggacctgattactttgggtattactcttctgaagtagtaaatttattgtcacaagatgaggatgtttttcctgtttctacccaaacacctgagctacctgaaaccaaatatgaagagggaggaaagaagaatttagtcaatcagactgataactgttctggtccgttgtatagtaatgctgttggagctggcctttcagagtttaaaaaggacagatttaaatcactgctcagacagagtgtcattgctctttcgtccgaagttgatgaggtggtagaccctgtttttgcggcatatcatttgcaatccaagctaaaaagtaaatcacaatcattgaatgatacagcgactgcatctgacaatgtaatgcaagttccttgtaaaaagctaaagatctcctcatcttcaacttcagccaggtttcttgaacgaactactaatgtcaatccccaatgcagtaggaagactactgatgatattcagttcctactagagaatgatagtgtggaggttgcagagatggtgaccgaatatgccaatgatctatctggaacactagggtatatggaagaacaacttgagttgcttcttgatactataatgttcaagtgcaggtccatgacccttgctgagaaacaaaggctacaaagtttaattcagaagctaccagcaagaaatcttgaccgtgtagtggagttaatttggcgaaataggccaatagaagaacaaaattgtgacaaaatatttgttgatttggaaaaagaggatgatgctacactctggagactctattattatattgaagctgttgagaaagccaaaagtctttcttgtagtcaagaggcctagttttctaaatgctttaaaaagcctctgagccttaatgatagttcattagagctctcaggtttttctgatcttcctaactctaaaatttagagtttagagtttagattatacagattttcaaaacgcttacctctgttgcgacaacagggatactatagttcatcgacttgagttaaatgccctatacctgaaatgtatagcatttagttttttttccttttcttctcttgacatgtatatcttgagaacgttacgtccccaaatatgtatcatccgcagcgtgtgataggatatatgttatgagtcggcgtcgcatctcgtattgacagcaacacgnnnngtgnnnnnnnnnnnnnnnnnnnnn

SEQ ID NO: 3099 - DNA, 1530 bp, Glycine max
  misc_feature (1)..(1): n is a, c, g, or t
  misc_feature (21)..(21): n is a, c, g, or t
  misc_feature (254)..(254): n is a, c, g, or t
  misc_feature (366)..(366): n is a, c, g, or t
  misc_feature (379)..(379): n is a, c, g, or t
  misc_feature (1317)..(1317): n is a, c, g, or t
  misc_feature (1502)..(1502): n is a, c, g, or t
  misc_feature (1515)..(1516): n is a, c, g, or t
  misc_feature (1530)..(1530): n is a, c, g, or t
  Peptide Sequence Number=SeqID_6618
  Probeset Number=SeqID_12878
nctgcacgctcagctcgtctntcacgccatcacacgtatttagtcttctatagtcgcgggactgagtgtcaagtatcgggcatctatacaagcgcttacgtcaaccgtagacacgatacccaccatctacacgtaattacgatcaccatacgctcacaagcgcacactctgtcacatagacaatacgattagtcgtggtccgtgatgacaatctagtatacacatgataggtgcttgctcgcgcatgtgacganctctcttgcagacagcgccgtgctctcatgacccgaggtatctagtgttgaacacaccgtgcgcgacgagtaactctactctgacgcgacggctctccacagagagcgaganctcgaggtcatgnatctattcttcgtgtagaagtgacccgctattgcggcgcgtcgtgcctatatcacgcgttctctttcttgtagcgttgtcatatggccgctcacttagtctacactctagagcatagatacgctcgccgtgcgcaccttgcggacgacacatatgataacctcatggtcatcatgtgggcgcctacacagtcgaccacgcgactgggacactccgcacctagagaagctcttggcgtggcgcttcaaataagcgatactcagtacgaggacgctacttctcgcgtagtaccacaacaacgctctacggcgcctatcgcgtcatcgacgagacccgcttgacatgtatgctaccacctcacttagtaatggttcaagtccgctcctctcgcgccgcgctcagtagcgcaatttcactagatccacctcacgcaatacagtctacaaagcaacgcttcttttcgcgggggtgtcactctgattagctctcgtggcccgcatgagtaagttatgctcaagtaaagatagatccgccgtgttgcggcctcatggtcacgatcaggtcagatctcttccgctagctcgctagctctacgatggccctccctacgtcgagactagacccttctccgccctcggactcactatcacgtctctcataaccgcctcctacactatctaagtccatgggccacgcgccgtgactgcctccgccatgcactgctctcgagcttcgcgctccataaacactcgcatcatattcactagagccgtctgccgtacagacctctcgtcctggctctgcctcgcgctctctatcccctgcactatatcatcctgcgacctgtccgatccgcaacctcgctaaggtacaccagttacctgcagcttcttacaggtatcgttaccactctcctcatgcggacgatgagaagacaantgatagtctcatacctttgtgcggacctactgagtctatgctagtgttaagtggtgctacgtgccgagcaaaaccacgcacgactcggcggctaccctattagtttcgaagacgccccgcccgcccacgcgacggtggcacctacccatcttattagctactcctcccgcggtgtatgcattggngtaggcgcggggnngccttagtttaggn

SEQ ID NO: 3100 - DNA, 209 bp, Glycine max
  Probeset Number=SeqID_12879
tgcaggaatttaagccataatttcttgaatggacccattggcaatgtgtttactggcttagataatctcaaagaaatggacctttcgtacaataatttcacaggtgatctgccaagttcatttggttccttgacagaccttaatagattgtaagtttctcgtgttagtttgatcggtagcatgttgcttatttgcaggctcttgcaggc

SEQ ID NO: 3101 - DNA, 1427 bp, Glycine max
  misc_feature (119)..(119): n is a, c, g, or t
  misc_feature (194)..(194): n is a, c, g, or t
  misc_feature (446)..(446): n is a, c, g, or t
  Peptide Sequence Number=SeqID_6619
  Probeset Number=SeqID_12880
ctatcggcgcgcacgtgtgagatgcgcaatgacctgatgagtgagtgctcgacgactcacttcgagatgcgtcatctgcagatgtaacgcacattagcggtggacgaactgcgcacggngaagactaggagacgcggtggcatggcgtagacgagatgacgtagtgatacctaggtgcgcggactagctgcgancgtctagcgatgttggtacaccatagccctgcgccctccggacaagcggcctaaatccgatcatataaccgccgcaagtgtcgaacttctccgtggtcaatcttgacatcgcgcacagcccgcgcagggaacattagtaaatagaaaggaggcgcgagtcgtggataagaggcgcgatagaccacgctacgaagcgcggtgctccaaggcgtcatgtccgttatcgccgcatgtacgcacgcaacgatccgncgctccggatacaagggcactatcggaccgcgctcagtatacataccttgtcagtgatacatccgattgagctaggcggtccggcgatgtgacgagtgtagcagaggctcacaggtatgtgcctatctatcacatttcgtcgttatgtgttgctcgtgtaagcgacgaagtatgagaggcagcccgcgataacacaatttctgccgtctctgtggtcgcggccaggactacactgctgtcttgctcgcgccccatgggactgaaggagagtatcggagtatagaacgtaatgcactcatgacggggcctcgctgcaactcgtctcccatgtgcggcggccgcgtcaactcattcgacgttattgatactaacagagcgtctttgactgcaaagctcggtgatacacagaacgcataaaccgagataggataaattaatgggtattcgccccccagaagttggtcgagtgagccgtctcgacgcgcatgccagtgccccccgcgtcatttctgcccccgcgtgagccacttcacggcggcctgcctcggaaggcgggagtgcgcgggaggagaagtaatcgcagcggctatcgtagctctgaacccccgcgccccatggcccgtcccgtccgtgcccccccttcttcctgacatagcttcagctcacaatgcggatgccccgccggcaggacttcacccccgctccgccatccccggtggctggacgccgcgaagctacgtatggggattgctgtgtcaccgggcagcacgaaaaatattttgtctggtgcgagttgaggaatcattactaggataatcgctcttacgtatgaaattacctgccagcccgcgggggtatctcagctagtttatagaatccggcccgcctacacggcggtgcgtagcccccaggttttgagtggcgccggtgttccactcatccctcgcgagttatgttggggcgaggttaggagaaatatcg

SEQ ID NO: 3102 - DNA, 1348 bp, Glycine max
  Probeset Number=SeqID_12881
aaaaatattaaaaaaccttaatattacaaatcccaactcacattcatgttgaccagacccaccatcagcgttttcaactctgctaatgcccaagaagtcgtcagcaaggtcaccctccctgctgtctgcactgcccccatcagacttgatatcgttcaattcgttcacgatcaaatctccaagaactctagacaagctcacggagttaacatccacgccggtatgcaacactccgccgtctcctggggtccaggtcgtgctgttgccagagttcccagaatcagtggatctggtaccagcagagctgctcaaggtgctttcgccaactcttgtagaaaaggtagaatgttcgctcctttgaagacctggagaagatggcacagaaaagttaacattaaacaaaagagacacgccgttgcctccgctttggctgcctccgctgttactcccctcgtttttgccagaggtcacagaattagcggcatccccaaccttcctttggttgttgacgataagctcgaaggtgttgaaaagaccagagacgtcgttgctttcttgaagagattcggtgcttacgaagatgttgaaagagttgccaacagcaaggtcatcagagctggtaagggtaagctcagaaacagaagatacagacttcgtagaggtcccctcttcatccacaacaacgaaaacgccaccatcctcagagccgtcagaaacatccccggtgttgaaatctccaacgttcacagacttaacttgagacaattggctcccggtggtcacctcggaagattcatcatctggactgaatctgccttcaagtcccttgataagatcttcggaagctacagattcgctggacaagaaaagagcggatatcacctccacagaaccgtcttgaccaaccccgatattgccaagatcatcaactctgatgccgtccaaagtgccgtcagaaaccaaagagacaacaaggctcttcactccgtccaaaagaagaacccattgactaaccacgctgccagagaaagattgaaccctcactctgccaccgttagaagaatggaccaacaagccaccgccaacaacagaaccaagagagaactcgctcttaagaacaagagaggtatctccaagagcagaactgctgaagaaaaggctgaacacaagaccagaagaactgcctccagagctttcatggctggtgttcaaaagaacctcaacgatgctcacaacagacctgaagaacaagaatagagggattgtattaattagatagtatgttacatgtaaaaagcgtagttatataatctaaaccagagacgatctctagatcctaactagtgcc

SEQ ID NO: 3103 - DNA, 1484 bp, Glycine max
  misc_feature (1)..(1): n is a, c, g, or t
  misc_feature (53)..(53): n is a, c, g, or t
  misc_feature (57)..(57): n is a, c, g, or t
  misc_feature (99)..(99): n is a, c, g, or t
  misc_feature (116)..(122): n is a, c, g, or t
  misc_feature (208)..(208): n is a, c, g, or t
  misc_feature (220)..(220): n is a, c, g, or t
  misc_feature (278)..(278): n is a, c, g, or t
  misc_feature (282)..(282): n is a, c, g, or t
  misc_feature (289)..(289): n is a, c, g, or t
  misc_feature (390)..(390): n is a, c, g, or t
  misc_feature (408)..(408): n is a, c, g, or t
  misc_feature (410)..(410): n is a, c, g, or t
  misc_feature (440)..(440): n is a, c, g, or t
  misc_feature (608)..(608): n is a, c, g, or t
  misc_feature (613)..(613): n is a, c, g, or t
  misc_feature (615)..(615): n is a, c, g, or t
  misc_feature (617)..(617): n is a, c, g, or t
  misc_feature (624)..(624): n is a, c, g, or t
  misc_feature (697)..(697): n is a, c, g, or t
  misc_feature (845)..(845): n is a, c, g, or t
  misc_feature (1004)..(1004): n is a, c, g, or t
  misc_feature (1197)..(1197): n is a, c, g, or t
  misc_feature (1220)..(1220): n is a, c, g, or t
  misc_feature (1272)..(1272): n is a, c, g, or t
  misc_feature (1396)..(1396): n is a, c, g, or t
  misc_feature (1484)..(1484): n is a, c, g, or t
  Peptide Sequence Number=SeqID_6620
  Probeset Number=SeqID_12882
naaacattattttttatagtaattatggtggtgtgtgagttatcagtaacaanaaanactaacacagcagaacgtaaaatacactggtgagattagaangaaatttgtgtatatannnnnnnccccttatcttctgtttgcacagcatattattggtgcgagactgcgcgccggtctcctactcatcgcgcagcagggcgcggccggngctccacgcggngcagccgctctcgttcctttctctgcctctgcgctgtgccgagaggcggcgtctgctntacnccctccntgctcgtccagacaggacgcggcgaacgcagaggagagagttgcagtcggtctatcacctcctcgtcatctctcaggcacagctgctgagcagcagagcangcacaaacacagctactncnacactcaaacgtcgtggaccggggattcgntctccgagtacgctatggcattgcacctgcgtatgtgtcatgtaagcgggcctcacactctgtatcactagacagcgagagacagaaagatagagatatggtgatagcagattagatatgtaggcctgggaagatgttgtgatatcttcaggtcagtggtagagatgntaatntngnttagctncaactcaggagctgcgagtaatatggtgagaggaatagtgatttcattatttatatatagttatgagggcatnaaatggaaacaatagagagtaataaggtagccttataatataatgacaaaagctcactgagcatggtattattataatgctactcgatccgttgtatagtgaaagcgaccgtgagttggcgtggtaagatgagcgtgacgaggatggngaatgagagatataatatagagagagcatcaatagtgtggatgcggtgtgtgtgagtgtgtgagtgtacatctcattgacgcgcggcttgtctagtcagacggggtgagatgctgtgaggaggtgggctgatgtatgtgtgtagtgtgaggatttgtgntgctgcttgtgactagtccacatagatgtctgtatggtgtgagtgttttgatgggaatgacggatcaccgatctgatgagggagtgcgagatggtagaggaatgtcgtatgtaagcacagacgaggcagttgagagtagtggcttgccctcgtcgtgcgtgactacagacttgtgagtgcgataaacctcganctaattttatatctgattcacgnatccagcatagtgattttaatagagagtggtcacatttgaggaattagaagntgagatgctcataaacctatgatcatcgatatgatatataagagttaactattgttgactgattctaccagacatcgccgatagagagcgtgactatagtatgtgtatatcattctacgtactnacgcgagtaggtatatgagagatcgcttctatacgtctcgtcacgtagagtatctgcgcacgagaagaacagatcatatcgagtcaan

SEQ ID NO: 3104 - DNA, 393 bp, Glycine max
  misc_feature (36)..(36): n is a, c, g, or t
  Probeset Number=SeqID_12883
cgtccggtgacaggctacactgacccctacactggnaaacaaaatctccctctttcaagccatgtaataaagagttgattgtgaaagaccatggtatccgtctcctagaagcacagattgccactggtggtatcatcgaccctgtgcacagtcaccgagtccctgtagaggtggcctacaagagaggctactttgatgaagaaatgaatataatactttctgaccccagtgatgacacaaaaggtttctttgatcccaatactcatgagaatctcacttacatgcagcttctgcagagatgtgttgaagacccagacacagggatgttcatgttggatgtgaaagacaccaaagcctctcttgtacgaacagactacacaactacactgcagt

SEQ ID NO: 3105 - DNA, 1528 bp, Glycine max
  misc_feature (1)..(24): n is a, c, g, or t
  misc_feature (29)..(33): n is a, c, g, or t
  misc_feature (57)..(57): n is a, c, g, or t
  misc_feature (60)..(61): n is a, c, g, or t
  misc_feature (68)..(69): n is a, c, g, or t
  misc_feature (90)..(90): n is a, c, g, or t
  misc_feature (317)..(317): n is a, c, g, or t
  misc_feature (647)..(647): n is a, c, g, or t
  misc_feature (758)..(758): n is a, c, g, or t
  misc_feature (825)..(825): n is a, c, g, or t
  misc_feature (970)..(970): n is a, c, g, or t
  misc_feature (1043)..(1043): n is a, c, g, or t
  misc_feature (1055)..(1055): n is a, c, g, or t
  misc_feature (1126)..(1126): n is a, c, g, or t
  misc_feature (1156)..(1156): n is a, c, g, or t
  misc_feature (1309)..(1309): n is a, c, g, or t
  misc_feature (1436)..(1436): n is a, c, g, or t
  misc_feature (1480)..(1480): n is a, c, g, or t
  misc_feature (1528)..(1528): n is a, c, g, or t
  Peptide Sequence Number=SeqID_6621
  Probeset Number=SeqID_12884
nnnnnnnnnnnnnnnnnnnnnnnnttttnnnnnaaaggggttcccgtgtgtcctcantanncgatctnncgatatttttaatattagggngccggcccctccctcactgttactgcctccggcgtcgtgcggtttcacgctaacacaatagcggatgaaatagtatgtattatgtatggacacgcacagtaatattgtgaggtgttcccgtacctcgcccacttagaactgtaagagcgtattatgagtagagcatgtaagcagcgccacgcttcccatcgtagtttgtcttatggtatctattgagcacgatatgnagttaatccgaggacaacgctaagttgcagtcattttatgtgcgagtgtgaaatggcaatgttatactgtataccctctactcccctatagtatgcaaatgagtggaacagcggtgctgactggttgtactcatggtgaatctggtcgatcatctgccgagtccttgagggtgatatgccaagtatactgttctcttccgatgaccgatacagatggaatgaattcgatggttcctgtgatctcagcgcaaggtatcgctcgcgcagcaacccgtcgtgcgactaaagaataaatacgagcgggaagaattcggccgtgtttttatgatncttgtattctggatagttatacaaaaccatcgggtacatctcatactcgtattgacctgatgaatctgatcgcagcccatgtggatcacactgccacccttatggtatacnagtcgcttgcaacttattcccagatggatacaaggaactcagaaattacctctctcaatacttgtgntagcgcgagcgtctgctttataacggatatgaggctgcgtgcggatatggcatatcgcatacccccaagagacatccgtaagaatatacgccttctcgatgtctagctaactctggtggaccgtcgagagctcgatgtggcacanctcagattaatagatggtcttcattgatagcaggtgtgtgcgcggtgtgggttcttcactcaccaagtagtanactgactctggntggtattacttcccattgacaatcgttatagagagaaccggcccgtgtggagagacacaactctacctgcncttcagtacgacacgacatacgactatatntgcagataattctagtgagatgcatcctcctactatgcgtcgtctctcgtactgtaactagtgcatattatgagtgaatcatctttccgcgtgcatcgagagacggattgagtcgttatacaatcgcatcgtagtagatgatccgagactcgncggtcgacaagttagcagagtatcgcgcacacgcacaccaccccaagaatagataagcacaacgacgaagggatgactcgcattcgtgggcttgatacaccgcgagactccgacctggcacgttaancgacatatgccatctagccagaggtgcaaggtagagtgtgtggntcgtgtctgccacactcgttttatcctctctcggcactggtcaacatn

SEQ ID NO: 3106 - DNA, 2182 bp, Glycine max
  misc_feature (1)..(1): n is a, c, g, or t
  misc_feature (10)..(10): n is a, c, g, or t
  misc_feature (18)..(18): n is a, c, g, or t
  misc_feature (20)..(20): n is a, c, g, or t
  misc_feature (51)..(51): n is a, c, g, or t
  misc_feature (56)..(56): n is a, c, g, or t
  misc_feature (81)..(81): n is a, c, g, or t
  misc_feature (135)..(135): n is a, c, g, or t
  misc_feature (146)..(146): n is a, c, g, or t
  misc_feature (159)..(159): n is a, c, g, or t
  misc_feature (187)..(187): n is a, c, g, or t
  misc_feature (212)..(212): n is a, c, g, or t
  misc_feature (223)..(223): n is a, c, g, or t
  misc_feature (234)..(234): n is a, c, g, or t
  misc_feature (239)..(239): n is a, c, g, or t
  misc_feature (252)..(252): n is a, c, g, or t
  misc_feature (268)..(268): n is a, c, g, or t
  misc_feature (277)..(277): n is a, c, g, or t
  misc_feature (284)..(284): n is a, c, g, or t
  misc_feature (306)..(306): n is a, c, g, or t
  misc_feature (333)..(333): n is a, c, g, or t
  misc_feature (354)..(354): n is a, c, g, or t
  misc_feature (380)..(380): n is a, c, g, or t
  misc_feature (387)..(387): n is a, c, g, or t
  misc_feature (457)..(457): n is a, c, g, or t
  misc_feature (522)..(522): n is a, c, g, or t
  misc_feature (543)..(543): n is a, c, g, or t
  misc_feature (563)..(563): n is a, c, g, or t
  misc_feature (580)..(580): n is a, c, g, or t
  misc_feature (641)..(641): n is a, c, g, or t
  misc_feature (662)..(662): n is a, c, g, or t
  misc_feature (681)..(681): n is a, c, g, or t
  misc_feature (689)..(689): n is a, c, g, or t
  misc_feature (716)..(716): n is a, c, g, or t
  misc_feature (737)..(737): n is a, c, g, or t
  misc_feature (746)..(746): n is a, c, g, or t
  misc_feature (813)..(813): n is a, c, g, or t
  misc_feature (891)..(891): n is a, c, g, or t
  misc_feature (900)..(900): n is a, c, g, or t
  misc_feature (1011)..(1011): n is a, c, g, or t
  misc_feature (1013)..(1013): n is a, c, g, or t
  misc_feature (1015)..(1015): n is a, c, g, or t
  misc_feature (1321)..(1321): n is a, c, g, or t
  misc_feature (1377)..(1377): n is a, c, g, or t
  misc_feature (1400)..(1400): n is a, c, g, or t
  misc_feature (1405)..(1405): n is a, c, g, or t
  misc_feature (1564)..(1564): n is a, c, g, or t
  misc_feature (1875)..(1875): n is a, c, g, or t
  misc_feature (1904)..(1904): n is a, c, g, or t
  misc_feature (2102)..(2106): n is a, c, g, or t
  misc_feature (2120)..(2120): n is a, c, g, or t
  misc_feature (2165)..(2165): n is a, c, g, or t
  misc_feature (2181)..(2182): n is a, c, g, or t
  Probeset Number=SeqID_12885
nagccgctgntgcagtgntngagcgactgtcgtagtaggacgcgtagatantgatnactacccagctcgctggtcatcgtngttagtatgacgtcaggaaacggatgctgctgatacatcagagatcgtgtcganccatatcatgntgtggattttcgncccatgaagtgcacagtatcagtcgtantggtcgctgctatcgtgaatgtgcntgacgtgagcntaccactcgtngtgantcgtgcattcaantacgtgacgcaactantcgacctgnaggatcntgcgtgtcacatgacctgagtnctagtcagctcgacgatcacgacttgncgatgatatgatgcatacgcntcgagtgacggtcatgagctcatttnagtagtncgccaggatgtcgatgtagcaacccttgtcagcgggtcggatgatcgaagtgaggtactgacctccatanagtgtgtcaatacacgtactcatcatggatcacgtaccttaggagtcacgacgtacatatagccncaccgcaagtatactacgcantatgacggtgatccacatcntcctacgcatcgctcantagtcatataccatcgagctcaatcgcagccatgcatggccgatgttcgtgcgcgtgatcnttatatgctacgcacgtacgntctcgtctatacatgcacncatatcanatagcagcgctcgtatatgcactcgcngtacgtatagtactcggtagntgcgcgagnagcgtatagcttcgttgtcgacagatcagctgtagtagtactgctaacagagcgtagacgtacactngcatagtgacttatcgctgctccgagatgcggtcgcgcacagcgcgcgttgatcttgatcacaccacgatactgtcancgtatagcnctcatgtcatgctcaggcatgaatatgaaaggcgacagctcatcgctcattacaacagcccatgtgtcatcgtaacaggtaacgctactactcgctcagcctcatctgtcntntntcgaggtacgttgtgaaatcacgcacactagatatatgcatgatcctttatcgatgctgagctagtgtgctgactgtcgatactcctgtgagcgcgatgatagagctgagtaccattttaaagtatgtagtactatgctcatcgattcgcgtctggagtgccgacgtaagagtgtactctgtgcgactgcgtgtagagagggcgttacgctcttcttatgcgcgttacaatgtctgtggtgtggctcagtcacgagcgctagaacattctatgcgtgacttgcatcatagaagtgactctcagcanatctcacgcttatatcttagtcggagtgcacgatgccagtgggactgcgaaatagngcatatataacgcgtattgtatnatacntcctaaatatatgatgatgaatatgtttctctattaatatactcctcagatctatacagataactagtaagcttcctctgagtgcgtgatatatgtctatgtgtgggtaagagttatagcagccttccgacctacatatagtaattgagttcatctatnatccactacgccgctactatcgtagatttagggtgcagccagcacagatcgttgtctcatactactgctggccatgacaggaggtagagagtctgagtattcatatgctgtatatatcacaaatacatcgttcttcgttctatcgacatcgcgtgcgctggagagatctagttatattaagtagtgtgtctgtcgctctccatgaaatttccgttccattggtgttagatcactgtcaggaacaagcagtgagtgtggacaggtagatgtactgcgttgtggcgcgctgtagtgtatagtccgtgggacgnctaatatacatcacacgtatactattatngagaatgacgagctatagtcagtatatctatacttcttacttgcttgcagacatttttgtccaactatagagcaacatctccctactcacacgaatgtgcagattaggcggggggtgtgggggcacctcattaatcataccctccgctttctacgagaggaggaggcgcgtcggtcacccactagctatctgactgtnnnnnctgtccacggcggnaggaagaagagaagcaatattatttctagtgatagttatgtatanttatctggagattttnn

SEQ ID NO: 3107 - DNA, 2054 bp, Glycine max
  misc_feature (47)..(47): n is a, c, g, or t
  misc_feature (95)..(95): n is a, c, g, or t
  misc_feature (217)..(217): n is a, c, g, or t
  misc_feature (222)..(222): n is a, c, g, or t
  misc_feature (226)..(226): n is a, c, g, or t
  misc_feature (238)..(238): n is a, c, g, or t
  misc_feature (268)..(268): n is a, c, g, or t
  misc_feature (294)..(294): n is a, c, g, or t
  misc_feature (297)..(297): n is a, c, g, or t
  misc_feature (371)..(371): n is a, c, g, or t
  misc_feature (379)..(379): n is a, c, g, or t
  misc_feature (461)..(461): n is a, c, g, or t
  misc_feature (474)..(474): n is a, c, g, or t
  misc_feature (567)..(567): n is a, c, g, or t
  misc_feature (586)..(586): n is a, c, g, or t
  misc_feature (604)..(604): n is a, c, g, or t
  misc_feature (606)..(606): n is a, c, g, or t
  misc_feature (780)..(780): n is a, c, g, or t
  misc_feature (807)..(807): n is a, c, g, or t
  misc_feature (852)..(852): n is a, c, g, or t
  misc_feature (1049)..(1049): n is a, c, g, or t
  misc_feature (1096)..(1096): n is a, c, g, or t
  misc_feature (1289)..(1289): n is a, c, g, or t
  misc_feature (1997)..(1997): n is a, c, g, or t
  misc_feature (2008)..(2008): n is a, c, g, or t
  misc_feature (2012)..(2012): n is a, c, g, or t
  misc_feature (2045)..(2045): n is a, c, g, or t
  Peptide Sequence Number=SeqID_6622
  Probeset Number=SeqID_12886
cgctgcgtgcgcgtcgtatgtactgatacgtatcagcgtatcggcgngctcgacaggcgcatgtcaagccacatcatcgttaactaacttatcgncgcgatggcatcatatgctcatgactgttcgtcacatagtgtcgtgtacgacctgagactcgagtcatatcgtcagctcaagtacactaacagtcagcagcgtgcttcagctatggcactgncgacntcgncttctacctcanatgctctagtatcagatactgagacagggncgcagacacgaaacagatcgctgggnggngtaacatgctcgtatgacataagcgactatacgcgcgtcgtagacacagacgcgcgcgcagatcagtctcgcancatgtagntcgagatctggatcgatcgctactatgcgtatacgatgtgctcgccagtcgtcgactgtatctttacgtagcatcgccgtcntatgcaacgaganatacgtaggtcgcgtcgactctatcacatcgtctgcgttgtacgacgcagagcacgagcgtagactctgctcgcacacagtgcgtgtcgtacnatgccgatatcgacatgancttcgatatcttgatgtngnagtcatgttcgttgtgcacactcaaaatatcgtgctatgtgacacatactataatccactatacgtcagcacattatcatatcatgccgcatcgtcatcgatccaccgagcgcgtgccgcgcgcgcgacgcgcactcatcaaagtactacatatatcgtgccgcactcacgctntccgctcggcgactcgctatggttgtncttcgtcgatcgcctctcaccatacaaccttgatactgcatgtanatatacacacatacaacatagggtgacgtcgcgcgtcgtgcgcgagtgtacagactcctcatgtagctgtgtatgagcgattacgtgcgcacataacacactagtcgagttggagcggtgcgtgacaatcatatatcgacgtagcgtacagcgcaacgccgcgtgatgttcgctacttatcatcgattgtcgtacantcctctacagacacctgtcacggccggccggtagcgacagtattcgncgacagcacacacactatatcgaccgcgcgtgcgtgcactcagtgcgcactcatagactagatgcgcgcatgataataattacatactcaccaacactctctccattatcatacgtccgcgaactatctataatatgatgggtcccggggtgcgtagagtccgtcacatttgctaagctgacgggcgtgcacnaagcaggcgtctgtagttatacaagtggccgcggcatcataacatcttatacactacgccacttcaatacgacattcctaatttgtcctgtctctgcccttcccgctggctcgttaccactggtccgcgaccgtgccgccgcgtctgccgtctgatgtcaccgcgcgccgaaatcaacgcctcctcttcgaggagggtgtgcgacaagaggcggtgcatagctgtggtatcattatgaggcgctggccgccgcccgtggtcagtgtaaagagactcgcgtgtggttgcgtgtgtcaaacaggtggctaatatatttggcggtgtcaatctttacttatactagagagtgcggttgttataatcgaacctgcgcgccgcgaatacttgcgcacggtggacatccaacgctatgtgggcatatagatttcgtgatctgggttgcgttgcttgctgtgttgtacgagatctgcgggaagactatagtaacgttgccgttcaaataaataaagcgagagatcactggtcgcgagtagacgctcctaccgatccgcttgaggattaaatatcccccgcggggcgggttggggtgagcagggtcagtcgatctgtaaacaatgtcagcgagtcttacgtgtctccacgcaaccacacctcgatagcctccgcggccaacgacgagctcgcgtgtactctttcgtctatctcaantctatactatnaatngtctaacaaacgcagtacaacggggcgtgacantgagaagaa

SEQ ID NO: 3108 - DNA, 416 bp, Glycine max
  misc_feature (234)..(234): n is a, c, g, or t
  misc_feature (247)..(247): n is a, c, g, or t
  Probeset Number=SeqID_12887
gcggcgtctaaactaggatcccggctgagctgtcccttacttcgttgtgcttcgcctctggcgttcaaaggatttgcgtttgtgctgaaggctgtgaggccaacttctacactctcagctataacatttgcaccgttcgtgaaccctctctctctctccaccacacgcgcgcgcaagtctcgatcaagagcgccttctcaaggactcttgaagaacaatccaatcccaccactntgggggtaggctnttaaaataaataaaaaaaacgagggatccaatccagcaaaggttgttgtttggtgtgtaatgttttaggttactatgtacctacgcactactgtaagagtttttttattattatttttgtgtgatctttgtcactaaaaaaaaaaaaaaaaaaaaaaaaaaaaaaaaaa

SEQ ID NO: 3109 - DNA, 1770 bp, Glycine max
  misc_feature (13)..(13): n is a, c, g, or t
  misc_feature (23)..(23): n is a, c, g, or t
  misc_feature (30)..(30): n is a, c, g, or t
  misc_feature (32)..(32): n is a, c, g, or t
  misc_feature (64)..(64): n is a, c, g, or t
  misc_feature (576)..(576): n is a, c, g, or t
  misc_feature (703)..(703): n is a, c, g, or t
  misc_feature (842)..(842): n is a, c, g, or t
  misc_feature (958)..(958): n is a, c, g, or t
  misc_feature (960)..(961): n is a, c, g, or t
  misc_feature (1174)..(1174): n is a, c, g, or t
  misc_feature (1265)..(1265): n is a, c, g, or t
  misc_feature (1318)..(1318): n is a, c, g, or t
  misc_feature (1501)..(1501): n is a, c, g, or t
  misc_feature (1518)..(1518): n is a, c, g, or t
  misc_feature (1575)..(1575): n is a, c, g, or t
  misc_feature (1601)..(1601): n is a, c, g, or t
  misc_feature (1666)..(1666): n is a, c, g, or t
  misc_feature (1770)..(1770): n is a, c, g, or t
  Peptide Sequence Number=SeqID_6638
  Probeset Number=SeqID_12888
taacacgcccacntcctcgcagnctacttnantcttcgacttcaccagatcacattcgtgcagntgagatgatagtaggcggacaggccgcgggccagagttgcgccagagtatatatatttttccgcaatgaagacgtggcaatagggaggcgagagcgagagatctttattcccacagcacctgaggaggctagcagacagtagtagtcattaccggtatatgcagacagcgaaaggctctgccaagcatccagccacgcccatatactcacacagcacgcacgcgtaaccaacactatcacgagcgcaggatagcactacatcaacgcgctgtctttaactatcttgatgctgtcgttgtatggtatgataatatcactacgacagtagtatccagctagacatacgcgagcttgcacctctgagtgacgatgcgtatgtgcgagtggttgatcgtgtgatgatcgtggtacgagcagtacgtgtccacgacgtactacgtgtcgtctcgtgtcgatgtcatactctggcgctcgcgtcgtattggactactctcatcaagcagccgcgtgtncgtctcgtctatcgtgtggctgccgctccgcggctcgtgcggatggatggccgtgtcgtacatcctagctcacaatctactgctgtagctgtatctgtgtgtagtgcatgtctagacaacctcgtcncccgtcgtcacgctctctttatgtatagatgcactacacgtcatgtgtatgtctagcaccacgctcgcgtaccgcgcgtgcgctatatagcgagggcactgacgtcagactgtgtatgcgtggtgcgcacgtcgcgggngcgtggtgatagacgcttacggcggaggacatcgtgcacgtcttcggtacgaccacgcgcacgagctagagcggtaggcggtgtctcgcaactaatgtttgcagacgacaggcgtnannctacaagcgtgtcgcgcaaccgcggagaataggtagctgaccatcaccggctgtcatcatagcgtcgctctcgactactcgccactgcggcgttactcaccacgctatgacttcttgtacatatggagagacgttccctccggtctgcagagctccagagacagcatgattgggcagcgagcagacggctacgatcgttgcgcctatacattnactctctattctgatctgcagccgttgctggatactctcgtctgagacacagaccacctcgcgcgacgccacttcgactcactctatctcntgtactctttatacacggtgcatcacttcacttcactgatcaccgcatcgagnctcgcgacgcgcactcagtatgtatgtgcatgtatagttcggactggcgcgtggcgatagacgaggcgtgacgcgcgcgcgtatctcatgccgctgtactcttatcgcatagttcgtacgatgtcaggacggctccttattgacgacgcgcgtagtatgctccttgtcgtgcgtatatacgcntctactacgcgcatctncatgtcgctacctctctcgaacggttcgtcgagcgttgacggtgtgaggtgctcctncatccacgtcgtgcgtctagtcgtgnctctatacctcttgtctctcgacggcgtgtgtcccacgctccatgatcagcgatgctacgctcgncatgcgatgagatcatggcgcagtacgtatgcagaccgtcgcgcgagtgctgcgcgctgacatcatagagctgaacatcgactacacgacgcttccaatacacn

SEQ ID NO: 3110 - DNA, 465 bp, Glycine max
  misc_feature (95)..(95): n is a, c, g, or t
  Probeset Number=SeqID_12889
aaatgagatggttctgtctcttcagtatgcggtagccgagatggccaacggtccgtacatcttgcatcacttcaagaaaatggaaggggaatgcngcgtgttctggaacccggagaacgaggagatccattgttcgtgcaaggagtttgagcattcgggaatcttgtgcaggcattctcttcgagttttggccgtgaagaactgcttccatataccggagcagtactttctggtgcggtggagacaggaaagctcccttgttagtgaagagaatcagaatggtatgggtattggcgatgactgtgttcaaacgtttcagtcgcttaccgaaactcttctaacagagtctatggtctcaaaggatcggcttgattacactaaccaagaactttctgcacttatcgatcgtgtaaggaatattgaacctgctaatacttgtatcagtcatgactgctaatcaagcaa

SEQ ID NO: 3111 - DNA, 587 bp, Glycine max
  Peptide Sequence Number=SeqID_6639
  Probeset Number=SeqID_12890
aagaaagagtagagtattaacattattttggrcccacgaaacaaaattagggagtggctacaaatagcgaaactggaggtttcatgcttttgcacggagcaaaagaccgttccagtcatccataagcgccattagaagcaccacaggaaatgaaaagacagtcctaagacaagattttgcagccgtcggccacgcgcaagtacgcgacgttgcatagcatgggcgagtgagcaccagatcggcatactgctttcgtacgcctagtaaattgatgatggcggcggcggcggcggcggcacgggcttcaccatcgtcttccagccgttggggtccggcgagggtggcttcacgggcactctctggcccaagcgccggccggctaccacacccagcttcctcctctcacgtggcgtcgactgcgccgaccggctaccctgcgcacccgcgtcggcgtcgccacccagtagcagcactggaggagaacgcagcggcggcggcgagtacgtggccagcagcaccaggaggccggcggcaacgaggaccgcgtggacggccgtccggcgacgcatcggtcgagctataggtgt

SEQ ID NO: 3112 - DNA, 1352 bp, Glycine max
  misc_feature (1)..(1): n is a, c, g, or t
  misc_feature (1019)..(1019): n is a, c, g, or t
  misc_feature (1343)..(1348): n is a, c, g, or t
  Probeset Number=SeqID_12891
nagtgtatcacgcgagcgagcacaaccacaaccacaggcaatacggataagagtcctatcatatcaaagaagcgggaggagagcagatagagagagatatacagactgtatagtcgtcgcgtacgggcagcagagaagtagtgagtagtgatagagacataagaggagagttcgccctgagatgatgtgagaggttgcgtactataggtcacgctatgtaactcgtagctagctttgtgttatgtagcgacggaggataagagtgagttgtaggtctgcatcacacagcacatacgacagacggcgtcgacgatgaagagcaacgcggtcagcggctggagcgatagactgaggagtgagatataacacagagagatgacaacggaacgtgagagcggggaggttcgtgatgcatttgaaatagagaacatgtggttagtgtcgatgtttaatgttatctacttgaagcacgaagaaagaaagagtggagcgatatgaccagagagaggaacgattgaagtgtatttgtgtcggtattagtatattagagtagcgattatagttaattacatcatacaaatggagatgaggaacacgaagggagcggctgtgttagttcagggcctgctcgcttattgacgtcgcatctcatgtgttgtgatagtccgacgagtgtgtggcgatttcagatagtgaatagagagatggatgcataatacgtgtgtcgactctctcttcgtgtctttgccgttagctgtctatatagtaataataatttatgctttactacccccccatgcgggaaggggccgtagctagtggacggtgtatggccgaggaccctatctcaccggctatgggttgtatgcgttaggtcccttctggaaaaataatatctataatttatataaatcgaacggggtataagctagtgataaatagaagtaatagcagataattcgagatctagattaatcaaccacccgaggccctcgacgtgggatgcgtgagtcaccacntgattcattgatggatggttcgatgacacacaacggccattgtccagcaccgagaggagatagtgaagtatcgtcgtatttggtcatgttggatgcgacgccggacacgcatatgatcatcctcccttccgggtactctggtgctgcccggcctgctgcggagaaacaacatagtaattatacttcgaattctatcccaagccgcccaccacctgctcgtgttcgcctgtcgctcttctccacatccaggtgcaaaattttatgtgtgcttaatagaatgatgttaataaaaatatatttattagtatattcccctcacccccnnnnnncccc

SEQ ID NO: 3113 - DNA, 1757 bp, Glycine max
  misc_feature (30)..(30): n is a, c, g, or t
  misc_feature (33)..(33): n is a, c, g, or t
  misc_feature (60)..(60): n is a, c, g, or t
  misc_feature (88)..(88): n is a, c, g, or t
  misc_feature (101)..(101): n is a, c, g, or t
  misc_feature (190)..(190): n is a, c, g, or t
  misc_feature (214)..(214): n is a, c, g, or t
  misc_feature (357)..(357): n is a, c, g, or t
  misc_feature (401)..(401): n is a, c, g, or t
  misc_feature (405)..(405): n is a, c, g, or t
  misc_feature (425)..(425): n is a, c, g, or t
  misc_feature (428)..(428): n is a, c, g, or t
  misc_feature (497)..(497): n is a, c, g, or t
  misc_feature (522)..(522): n is a, c, g, or t
  misc_feature (927)..(927): n is a, c, g, or t
  misc_feature (938)..(938): n is a, c, g, or t
  misc_feature (944)..(944): n is a, c, g, or t
  misc_feature (1108)..(1108): n is a, c, g, or t
  misc_feature (1171)..(1171): n is a, c, g, or t
  misc_feature (1199)..(1199): n is a, c, g, or t
  misc_feature (1220)..(1220): n is a, c, g, or t
  misc_feature (1245)..(1245): n is a, c, g, or t
  misc_feature (1258)..(1258): n is a, c, g, or t
  misc_feature (1261)..(1261): n is a, c, g, or t
  misc_feature (1314)..(1314): n is a, c, g, or t
  misc_feature (1317)..(1317): n is a, c, g, or t
  misc_feature (1358)..(1358): n is a, c, g, or t
  misc_feature (1360)..(1360): n is a, c, g, or t
  misc_feature (1371)..(1371): n is a, c, g, or t
  misc_feature (1393)..(1393): n is a, c, g, or t
  misc_feature (1499)..(1499): n is a, c, g, or t
  misc_feature (1507)..(1507): n is a, c, g, or t
  misc_feature (1515)..(1515): n is a, c, g, or t
  misc_feature (1592)..(1592): n is a, c, g, or t
  misc_feature (1615)..(1615): n is a, c, g, or t
  misc_feature (1617)..(1617): n is a, c, g, or t
  misc_feature (1635)..(1636): n is a, c, g, or t
  misc_feature (1648)..(1648): n is a, c, g, or t
  misc_feature (1729)..(1729): n is a, c, g, or t
  misc_feature (1736)..(1738): n is a, c, g, or t
  misc_feature (1751)..(1753): n is a, c, g, or t
  Peptide Sequence Number=SeqID_6640
  Probeset Number=SeqID_12892
cgcgaccagtcgacagtcaggcgcgacgantgnagtcgggagcgtggcacattccttcgnaatgtagtgatatctagtacacgagtancgctcactgagtnccaatttgcttgataaacgagcagaatgcgaggtagatgagatgcgcgcacaggctcatatctgagtgtgagagtggtgatgtcgagangatgtgtacgcgagatcacgatanagctatgatttatgcatgatgaatattatcttgtagtctcactctcggtagatcagtatcgacgatgcagctacatatccgacggttggtatgagatagtagtgtacacgagacaggcgtgttgtcatgcgtgatgtagatgncgacgagcacagcagcacgaagacgagcgtagctccgtactagncgtngcgtggcacgccgcgcggcntancacacagtatattgatgatcaggtactgcatgtgatgtcgtgcgcgcgtagtgttcacatatcactacntgacatatcgtctagtgtctcacancactacgtagagtgatgagataactgtggttgttgatatagtgagagattacagagtagatttgttatgattatatagagagttgtaatgtagagtctcttgtctacgtgtcgtcatatatgtctgtatatttagattgagagatgagtacagtgatcggtgacatgatgcgtattagtgccaatgtttctttattacatcagttgagagtatagacatatatattactaatacgtctatcaggatagtaaacatatagaatactagagacgtaatcgccatgccggcgcaccatgcgagttcatatgagtggtgcgaggctggagtgtatatggagatgagaggtacagaattatatcagcgattgtgtatgtttactgtgactttgcatatgtagtgtgtttngatagatactntttgtnttatctatatgtgatggtgttatcggcagtttctgcgagattcatgatatagcgtgagcgggagatgatacgtcgtaccttagtgctagtgtgattggattgtaatgtggagagttgggtcatagatgtatatactacagtacgatgcgtgtgcacgcgcggangcgagacagtgagcgatgtggtcttatctaggaggtagatagacgacgacattacgtatacgngagtgaggggagtgcgggcgacggaagnaggaggcctgcagaatgaagngagagactaggagacggatcagagnagtgtgtgtgatnatncggagatatgagtgagttctgatgagccgattgagtgtagagagagagtgagnaantactttggtttagatgtgtaggattcgagacagtctttatntnttaggtccgtnttctttaggtgagactaggtanacagatgtatctatcatgtgatgtagttatatatagaagtaatgatgtagtgagtgagtagatgatgagctgactctcgctgtcacgtatccttcctcttctactnctccctcngcctgtgngagaataactctatataaagttatagatgagagatggcggcgacgcacacatcctcagagggtgtggtgtgtgttangtgtagcctgtgcgggaggcggngnggggcgcggggggggggnnataatacacatnttacacacatacctatttcatccacattctatatatctatgtgggtggaagcactgactagctaaagtaacacacaaaaanaacaaannnaaaaggggaaaannnaaaa

SEQ ID NO: 3114 - DNA, 1486 bp, Glycine max
  misc_feature (1)..(1): n is a, c, g, or t
  misc_feature (79)..(79): n is a, c, g, or t
  misc_feature (87)..(87): n is a, c, g, or t
  misc_feature (89)..(89): n is a, c, g, or t
  misc_feature (161)..(161): n is a, c, g, or t
  misc_feature (205)..(205): n is a, c, g, or t
  misc_feature (221)..(221): n is a, c, g, or t
  misc_feature (277)..(277): n is a, c, g, or t
  misc_feature (536)..(536): n is a, c, g, or t
  misc_feature (571)..(571): n is a, c, g, or t
  misc_feature (608)..(608): n is a, c, g, or t
  Probeset Number=SeqID_12893
nttatgtacaggcagtcagacgtgctatactcgctatagcgtcatcgccacgcgcgtacatatactcatatgtgtatanagcgtggngnatatacattgctatgcggcgcgtcacacgaatttcgtatacgaatacgatattatactgtcttacgctatgntcgtgacggcagagcaggagtgatgacctaccaaattatcgccntcttttgtatctttcnatgcgcgctgctgtgtcgcgcgtgacgatacatataatataacgcgacgggcgtanttcgtcacagcgagtcgcgagatatatatatacagctctgcatcgatatacgcataaatgatggcgcgcggatgatgtcgcgccggtgtataatatatatgatataacgcatacggacacaggcggcgcttactcgccaccagacgcggagtgggacgatcatacatcgcaatcacatacaggcgaatcagtgcatgcgctcgcggtggagcgagcttactattacatgtgccagtagccgaatatcgctcgcatgctntacaggtattattacgcggtcgataagataggcgngcgcgatatctcggacacggtaaagcgccacatgacnattatactgaacgttatcaatacactcgccgcgtctcacgcgtatcggataattcgtcggcgcgtgcgtgtcgagaaacaatgtcgaaacgccgatatcgcggtcagataactggcacgtccggtaacgggcgcaatcgtgtgcattcactaccgctcactcgacacatcgcctgcaacaaaccggcccgcgcatatagtgcgtcgacgcgacggatataaatcgcttagcatctcctaggcgcgctatacttattcggctatatcggatcccgtgtattaggtgtagggacgtggagtgtagtttgagcaagagaatacgtgttcgttggcgggcgggctaccaatagccggtccggagcacactacggcgccaagaaatggatattcacgtgtcgtcgcgattcggtgtctttactcaagcaacaccttatcagagagaatatttagtaagtgtgtgatagtgcggagaagggagccatgtatggcgtgaaagtttgtgagtgggtaccagctcggcataaatgaggggcagaccgcggatataggagtggttgcggtgaccgagacgacgcttccaccccgcctttatagcgccccgtcccgccgagagtataggataagcaaccggcgcgctatcctgcgttcctccgttagtaagattaatcaaaatcgcgccgcgccttggacgggttgaggtgacattaatacaataaacccgcgtcgcccggcggtgttacgtctgtgctttccgcctgcgttgagcgattaccgtatatatgttcgcgctggcccgcgccgccgtggggatatggggggaggtcgacgctgcggtagatgtttgaccatgattgagattaatacgggcggtgcccacaa

SEQ ID NO: 3115 - DNA, 1514 bp, Glycine max
  misc_feature (88)..(89): n is a, c, g, or t
  misc_feature (193)..(193): n is a, c, g, or t
  misc_feature (226)..(226): n is a, c, g, or t
  misc_feature (230)..(230): n is a, c, g, or t
  misc_feature (257)..(257): n is a, c, g, or t
  misc_feature (318)..(318): n is a, c, g, or t
  misc_feature (445)..(445): n is a, c, g, or t
  misc_feature (567)..(567): n is a, c, g, or t
  misc_feature (869)..(869): n is a, c, g, or t
  Peptide Sequence Number=SeqID_6641
  Probeset Number=SeqID_12894
ttcgtctgtagtaatgtcgcatcatactataaattcgtctcgacgcggtgctctgtgtcgcactcatagattcagatggatgttaganntgtcatgcgctatgagcacgcgtccgaactgagcgctatatgcctagatctctgcgactcatatctgatgtacgttctctttgcctgttcagtacttcgatgcntactggctgcagtactagaatgtcgtctcggtntggngggacgcggatgtatgcgccgatcatncacactgccacgacaacgccgcacgtcgtcgtgatgccactcatctttctaagcactctgntacacttccgaagtgaggtagtatgtatgatagataggcagttagcgacgctcgacacacacttgacgacgcgcgcggcgcctagcgcccgtgtttgtgccgatacgtcatctgtgtatttaatacnactatacaacgtgtgtgccggctgcccgtgcggtcaagtcatatcttgattctgcacctatcacttccaacgcgagactaccgcggtacgctgtcggctgagtatcgaagaacactggcctngagtcacgcatgtcgggacgctttgggacaaaatgcgaacatcagaatgcgctacaaatagtgcgtaatatacgtgtatagggtgaggtctatagataatatacatcgtggcagtgaacggtgcgtgctcatcagtatgcaggtgtgtatatgatgcactctattaacgtatgtgatcaatacaccaatcagggtatatagtgatatacagagatgccgtcaccctcgcgcgcgcagtccgaatggttttcgtaacacgctctcttatgtcaggagacgtccagaataacagagcgtagcgngtccgtcgctatatggtagagtttacctatttaagaatctgcctattctaatggtatttgggtcggattatatattatagcgacacgacgatagagaggaagcacttctgttgggcggcgtgctgggcagacttcgtggtgtggagcgatatagtctattatctagtgtgtgggtcatactttaactaaatacccaccgtggagtgtttaagttgattcatgttacgttctatttatcttgctaactcttcttttgtctgtctgcgttttctcacagagattaatgtgtagcgtattgtttgggttttgtcctgtgtaagatattacaaagacggcagcactgcgctcccatggcgccggcgccagggagccgagtgggagtgtactaccgtcataattactcctgcattagttaaacagaaacgcgtataggcggcgctagttcccctgcatgatgttatgtactgacttcttattttttggactaatgttacatacagctccgtgcagtacatgataagggaaatagagtagctttatgtgcttctcttcttgcctccgaggcgaggggggcggggcacctgatatgtcatgacgtctcattctgtcacttttgccgtaaatagaatagcgccgtctaaaggg

SEQ ID NO: 3116 - DNA, 491 bp, Glycine max
  Probeset Number=SeqID_12895
attgatttaattttagatacaatgatcggggagctccgaaggcaccggtgagtcttcaccactgacgccttggcaaatccaactctgtaaaaatctgtgaatgaaacgaaggatcccagtctcctgaatggcgacaccatttttggcgggagttgcagtagctgcgactgcacttgctggtagatatggtatccaagcttggcaagcattcaaggctaggccacctaggcccaaaatcaagaaattctacgaaggcggtttccagcctaccatgaccaaaagagaagctgctctcattcttggcatcagggagaatgttccggcggagaaagtgaaggaagcacacaggaaagtaatggttgcaaaccatccagatgcaggtggtagccatttcttggcctctaagatcaacgaagctaaagacgtcatgctcggcaaaactaaaggcggcggatcccccttttgatgctccattagaatcatctctgtct

SEQ ID NO: 3117 - DNA, 871 bp, Glycine max
  Peptide Sequence Number=SeqID_6642
  Probeset Number=SeqID_12896
atgtctcctacactcttctcataccagtgctcactctcaggacgccatgccatctcctccaccggtagccgcccctctctactcgttctcatcgtcgggccgacatctagctccctgcgccctccccttcctgccatgactgacgcccctctctccatggtgctcgtccaacctccacttccctgttccagcatctcccttggccgccccaactccttccatggacgccaatagcagcagcccactccttcttttgttctccatggatgaaagcccaagcatctgcgtctcccctaggtttttgcacaatcgcagcagcacctcttaattctcactcgtctgttgctcgatgttatgtgcagcaggccacgcgtcatcatagccgtgtttggaccactccggtgccggcgtcatccattctcggtgagagcccgcgatatttttcaacttgcttcttcaccggacgttgtgccttgctaataatcagtgtatatgtgtggatattgtgaggagaaatctcatgatttggthggagaagacaatgtccaaacacaacgcttgctaagtgttckatgattkgkktgaktycaagaatcttcgtcsttctagtggtttcgagtctgatttagttatggttgtcagcattgcaaccactgctcaggcgaagatgaagctgtggaaggagacttccaggagttccaagactacgrcgagttctaggcgtgggttagcggcaacccccagtcggctgcctgtgaaggccgtgtttatctacgtttcttttccgcactttgatttattgtaaggactatatggacgtctcagacgtatgatgtaatcgactattatttccctttttaatactattttg

SEQ ID NO: 3118 - DNA, 1336 bp, Glycine max
  misc_feature (49)..(49): n is a, c, g, or t
  misc_feature (246)..(246): n is a, c, g, or t
  misc_feature (248)..(248): n is a, c, g, or t
  misc_feature (516)..(516): n is a, c, g, or t
  misc_feature (521)..(521): n is a, c, g, or t
  misc_feature (523)..(525): n is a, c, g, or t
  misc_feature (528)..(528): n is a, c, g, or t
  misc_feature (530)..(530): n is a, c, g, or t
  misc_feature (862)..(862): n is a, c, g, or t
  misc_feature (985)..(985): n is a, c, g, or t
  misc_feature (1182)..(1182): n is a, c, g, or t
  misc_feature (1249)..(1249): n is a, c, g, or t
  misc_feature (1262)..(1262): n is a, c, g, or t
  misc_feature (1265)..(1265): n is a, c, g, or t
  misc_feature (1305)..(1305): n is a, c, g, or t
  misc_feature (1318)..(1318): n is a, c, g, or t
  Probeset Number=SeqID_12897
cttatgtgttataatattaatatgatgacagaatggagtttgagagagnggtatgtatgttgatggtgtatgggtgggtgtgtattgagggaagggagagaattgagaagtgaggaagagggagagagatggtggaggagaagcgagtggagagatgtatatgatgtataagagaagatgaggtgtaataagtgataattatagagatgaggttgaggatgatgtaatatagtataagaattgagnangtatatgtatatatgagtgtattatgttgtttggtaaggagtgtgctttatatgtagtgatgagatagtgtgataggttaggatgtgaggaagacgatagaggtagagaagaacgatatagaagtgtgagagatgaaagaagtatatatatgaagttaggagaggaggtatagaggtgaatatatatataatagaagtgtatttgtatattaagaaatttgagaagagttagtgttattgttattatgtgagtgtgtgagggcagtanagagngnnnagnanagcattgggaggagagatgtatatgttagagggaagggtggtgagtttctatgttgtatatatatatatttgttgagaatgtggtcttgttagttatatttgtttaaatatatatacatatatatatttattttaattgatatatatataaaatagatatagatagatagtagagtatgtaagtgtattaatgtggttgtttatagagtgtttgggtgtatgtgggtggaagatgataataattgtatttagaggagtgaagatagatgtaatattagataatgtattgtatgttggttatatgtggatagatttgtgaagtgaggcggatngggatagggtgagtttatagtgcggatggggtgtgttagcggatgaagactgaagatggttaggatatgtgtatgttcagtagaaaattaagataaataataataaagtaaagatagaatttngtgaaaggatagaaatattataagagagaaaagagagagtagaagatacatgtgatgtagtgatgttgttaatatatctattatatatagatgatgatataatagtagtagaagaataagagatataagaaaaagaagagaagagaagaagagaataagaggagatgtacagtgggtagtcttgggtgtgttttgcnggtggtaattttacagtatagatgttatgtggaggatggtagaggtggtggttggggatagtatggnggcagtgtaccgngancccacaaggaagaattttatttatttaatataaatttttnctttatatttttntaataaatttttttaatt

SEQ ID NO: 3119 - DNA, 631 bp, Glycine max
  misc_feature (601)..(631): n is a, c, g, or t
  Peptide Sequence Number=SeqID_6643
  Probeset Number=SeqID_12898
tcagctacgtaggcccccccccccatttaatcttttattatgaatcacgtggtcattttgaagaattgattgaattattagagaaaggattgggattggaacgtgcacataccggtatctttaccgaattaggtgtattgtatgccaaatacaaaccagaaaacttgatgaagcacattcaaatgtactatcgtcgtagtaacattccaaaattattaaatgcatgtgaaatggctcatttatgggctgaaatgagattcttgtactgtcatcatgatgaatatgataatgcaatcaaattaatgattgaacattcacctgaagcatgggatcatgcaatctttattgataccattactaaagaatctttaatcaatattgaattgtactacaaggccattcaattctacttggatgagcaaccatcacacattactgacttgttaacacacttgacaccaaaattagatcatgaacgtgttgcacgtgaagtgaaaaatcgtgatcgtgacaatctccctctcattaagaagtatttggagaatgttcaagaaaatgatttgactcaagtcaatgaagtgttaaatcaattgtacattgnnnnnnnnnnnnnnnnnnnnnnnnnnnnnnn

SEQ ID NO: 3120 - DNA, 1574 bp, Glycine max
  misc_feature (1)..(1): n is a, c, g, or t
  misc_feature (71)..(71): n is a, c, g, or t
  misc_feature (80)..(80): n is a, c, g, or t
  misc_feature (85)..(85): n is a, c, g, or t
  misc_feature (91)..(91): n is a, c, g, or t
  misc_feature (238)..(238): n is a, c, g, or t
  misc_feature (274)..(274): n is a, c, g, or t
  misc_feature (519)..(519): n is a, c, g, or t
  misc_feature (1155)..(1155): n is a, c, g, or t
  misc_feature (1434)..(1434): n is a, c, g, or t
  misc_feature (1511)..(1512): n is a, c, g, or t
  Peptide Sequence Number=SeqID_6644
  Probeset Number=SeqID_12899
ngcctcaagagtgcgtatatctctgtcgaggatattctctatactatgtaggagactatttgttctgcagnctcttcganggctncagtantatgtatatgatatctcatcagctatctctctccctctatccgctccgcctctagtagtctccgcactcactttgctcatgtgcggtacatgtagcctcctatgattaagtcaggtatgtacattctactatatacaacttgtctcngctaatataagaatgtctactcttcgtcataaccangacaaatagagacgttgcacgctcctatttctctcgatctcactacttcagtcgtagctagcatacacatagctgcccggcgcgaatttgttctatcaagcgctagtcggagacactcctctgccgttatacagatgtgatgatatctttaaatatcatcgcgtcgagtgaaacgtcttagtaatcagctccatatctagatacaaggaattacgtgcattcatagggtcctacgcatatgagcncgcgtcgttaccatttaagctataggttttggatttttacatcttttatatcacatgttcgtgtcgtatacgactctcgccaaatcactcgtcactacgtattcacattatcatacggtctttgctagatacacagttgggattgagtattctactcacattccactcatatgaacacctgcactcttagtgcatatcgctctctgcctgacttaagccctgcgactccgcttatatacaatatatgccaggtctgattccatatttacaccttgcacattatactctgatcatcctatcggtgcactcgctagtcctcatgatacctatgacttctatccatttcggaattcatctacagacatcactagcgcaaataagtagacatatataagggaagacctcgatcccgtctgcagtattgctcctaataggctttgtatccatcagcgttttttttttatgcaatgataacatagtctactgttattctttactgggcttcgggcctacgacttataggcgccgctatacatctccccactgttttacccgagaacgcgacggacgtcgtcgctatgcgtcgatcatccatatttatctgcaacgccgagagccgcatacactctctacctntctctcgcatacccggataagcgttattcgtacgcgtcttccaactgagggctattaatcttcaatctcgtgaatatctgcataatttaaatacttccagcaccgctatagtatcactagtatttcttatcttttctttatcatcgttatatcacattaaatcttagagtagggggaaacacaaataacacctctgagcctctctctactcgccacaaatacattatatattacgcatatgctctctcttttctttgggccaatacaaaacacaagaanaaaaaagaggcttatttcttatagaaatgcgcacctccgtagggggggtgaccccgtctccctcactatcgtcgcanncataggtatttgttagttattataaaaatcaacacctctcattcgaagaactctgtcaccga

SEQ ID NO: 3121 - DNA, 577 bp, Glycine max
  misc_feature (49)..(49): n is a, c, g, or t
  misc_feature (434)..(434): n is a, c, g, or t
  misc_feature (559)..(559): n is a, c, g, or t
  Peptide Sequence Number=SeqID_6645
  Probeset Number=SeqID_12900
atttaatcctatcctatcgtagcaaagaaagaaagaaagaaaaccctancttaccttttcaactttcaagatgcaaatctttgttaagacactcactggtaagacaatcacccttgaggtggagagttcaaataccatagataatgtaaagtccaagattcaagacaaggaaagaatcccaccagaccagcaacgtctcatttttgctggcaagcagctggatgatggacgtacacttgctgattacaacattcaaaaggagtccactctacacttggtgctccatctccatggtggaatgcaaatctttgttaagaccttgaccggaaagacaatcacccttaaagtcgagagctctaacaccattgacaatgttaatgctaagatgcaagacaaagaagatatgccaccagaccaacaaaagcttatctgtncataaaatcaggtaaaagatgacataaccgtagctaatgacaatatgcagaaagaatctaccctgcacttagtactgcgtcttggtaatataattcaaatctgtagcaataccttaactataaanacaattacccttgaattg

SEQ ID NO: 3122 - DNA, 745 bp, Glycine max
  misc_feature (1)..(1): n is a, c, g, or t
  Peptide Sequence Number=SeqID_6646
  Probeset Number=SeqID_12901
nctaagaggttaaatgaagcagacacctatcaagtgcctacaaatatctccactcatatattatccaccctctcaattaacacacttccacgccccgagaaccacacctgtgcagagccaaatggagcacgtttatattctagagtgagcaccataagttttgagaaccctctcactgtcatattagaagcctatttttctcacatcaaaggggtgtatctcacggggttatcaaaatttcctcctctgaaatatgactctaaagcagagtatttgcctctagagcttcagataccaaagaaaggggccacgggggctgttattaaatatggttcaccacaggatcttgtttttcaaggggcaaatttggttattgggatagaccatcttatgcatatgcacggcactagattctttgctgtgggatatggggttgggaattttgatatacacaaggggcgcaagacatacaatctcattgatcctctccttatgaatacaatattagtgtccacgaatggttggggcaccataaggtataggggttttaacccagagcgccacctctcttggggcacggagactgtgtttattgtgacgaatggggaaggagatattgaaatattccctcttcctccagatataccccagtgttgaagaatatttcatagtaaagaaaataccacacggcacggttgtgttaaatcagactctgagaattgtatttgaggagataatatatagc

SEQ ID NO: 3123 - DNA, 1910 bp, Glycine max
  misc_feature (30)..(30): n is a, c, g, or t
  misc_feature (62)..(62): n is a, c, g, or t
  misc_feature (221)..(221): n is a, c, g, or t
  misc_feature (407)..(407): n is a, c, g, or t
  misc_feature (476)..(476): n is a, c, g, or t
  misc_feature (976)..(976): n is a, c, g, or t
  misc_feature (1003)..(1003): n is a, c, g, or t
  misc_feature (1037)..(1037): n is a, c, g, or t
  misc_feature (1049)..(1049): n is a, c, g, or t
  misc_feature (1064)..(1064): n is a, c, g, or t
  misc_feature (1153)..(1154): n is a, c, g, or t
  misc_feature (1164)..(1164): n is a, c, g, or t
  misc_feature (1167)..(1167): n is a, c, g, or t
  misc_feature (1170)..(1171): n is a, c, g, or t
  misc_feature (1173)..(1173): n is a, c, g, or t
  misc_feature (1175)..(1176): n is a, c, g, or t
  misc_feature (1240)..(1240): n is a, c, g, or t
  misc_feature (1245)..(1245): n is a, c, g, or t
  misc_feature (1251)..(1251): n is a, c, g, or t
  misc_feature (1254)..(1254): n is a, c, g, or t
  misc_feature (1270)..(1270): n is a, c, g, or t
  misc_feature (1278)..(1278): n is a, c, g, or t
  misc_feature (1444)..(1444): n is a, c, g, or t
  misc_feature (1462)..(1462): n is a, c, g, or t
  misc_feature (1479)..(1479): n is a, c, g, or t
  misc_feature (1490)..(1490): n is a, c, g, or t
  misc_feature (1509)..(1509): n is a, c, g, or t
  misc_feature (1670)..(1670): n is a, c, g, or t
  misc_feature (1823)..(1823): n is a, c, g, or t
  misc_feature (1835)..(1835): n is a, c, g, or t
  misc_feature (1858)..(1858): n is a, c, g, or t
  misc_feature (1871)..(1871): n is a, c, g, or t
  misc_feature (1873)..(1873): n is a, c, g, or t
  Peptide Sequence Number=SeqID_6647
  Probeset Number=SeqID_12902
acttcctccacctactcctcacgggtgcgncgttctttcctgctcacgtccttcccattganagataggcgagatgtgggcgtgatcgtggggctccccggcgctcgatggtctagtctagaggagaaggcgccaccccgcgcccccctccctctcggtggcggactccagcgcggctggacagacgtccctgctgttatattgacgggaacctctacagnaggcagaaagcttcgtctctggtcggctgcttgcgcagcgcgctcacaaaacaagacctctccaccgagaactcagaggatatggaaatgcccttcatctcgctcgcctctcctcatccatactgatctaaactctcgccctgattggttagtgctagtgccactaatgtactccatgccctcgantgttcttctagcacagtaatggagcttgctagtagattaactatattaagcatcccgctactcttgacncgtaccctcatctgtcgtcgcggcttacaaagatctctctggtgtcgctggacgcaagctagaacgttacctctcactcttactctatatctgtaatagactcggcgctagatttggataacgagagtataatctacgagttctcttaacaaccacagggcacaaggttgggcaacatcaagagtgaaattgagtgctgccggacaaacacattgttggctctccccagccagctgggttatgttgacttaataactcctcttcagctagaatgttctaacacaagaatgataacacggtctaggcaggccgcctaccagaccgtgtgtcctatcataacaaatgtaacggcgcctagatgtgtctctgtcgtctgtcagcactaatctacatgccaggtatcgttgtaacgtctctctaaagtcagttgctcagacggctgtactgacgagggtcacagtagtactttgtagatggctagagagcggcgtcatccgtanacctgcacgaatgcaacaactcacatnagagtgataccacacctcaagtgacactctgacntgcacgttgatntgggcgaagaaatanacaatactgtgctcacaatacgacaaacggcggcgtgtatctacttatctgcttgacatatacgtagtgagagaagacgcgagaggaannaccagaatcnttnccnncntnncgatccctcctgtctgctgtcgactgtcggagagctctgtaatgttcttctccactatgtatantcatnattccnttnccaccggtacgcaggngctcacanttagtcgtagacggcagcaatatagaactggtacgtgctgatgaatctgtattcacgcgacggctatgtatagaagcaccgacttattccacacgctctgtgtatagacacaatagattatgtaatagtgtctgtgtgacgcatatactcgttctactactgtaancgctacaggctaagttgngttgatgccatacgtcncgagctgcacnaccacgtaacgatcgcgcnctctaaatcacataaggcggctagatatgctccatctgtagatatatgttcgttgacgtgtgacggcacgtgcgaatgagagtcagcagtggtcaaatctgctatgatactatctgacgcacacaaatgatactcctctcgtctcataggcagatagatancgctctacgctctcgaccgagtagtagagaataaccacgaaactatcaatatctgcgtcgctcacagagctatgcgagagcgactaatcataccacgctcgtcgcatcacgtgacagctatacgtatctctgctaccgcatacatctgatctnctcagcgaccangatatccgagagaggagtcgtcnatcttacgtgagntncacaaacaacaacgatgtcaggagtagctgctcagcg

SEQ ID NO: 3124 - DNA, 543 bp, Glycine max
  misc_feature (536)..(536): n is a, c, g, or t
  misc_feature (540)..(540): n is a, c, g, or t
  Probeset Number=SeqID_12903
ctctctcttcttcctcacttcgctttcttctccgtcactgagcgacgacctgcctctcgagctgccaaatctaagagcttgagctttaggaggaaaaggaaaaatggtgagaatcagtgtactcaacgatgcgctcaagagcatgtacaatgcggagaaacgaggcaagaggcaggtcatgatcaggccttcttccaaagtcatcatcaagtttcttatcgtcatgcagaagcacggttacatcggtgagtttgagtatgtggatgaccatcgatccggcaaaatcgttgtggagttaaacggaaggttgaacaagtgtggcgtcatcagcccacgttttgatgttggtgtcaaggagattgaaggttggactgctcgtttgcttccttcccgacaggttggtcgctccgctcggcctacctccgcgggtattatggaccatgaagaagccaggaggaagaatgtcgggggcaaggtcctcggcttcttctattgatatgttttattctgaatcaattactctttgtttttttttnctcnctt

SEQ ID NO: 3125 - DNA, 576 bp, Glycine max
  misc_feature (136)..(137): n is a, c, g, or t
  Peptide Sequence Number=SeqID_6648
  Probeset Number=SeqID_12904
cccacgcgtccgacgtgagtaaaaaatggaccattagattattttaatttcaaaaatcaacgatttagatatttttttaattttcatttttctttttaactttttgtatttttttcccaaaattaaccctccctcnntgatgctatctgtcctctgcctcttcccaaccctaacaatcaaaccgtgccgccaccgcacctctgtcaaacctgcgccacaaggtggcggcgctgtcgcgcatcactgcgatggtccacctttgccgttaatgggaatactagacgaagaacaagagagggaaggagaacaatctacggtgatgcgttcgcgtttggtggctttggtgggtgtgatagattggttctatgatgcattgcgcgattggtctttgtttcaggcattggaagggaaggtggttttcaggtgtggctcacagcggcgatgaagatgaggttccagtgatgattgaagttgcccggtggttcgtcgttatcctggcgttttcctttggcgaaggatttaacaggggctcacgtttggtttgattttaaaaaaaataaaaattgatttcgatat

SEQ ID NO: 3126 - DNA, 1020 bp, Glycine max
  misc_feature (1020)..(1020): n is a, c, g, or t
  Probeset Number=SeqID_12905
aaaaaccccctttgcccgtggaaaccctaatttcgcataaggatggcgaaatcgatgagatgcaagagggtgaagagattgagagctataagaagagaaattgttcagaaggaatcattcactctcactagagaagatgccaaatccgccgccattgaagccgcactcgccgcgcctaaattacctgttcgtctaccaccaccttccccgttcatggaagtcgcgacgcccacctccgagtcagcctctgtctccgccaacgttatgggtataagtttcgatttctacaaataaattagatttgtatagtttgttttgtgttggttatgctcttagattatgtaatgcttgaagaagcaacgtttctgcttaattttaatatctgaaattctatcagaatcactttaagttacttgtttgatatctttgacgcatttagattcactattctttgatatcatatctaatgctttgtctattgtgaattgagaagatttttctgacctaatgtgccaaaagtttgttccttgtctcattgttttgaattttgtcgcattttcatcaaacaagtatactggtttcgtgcacgcttattctttgtttgggtgggggtgggtcttttcgaaacaatcattttgacttgatacttgctacctcttattaagtgtcggttaatttcggatatgttctgttttgaatattattgttgtttgcagatgtggaaatggatgatgagaagcataacaagtctcttaaacctatcgggaggaagttaaagaagaagtttaagttggggatgaagaatcgtcgcagtaagggtttccttcgaggcaagcgtgtctaagttcccaagtttggtgtttactccttgttctgtttaacctctttcatatctagattccctaattgtcttagaaagtgtcttacgtcgtactgttattttttggggagcttcagtattatagagaacctgaaaaaaaaaaatgtgattttgaacctaagaagtctgtttacgcctcn

SEQ ID NO: 3127 - DNA, 1625 bp, Glycine max
  misc_feature (16)..(16): n is a, c, g, or t
  misc_feature (22)..(24): n is a, c, g, or t
  misc_feature (38)..(38): n is a, c, g, or t
  misc_feature (126)..(126): n is a, c, g, or t
  misc_feature (132)..(132): n is a, c, g, or t
  misc_feature (147)..(147): n is a, c, g, or t
  misc_feature (157)..(157): n is a, c, g, or t
  misc_feature (161)..(161): n is a, c, g, or t
  misc_feature (174)..(174): n is a, c, g, or t
  misc_feature (348)..(348): n is a, c, g, or t
  misc_feature (416)..(416): n is a, c, g, or t
  misc_feature (564)..(564): n is a, c, g, or t
  misc_feature (575)..(575): n is a, c, g, or t
  misc_feature (712)..(712): n is a, c, g, or t
  misc_feature (937)..(937): n is a, c, g, or t
  misc_feature (955)..(955): n is a, c, g, or t
  misc_feature (1043)..(1043): n is a, c, g, or t
  misc_feature (1074)..(1074): n is a, c, g, or t
  misc_feature (1172)..(1172): n is a, c, g, or t
  misc_feature (1222)..(1222): n is a, c, g, or t
  misc_feature (1288)..(1288): n is a, c, g, or t
  misc_feature (1303)..(1303): n is a, c, g, or t
  misc_feature (1315)..(1315): n is a, c, g, or t
  misc_feature (1319)..(1319): n is a, c, g, or t
  misc_feature (1403)..(1403): n is a, c, g, or t
  misc_feature (1456)..(1456): n is a, c, g, or t
  misc_feature (1517)..(1517): n is a, c, g, or t
  misc_feature (1625)..(1625): n is a, c, g, or t
  Peptide Sequence Number=SeqID_6649
  Probeset Number=SeqID_12906
attaattgtagaattngtaatnnnatattataaaactnatacaacagcacacaccactcctcacacacccatcacaccgcacacatatattgttgtatatgtattataaaccacaccccccccggntggatntgtgccccgcggacncccactgaancaancactcacccacanacgcacacactgcatctctactgccacaccactcaacactcgtgtgtcgtcattattccccatatacgccacccaccgccacgccatctctcccggagttcacacacatacctctcacacggaaggtgatagtatatatgtaatgattcattttaatgatagacgaaccaggangatgaagcggcaaacacaatgtctcgatcatcgacacgaatctacacccaatatagacaacagcgcanacaacataaagtatgactatcgcgcgtcatcctataacgatctacttgatcaactacctccgaacaattcgcactctccaccacctgtgaccctagtcactatgaactagaaatccagtaatcgaactctctctctgcgccatgcgtnaagcacacgtnccgtactgtgtgcgaatccgggtgagaccctccacgatagttcttaggcacgacgcgtcttccgcgcacgaccaatacactatacctagcaatctttcgttggatgtgggagggaagcggagtgcaaatagttcgtntcgcgacagtagagacgcacgcaagttgtgcgccgctaataggccgggctagactatctcttcactacgacgagcattcaagatatatctcttatacaacccgtctggtcatatgatgcgctcccgatcacacgcgctttgtgttctttctcgctctccgcactcgctatcagtttattaggtagagatatattgaagtgcgacaacagctgtatgttactgttncaacattgagaagataantacggctctcttatacgacgactctcttagcacacttctttaggtagttctctattatagcagatctcttgtgagccatccagacatncttacgagttcgccgagacgaccgatcatancttaacacacacatcaatctccctctctatacgtcaggtcacatcacacctgcgctactatcatgatagtaagcgccccccacgcgcacgcgctaganacactatctcacgctgatctgacttatcctacgacacaaccttacaatancactacatacgcgcactaataaggcgaagtcgacactgtgagacacaacgcgtactacagacagancagtacgcacgctcnagataccgtttnctcntctgctatatccacacgcgactcgacatctatctcagcactatctcgcgctcttctcgcgacgcgcacatatcacctcatcttnctaggtgcactcctaccgacacaccacattcattctcacacgacgcccccatncctacactctcacctactctcttctgtagcgctctaagtcacacacgcactgataagacantaatctctgactacactcgacacgagatactgtacatatgcagacgatctgtcgtacgcgcacgcaccttacacgtacatgcgctaccattcatgatcttctcgtctn

SEQ ID NO: 3128 - DNA, 2064 bp, Glycine max
  misc_feature (186)..(186): n is a, c, g, or t
  misc_feature (365)..(365): n is a, c, g, or t
  misc_feature (569)..(569): n is a, c, g, or t
  misc_feature (769)..(769): n is a, c, g, or t
  misc_feature (997)..(997): n is a, c, g, or t
  misc_feature (1051)..(1051): n is a, c, g, or t
  misc_feature (1247)..(1247): n is a, c, g, or t
  misc_feature (1288)..(1288): n is a, c, g, or t
  misc_feature (1383)..(1383): n is a, c, g, or t
  misc_feature (1416)..(1416): n is a, c, g, or t
  misc_feature (1431)..(1431): n is a, c, g, or t
  misc_feature (1601)..(1601): n is a, c, g, or t
  misc_feature (1634)..(1634): n is a, c, g, or t
  misc_feature (1706)..(1706): n is a, c, g, or t
  misc_feature (1757)..(1757): n is a, c, g, or t
  misc_feature (1782)..(1782): n is a, c, g, or t
  misc_feature (1789)..(1789): n is a, c, g, or t
  misc_feature (1805)..(1805): n is a, c, g, or t
  misc_feature (1809)..(1809): n is a, c, g, or t
  misc_feature (1819)..(1819): n is a, c, g, or t
  misc_feature (1840)..(1840): n is a, c, g, or t
  misc_feature (1868)..(1868): n is a, c, g, or t
  misc_feature (1871)..(1871): n is a, c, g, or t
  misc_feature (1892)..(1892): n is a, c, g, or t
  misc_feature (1914)..(1914): n is a, c, g, or t
  misc_feature (1968)..(1968): n is a, c, g, or t
  misc_feature (1971)..(1971): n is a, c, g, or t
  misc_feature (1975)..(1975): n is a, c, g, or t
  misc_feature (1981)..(1981): n is a, c, g, or t
  misc_feature (2018)..(2018): n is a, c, g, or t
  misc_feature (2051)..(2051): n is a, c, g, or t
  Probeset Number=SeqID_12907
gtctgtgtgtcctcctgctaaccttttgcgccctcgctcagtccgtcgccgcgtgtaggagagagaaacgagattagtggagaaggtatagggaggaccactccctcctcgagatacaagagtagaggaaccaggagtaaagcgataacatacaccacacactctaatactcaacacacgagcccncaaccacgcttgtaatgtagttcgtctgcatattctcatcgtacggcagcttctatcgcatatagaaccagctcctgcagagtgtgtacatgtggcgtgtctcgtctaagttgtaaggtgtgctagccctgcaggtagcgagacggagcggctgaggacgtaatgctacatgcctcgcnatctgctctacaacagcgaatcatctgctacgtacatctactgagcctctccctgccacctcgcttccttcactcacttcgctatctagctcgtagctttatatatatcgatacaatagagtatagtagtatatacagatactaccagcgcaccccgcagcagatatagatactgcgcctcttacacgcgccgcgctgtcattntcattaaaatactacgcgtcacgcccgacgccatcgccagcaaaaccaacccgcttactacctcttccacacatcgattcttgtgctatcacgcatcacaccccagactcgcaacacacactagcagtactatgacacacgcagcgagacaatcacagccgcgacaatcacaagtctcacactgtatctctatacatacntcctgtcgcgataacagacatgtctaccgacgtactcctagagcgtcgtgtactatcgtatctgagcagcgctgacatactcgacagtctcatatgcgccgtcatcatctctacatacgacattactcctctcgcgtcgacggcacacctgcatagcctgatgacgacaggtagacacgaacatggtgccgcgcactcgtcgcatgaccctatgacaagcagaccgcncacgttgtgccttgtcaaagtctcctctccactgtcatgtccgaagctactacntaacgtgcacactacacctacacggacctacaatatctcgactgtgtgatgcgcatctcaccacagatgttactattactatccttgcactgcactctcatctgtagctttatatatagctcacatacgtcgcgtcgcgtctacgcgatcgtgaactgtgtaacgcatcgtatagatgtctatgctgcgtacgtancgccgccactcagcgcgcactcttacttatatggtctgtantactctacaccacatacttagctatgatattgtcacctattgtagccacatcacgcgcacagcctatactatagtatatcatattcacgtgatgnatcacacgatgcttctgaatccaatctatacangatacatggcagtanatatcacagacgtcgcgctacgctgtctgcgccctgactctcacatacgctcatccacttacactctcgcactatctgactgccgcgctccccagatgagggcatgtgatcgactgctcacgctcgctgcagctcataactataacgccagtcagcgctcgcagtcagtncagtatgcacatatcgcacgcctatcacgactntcatcgagcacaccatgacgtgttgatcggcgtgccgtatcacgatgctactctatctacatatacgtcaanagtccacatacatactatagcatactacatatatgcactcaaacgaccaancgagctatgaagcagagcgctacangtcgccncgcgatctctgctcancaantcgcattacncatgcgccattacatacacgnccatgcgtgtgtgttccgtatatgccgngancagtgactggtgacagctctncctactaccgttcacatatganctctgatctgcgagcgtgcgcgcgatgcagctatgatagctaatgactctactngcngccntggctngtactattgtctaccttgtctacgacatgcacgcgtnctccatcgtatactactgatcgacgtacgactncctacgtacaatg

SEQ ID NO: 3129 - DNA, 435 bp, Glycine max
  Peptide Sequence Number=SeqID_6650
  Probeset Number=SeqID_12908
ggggacaaatgataattgaatttggctgtttatgcgtgttgctgttcacccctccggtacgccgggtcatagcattcctagctgcctgtgttaggtacgtgcccttaacgggataatgcctttctctgtcgtaggtagcattcaaaatcctggatcaatcagcaatgttgcagcctggaaacgtaagcctatatttaaatccatcagctcactcaatgatccatcgaagataggtgctgcaaggtatacaggcagattgtctccagcaccatgctacatccaattctcgaaactagtgccctgcatgttatcctggtagctacatgtaagttcaccctcgtttcagaactttggatcaccttttattattccttttttgcgctctacgcctgccctataggtctctacgttctgataatgcgtttcatttcattg

SEQ ID NO: 3130 - DNA, 432 bp, Glycine max
  misc_feature (326)..(326): n is a, c, g, or t
  misc_feature (354)..(355): n is a, c, g, or t
  Probeset Number=SeqID_12909
aaaaaatttcctgctaaagttggcctccctggctgaccaaatttatactcccgaaaacaaaggggtttcatgcttccttggaagctctccaggcctcattggatccagtatacgatgtgccaattgcaaccaagaaccagtgtccttcctttctggacaatgtttttggtgttgacccttcaaaagtgcccctgcatgtgcggcgtattccggtgaagaaaattccagcttctgaaaccaaagctgcttcttggttaatctacccattccagatcaaggcccaattgctttcggatttcaagattcaaggccatttccggggccgnctaaatcaaacccccctttctccctttnngggcctcctctcttttataaaaaaaaattcttttcccccccccaaaaattattttacatttttttcaaaaatttggt

SEQ ID NO: 3131 - DNA, 1943 bp, Glycine max
  misc_feature (103)..(103): n is a, c, g, or t
  misc_feature (114)..(114): n is a, c, g, or t
  misc_feature (123)..(123): n is a, c, g, or t
  misc_feature (155)..(155): n is a, c, g, or t
  misc_feature (169)..(169): n is a, c, g, or t
  misc_feature (193)..(193): n is a, c, g, or t
  misc_feature (278)..(278): n is a, c, g, or t
  misc_feature (295)..(295): n is a, c, g, or t
  misc_feature (347)..(347): n is a, c, g, or t
  misc_feature (349)..(349): n is a, c, g, or t
  misc_feature (370)..(370): n is a, c, g, or t
  misc_feature (415)..(415): n is a, c, g, or t
  misc_feature (417)..(417): n is a, c, g, or t
  misc_feature (428)..(428): n is a, c, g, or t
  misc_feature (435)..(435): n is a, c, g, or t
  misc_feature (437)..(437): n is a, c, g, or t
  misc_feature (440)..(440): n is a, c, g, or t
  misc_feature (445)..(445): n is a, c, g, or t
  misc_feature (453)..(453): n is a, c, g, or t
  misc_feature (502)..(502): n is a, c, g, or t
  misc_feature (545)..(545): n is a, c, g, or t
  misc_feature (573)..(573): n is a, c, g, or t
  misc_feature (578)..(578): n is a, c, g, or t
  misc_feature (584)..(584): n is a, c, g, or t
  misc_feature (657)..(657): n is a, c, g, or t
  misc_feature (676)..(676): n is a, c, g, or t
  misc_feature (689)..(689): n is a, c, g, or t
  misc_feature (702)..(702): n is a, c, g, or t
  misc_feature (713)..(713): n is a, c, g, or t
  misc_feature (862)..(862): n is a, c, g, or t
  misc_feature (874)..(874): n is a, c, g, or t
  misc_feature (947)..(947): n is a, c, g, or t
  misc_feature (1219)..(1219): n is a, c, g, or t
  misc_feature (1287)..(1287): n is a, c, g, or t
  misc_feature (1437)..(1437): n is a, c, g, or t
  misc_feature (1463)..(1463): n is a, c, g, or t
  misc_feature (1472)..(1472): n is a, c, g, or t
  misc_feature (1529)..(1529): n is a, c, g, or t
  misc_feature (1614)..(1614): n is a, c, g, or t
  misc_feature (1638)..(1638): n is a, c, g, or t
  misc_feature (1683)..(1684): n is a, c, g, or t
  misc_feature (1697)..(1697): n is a, c, g, or t
  misc_feature (1740)..(1740): n is a, c, g, or t
  misc_feature (1770)..(1770): n is a, c, g, or t
  misc_feature (1792)..(1792): n is a, c, g, or t
  misc_feature (1800)..(1800): n is a, c, g, or t
  misc_feature (1829)..(1829): n is a, c, g, or t
  misc_feature (1835)..(1835): n is a, c, g, or t
  misc_feature (1856)..(1856): n is a, c, g, or t
  misc_feature (1862)..(1862): n is a, c, g, or t
  misc_feature (1896)..(1896): n is a, c, g, or t
  misc_feature (1899)..(1899): n is a, c, g, or t
  misc_feature (1901)..(1901): n is a, c, g, or t
  misc_feature (1904)..(1904): n is a, c, g, or t
  misc_feature (1909)..(1910): n is a, c, g, or t
  misc_feature (1913)..(1913): n is a, c, g, or t
  misc_feature (1917)..(1917): n is a, c, g, or t
  misc_feature (1919)..(1920): n is a, c, g, or t
  misc_feature (1922)..(1923): n is a, c, g, or t
  misc_feature (1927)..(1927): n is a, c, g, or t
  misc_feature (1929)..(1929): n is a, c, g, or t
  Peptide Sequence Number=SeqID_6651
  Probeset Number=SeqID_12910
ctgatcggagctgtgtgtcattcgcgagttagttagcatatatcgtcgtctcggtacgtgatgtctcgtacctgcgtcattcatgtatcgctatgtgctacantatgctagagnagacgcggnatgtggctgactgcatatcatcatcagacganctgatgatgacgtncatgtgattatatatgcagtactnagacagcacattatgtagctgcatactgcgtattcacactgacatcgtttgctctcacatcgaatgatcatcatatgcactttantataactgtatgtactntatatgtatgttatgctaatacttcatactactacaatactagcgagtcgcntnagtctgagctgaatgttgatncgtatgatatattactattcacgtatacatgtagtatcgtctcancncgcgcgagctntctgctntngantacancgagtgtngtagatatatctctaatatatatatatatagtttgacgatcagactcgngggaggtcgtatgtataggcgatcgtgcgattcgatgtcgcgntcatagcgtgactgagatagtctgcgantctcngcactnatatgtcatcactcatatcacacttatgtacaatacatcagttcataccatcgacacgaatgtgtcgagcganagtatgaggatgatagtgncagtagtctgtgngatcgcatcatanttaacacgagntaacacatatcatcttacgttatgaggtaatatggcgagtacgccgtgtatggagattgtcttacctggcacgtgttcacgttgatataagtggtgtgtatctcatatataacatgagcgcatcttctcgacatagatcacgatcagantgcatatcacanatatgactactatctccaagcttatatatatggtatagacatcatatcgcaattcgtcgacatcactcacagntattcaaacatcaatctatttagctagtctattcgtatcatgttctgactctatcattgcccatcgttgctcgagtcttcgtcgaactagagacgactctcgtatgttcgagttatgtactcgggtttgagtatgtgtatgctatttgattgatcgattatactcgtgcgtcgtagatcaacatagagaatcattgtattgcgtctgagacgccaatctctatgagtgatgacgctgtatgtcatgtgatgagagcatatgcaatatagatnggactactcaacacgagcggtagtcttgatcgacacattctaattacctgtgttcgagtagtatccantcatgctgttctgatcttgtactgctatattgtcgttgctgttgttcgtagcgcgcacagttattctacctccgtgcttttcgtctctcttcttgtctctctctactccatccgcgggccacgtgcgcggctctcataagcattcatcancacactctgaatgcaacgatcatacnttcacatancagtaatatctgagatcgtatacttaaataactcccactctatcttcgatctcgtcntccgttctctcagctcacaatatcacaaataactactctgcatgctcaatgtctcatacacactacctcatctcgcacatcgctncaccaatccagataatctagacanacacagcttatcgcaacagatatgatagatcattcacacaacacnnacaccccccagcnccacgcgtagcactctcaagacgtcatgctatgcatcattagntagcatcgccagactaccgactgctgcagnccactccctccacatctcacgncagagtancgcatttcgtatgctcgcttttataatcnacaatnatagattgttcttctcgtatnattaantattctcatatctactcagtagtactattggtanaananaanaaaannaanaatnannanntaananaacaacataaaaaa

SEQ ID NO: 3132 - DNA, 1902 bp, Glycine max
  misc_feature (4)..(4): n is a, c, g, or t
  misc_feature (31)..(31): n is a, c, g, or t
  misc_feature (154)..(154): n is a, c, g, or t
  misc_feature (229)..(229): n is a, c, g, or t
  misc_feature (241)..(241): n is a, c, g, or t
  misc_feature (413)..(413): n is a, c, g, or t
  misc_feature (423)..(423): n is a, c, g, or t
  misc_feature (428)..(428): n is a, c, g, or t
  misc_feature (520)..(520): n is a, c, g, or t
  misc_feature (605)..(605): n is a, c, g, or t
  misc_feature (650)..(650): n is a, c, g, or t
  misc_feature (994)..(994): n is a, c, g, or t
  misc_feature (1435)..(1435): n is a, c, g, or t
  misc_feature (1772)..(1772): n is a, c, g, or t
  misc_feature (1791)..(1791): n is a, c, g, or t
  misc_feature (1840)..(1840): n is a, c, g, or t
  misc_feature (1858)..(1858): n is a, c, g, or t
  misc_feature (1867)..(1867): n is a, c, g, or t
  Probeset Number=SeqID_12911
gttnattattcatgatgagagtaatacgagngatgtaataagatgcgtatcgcgatgtatgtagatagaattaatattagtcataaacgtataaataatacatagcacaacatgtatagtgattatactagaatcgaatctaatgtagaaagantgatatatagtattactttattagtgatacatcataagaatgtgcatagtgtgcatctttaaaatatatgtacgngcgtattgatgntgatatgagtgtataagtttgataaataaaactttaaatagatagaaatattacaacacatcacgatataatactacatataattatgataaatattatattgaaataatctgatagtagtgttacgtgtatggagctttgctgcgcgctttcgtatcgaggaatcacggcngtagtcctgncgagngcaactacatcgtatatatgattacatataataaaagacaataacatcacatataagtgctgtatcgatccagaagtctgtcgtttgaatanttataaaagatatatataatagatatctttagtcttacttatagcgacagagatacatattactacttaatacagtataataatntaatatgtgtaatttggtattatagttacgtattttatataacantatattatactcatatcatacagatgcatgatataactactgagtcgagaacataaaagatataattatgatatacagataatactatataaatatatatatatatatgtcaaagacagaattattattattatagtcaagcgagcatattgattatctactatataagtatgagtataggagtttggctatttatcttcattttaattatatatttgttaaatgaggatattatcgtaatgtttatagaatgttaatgtaatagtatatattcaatatattcatatataagaagattaggagcataggatatgcatgagtataggttggcttagttgatgtgnagagagaggttgataatcattgttatatataataagagaacaatgtaatgatgatataattatatatagatgagtgtaattaaagtaagatgtaatgagtatagttgaagcgtagtaatattattaatctatattatatatagtatacgcaatatgagtaagagttgcgggacaagagctagatgagagtagagaagtaagacaggagagaaaaaaaaccaagacgataagagagaaatgggttatacggtgtttttagttagcatagtatataagtaaataataagaaaggaaaagaaggaagagagattattaatagagagcatatggaatgatttagtatatccgcacacctacctttatttctatttttcttctactaatatgtcttcattagttatattattcatctataaatgtattcttcttacatttcgatcnttacatgtcgctaacgtatttatacatttatattatttcttatctttatcttattcttatcactagtatgactcctcttctaataccattatatatttatatgattcatattcatcctacatattaataaattattgttatctacaatatactttcgacatcacatttctatctaagatagttaattgcatttattataatctcttctcccacatcccatgcatatatttttgtttagtcgtatgatctgttcatctccgttaccaccattctatccttttttattctcttatttatctgtatatcatatttatttattcattaattgtcctttccncccacccatcctagcgagngagagacaataccacaatattattataacccccccaccacccactcttncatcattccttatctccngccaacacntttctttttccctcttctctttctttttttttttt

SEQ ID NO: 3133 - DNA, 224 bp, Glycine max
  Peptide Sequence Number=SeqID_6652
  Probeset Number=SeqID_12912
tctagtgtgcatgccttattagaagagagtaccaggcttatcagctgagtggagaattctagggatgaagatggccatagtaaaaaagcaatggagagcttaggttttgcattacatgtagtatatgcagaagttacagaagccaaagagaatctgcagcgcatcccccctggaagtgaaagatatcatgcccagagttaagacgtaaagttagtcgtgaaaga

SEQ ID NO: 3134 - DNA, 550 bp, Glycine max
  Peptide Sequence Number=SeqID_6653
  Probeset Number=SeqID_12913
ccatattttcctaccgaggcaactccatgacgatgactcggtgagttgcactgctaccgacccaaaccttaactacaagccggtgatcggaatcctgacccaccccggtgacggtgcctctggaccgttcagcaacaccaccggagtttcttattttgccgcctcctacaataaattccgggaggcccgtggtgctcgagttattccccttatctaccatgagtcacctgagaaccttaacaagaagctcgatttgtacaatggagtgctcttcactggggggggagctgcttctggtccatatttggaaactcttggaaacatttttaacatagctttatataacaatgatgctggagaccatttcccaccaattgccttcaacttaggagcaaacctcgtaataatgatcgaaagcgagcaaactgctattcctgaaccctttactgcgtcgaggttgcctagctctcttatattgtgaaaagaagcaaatgctaaaggaagcctattacaaagattgccttcggatttggtgacacaactaaagaca

SEQ ID NO: 3135 - DNA, 1653 bp, Glycine max
  misc_feature (5)..(5): n is a, c, g, or t
  misc_feature (16)..(16): n is a, c, g, or t
  misc_feature (106)..(106): n is a, c, g, or t
  misc_feature (120)..(120): n is a, c, g, or t
  misc_feature (160)..(160): n is a, c, g, or t
  misc_feature (174)..(174): n is a, c, g, or t
  misc_feature (224)..(224): n is a, c, g, or t
  misc_feature (268)..(268): n is a, c, g, or t
  misc_feature (352)..(352): n is a, c, g, or t
  misc_feature (413)..(413): n is a, c, g, or t
  misc_feature (474)..(474): n is a, c, g, or t
  misc_feature (1536)..(1536): n is a, c, g, or t
  misc_feature (1539)..(1539): n is a, c, g, or t
  misc_feature (1570)..(1570): n is a, c, g, or t
  misc_feature (1572)..(1572): n is a, c, g, or t
  misc_feature (1585)..(1585): n is a, c, g, or t
  misc_feature (1601)..(1601): n is a, c, g, or t
  misc_feature (1636)..(1637): n is a, c, g, or t
  misc_feature (1644)..(1645): n is a, c, g, or t
  Peptide Sequence Number=SeqID_6654
  Probeset Number=SeqID_12914
cttgngatcatcgtancacgtgcggtatcattcattctatgtgatacatagtgtgacgatattcaagtgcagaacaaactctaccactactactgcaagcatagcngctgcagcgcgcancagtcatcatatagacactagatctgagcgtctgctccgngtctaatggtcccncgcgcgttctacgcacttgctagtcgcgcttctgtgattatctcagttcngatctcgcgatagtaccatgcgctctatcacccatgcgcagtanatcatcatcgcatgcggcgtgtatgtccacacataagagtgcagctgctagtaccttctcgctagatgctcgtcttgtatgcgntgcatagatgtgatccaggatgtacagaacgcgtaccaggcagcagtagtctatggtacgngcgccgatcgatgtagactagctataacatctgtaccaaacacacataatcgtagtacagntacatgcgagatgtcgagaatgaagctatatactggtaattataatacacacgcgagtgtgacagactacatcactatgcgcataaccgaatacgctacgtacagactgcctgtatacgctatcagcatcgtcatgagttgtcatacctgtctcgtgtctatatgtcattcattgtgtctcatatagtaatactagctgactgacgagtgcgatgctattctattcgggtcctcttactgcgcgatctcagcctccattcatattcatacttattatcttatgttcagcctatgcatcggaaacgattcgagttccgaataggtcttgatcgtcaacgccatgtagaaatgcatgacttgtgaatcgtctcaacgacactccgtgaccgatgtgctttcctcctacttgcacacacatatcgttccgacgagcagtatattgttgtgtgtagtcgtgacgtgtcaggcagatgcagcataaacgtttttagagcaagatagagacggccaggaatcgcacagtaataacacacgtgcgctctatacatggtgagcagacacccgctcaaaccgcctatggagcgggcaagagacgatcaccgctaacaggacggtaaggagcaatcataattgcgtttcattaggcatagcccgtatttctgttataggcttatcgagcgagagactcttgttctgatgtgttcatcgtactaattcatctgtgttgtacaattaaggtcagaaaggagaacgttagagatcggctgcttttataatatttaggttgtggttgtgtctactactagatagcttaacaacagatatttggtattaacctgcacacgctactcatacgcctctcctgtctctctctctaaatatacgaagctggcgacgtcgagataaagatatagagaaaaaccgtggttaagagcatcgggagcctcgctataacaatagagaaagaggcgaaggatagggacacagtttcgtgagtatcgacttataccgtcatcctctccgaccacatcctcccacgagcgcgagaaggggggggggtgnaanaaataacaacaatataagaagaactagagtngnaattcgtaggcanatattgtaaataatanatctcgtattctctaccctcccattctcctccccnnaccctcnntcctttct

SEQ ID NO: 3136 - DNA, 2165 bp, Glycine max
  misc_feature (19)..(19): n is a, c, g, or t
  misc_feature (21)..(22): n is a, c, g, or t
  misc_feature (25)..(25): n is a, c, g, or t
  misc_feature (33)..(33): n is a, c, g, or t
  misc_feature (38)..(38): n is a, c, g, or t
  misc_feature (41)..(41): n is a, c, g, or t
  misc_feature (118)..(118): n is a, c, g, or t
  misc_feature (126)..(126): n is a, c, g, or t
  misc_feature (131)..(131): n is a, c, g, or t
  misc_feature (254)..(254): n is a, c, g, or t
  misc_feature (256)..(257): n is a, c, g, or t
  misc_feature (785)..(785): n is a, c, g, or t
  misc_feature (831)..(831): n is a, c, g, or t
  misc_feature (936)..(936): n is a, c, g, or t
  misc_feature (1094)..(1094): n is a, c, g, or t
  misc_feature (1170)..(1170): n is a, c, g, or t
  misc_feature (1204)..(1204): n is a, c, g, or t
  misc_feature (1224)..(1224): n is a, c, g, or t
  misc_feature (1319)..(1319): n is a, c, g, or t
  misc_feature (1456)..(1456): n is a, c, g, or t
  misc_feature (1611)..(1611): n is a, c, g, or t
  misc_feature (1613)..(1613): n is a, c, g, or t
  misc_feature (1633)..(1633): n is a, c, g, or t
  misc_feature (1682)..(1682): n is a, c, g, or t
  misc_feature (1685)..(1685): n is a, c, g, or t
  misc_feature (1736)..(1736): n is a, c, g, or t
  misc_feature (1769)..(1769): n is a, c, g, or t
  misc_feature (1789)..(1789): n is a, c, g, or t
  misc_feature (1901)..(1901): n is a, c, g, or t
  misc_feature (1917)..(1917): n is a, c, g, or t
  misc_feature (1922)..(1922): n is a, c, g, or t
  misc_feature (1932)..(1932): n is a, c, g, or t
  misc_feature (1949)..(1949): n is a, c, g, or t
  misc_feature (2047)..(2047): n is a, c, g, or t
  misc_feature (2064)..(2064): n is a, c, g, or t
  misc_feature (2085)..(2086): n is a, c, g, or t
  misc_feature (2091)..(2091): n is a, c, g, or t
  misc_feature (2134)..(2134): n is a, c, g, or t
  misc_feature (2165)..(2165): n is a, c, g, or t
  Probeset Number=SeqID_12915
ctctttcacacatcacccnannacncttctatngagtnggnaatctagcggtctcacgagtcagtacatacttctctgtttcatgtactatctgctcagcgcggtgtgtattagtcangcctctcntagantacatcactgttttctcgcacgaaacggagaccgccgccgcgcgcgccgcgcccgcgatccccgcgttgagctcggccgccatacctagagcgagctgtcgatgtcgatcatatgtctcgcgntnnttatcgtacagcatatattactaagtgatatttatcgaagatgaatgtctctttctcgtttgcttgcgcctctgtagctcatacgtgacggacagctcgtcggccgtagtgtgcgcacgagtgcggaagagagacggagaaggcatacgcagagacgcggacgtgctatactgctactctgactatctatctatcatctatctcgtctctatcgtatgacccagcgttatagcgatgagcacaggaacctgagatggtatcaggcgcgcagaggggacgagataggtgcagtgataatacactgttctacgtcctccttctcttgcttgcatgtgatacgcgcactccgcatatatcagatgtagacgatccacatgtcgctcaacctgacttcgctagtgcatcgtattctactgagtatgaagtacacgatcgtcacgagctatcatcacgatattagcacttgagaatgacctgatgatgggagggcgaaggagtcgaatgaggtgctatgagtgcgtaataatnacattgcggatagaaagaagcacccacatatcgcattgcatcttangaagtacacacttgtatgatgggcgcagtgcaccaccattatcgagacactatgctacatcaggtaccctagaaggtgtgctgtcccctcattcacgagactagnactcaccacacggacagtacgtcatcgacgcaggagtacgatcctgcgatctgatacgacgccgttaactactcaactcgaggatcgatcgatgcgcgcatggctagcgtcaggagtccgaactaacatcataatgctgtgccacgcgcgtattgtcncactgcccacacgcagcatgcatatgattcgcgcgcgcgacagagagtagagtgtctctcagatcacattctgaancgcatcaccaagttcatcacgcactcatcgtctncagcgtcactatgtcagatntatatcatgcagcgagactcatacgctcatatacgtcaactcagactacagcgtatacgcgagcacggcgcggataggtgagtacgcgcgaacantgactctgaagttagacagcgcgacgagacaccatgtacactcaccgccaatatgtatgcccgccaccgagcaatacgcggagcgtctcgttcatcttcatcgtaagctatcactccatctatatgacttgacttantatgcgacgatctgcagtactcgactgcgtaatataatatatatacgatgcgtcagaagtaacacaatagtacgagtctctgtatattaacatgcgacggataggtactacatgactactgatctctcatctacttagtctactcattcggtatntnactagtcggcgctcatagancgctcgacgagtgcgcgtgcgtgacgcagacgctaaatatagagtgcantantctgtatagaagtacagatatacgcgtagcgtagtacacgatcctccgtanctagcggctgctcagagacgcgactatatgtcncctccatgcgcgctacgcgncgttgtgtgcttgatgctgcgcgccgctatgtgcatgtctctgtctgagtgaggcaccccgagctcgcccacgtcatgttatctgagagtcataatacatcgttatatctgncacatgcgcgactcantggancatgacaatngtcgatgtgatgagcanctcgctgccagtacagtgacgactcgaacggttcctgctcattccgatctcgtcatgactatgattatgctactatatcacgagacgtatgatctctncactcgatgactctctnatatgatacgtgtagaacgcnntcggncttggagcgtactccgttcccgactacacgcatctatgtggantgcgatccatccacaccgacgacgattgcgn

SEQ ID NO: 3137 - DNA, 1454 bp, Glycine max
  misc_feature (28)..(28): n is a, c, g, or t
  misc_feature (341)..(341): n is a, c, g, or t
  misc_feature (464)..(464): n is a, c, g, or t
  misc_feature (590)..(590): n is a, c, g, or t
  misc_feature (628)..(628): n is a, c, g, or t
  misc_feature (670)..(670): n is a, c, g, or t
  misc_feature (786)..(786): n is a, c, g, or t
  misc_feature (789)..(789): n is a, c, g, or t
  misc_feature (812)..(812): n is a, c, g, or t
  misc_feature (861)..(861): n is a, c, g, or t
  misc_feature (969)..(969): n is a, c, g, or t
  misc_feature (1141)..(1141): n is a, c, g, or t
  misc_feature (1264)..(1264): n is a, c, g, or t
  misc_feature (1360)..(1360): n is a, c, g, or t
  misc_feature (1413)..(1413): n is a, c, g, or t
  misc_feature (1416)..(1416): n is a, c, g, or t
  misc_feature (1430)..(1431): n is a, c, g, or t
  Peptide Sequence Number=SeqID_6655
  Probeset Number=SeqID_12916
ttatttccgtagactaagcacaccattnctgacagtgtgtgcaccggatatcgcacactaatgatcacacacgagcgtcagcacaagcacgagctggtatactaataacataaataatcaacagtcagaagcaggaggatggggtggtgggtgttgttgcagctcctgtgtgcggccgcctataatctctacacatcctgacgcatccgttgatgtttcttacgccacgcccgtgtgttatgcatacagcacatccccggcgacgtccgcagcgcaccacctaatatactaacaacacggatgatacagcgcctgagaatcacacagcataccacatccgnaattaactcgcccgatcaatctgtcttagattgttcactagtacacctgcttgcatttttgataccgaccaccggtttagtatccgacagccgtcgtggagggtttgtgtgcgcgcatagagnactggtggtgtgaagtgtgttcccacacacccagctagacatccttcaccactccacaccccaccacatatattaagccatcaaccactagagagtagtgatagctgtgccgagtgcgtaaccctnaccttcaccagaccgccatcttaatctaatataatccntttcactatttcatatccaataaaaccagtatataatcttantttactatatcaatattatatatatacattacaaattgagaagtacaagtatgtatgatgaggtgcacctcacttcgccggtcatgatattcatctttcacccccccctccgcgcnccnctccactactcatacgcagcagncgccgatacatcatactacgcacacgacggatagacgcaggggagcggnaagaaacggagcgaacggaggcacgccgatagcacctggtcgttagtgataacagtctgaatattaatacaacacccacatcttattctcaatttctatcactcatcnaaactactggtcacgacccgcacaaactacaaaaagtaaaaaacacaaaagaatatcacaaacaatatgtgtgcgcagagatatggttgagcacagtgagggagaggggaactaaaacgaccacaccacaccacagcacgcgactccgtactgggtaaagcggaggagacgnacacacttatgtcatgacagagatacttatagaagcaatattcaatcagacaagcggacacagttggcgcgcgtcattagtcgtataatagttggtttgattcttcctaatagccggccggtnggaggggtcggcaggcccgtcgtgcccgcgcggggtggtgactataaatcaccttacgtgttcgcgactgaacaaaaccaagaattatgcagaggnggacacgacaagcaaagagaaaaaatatacatatcaaacgaggatgtcgaganggnggggagagaggaannagaagagcgcaaaaaaaaagaac

SEQ ID NO: 3138 - DNA, 536 bp, Glycine max
  Probeset Number=SeqID_12917
attagttacctaataaaaacaatgaagctaagcgagggaagaggcaaagaagagaagcacgggagacaacatttcaagcacgacctaaaaaacatgatctcgtctttaacccacatgggagcagagaagggaggaccgagccaatatgaagaaagggaggaggatgaaggcgtcagagttatcacgctctctggatccaacataggagccaccatgaagacagagctcgacaacaatcatggagaagacaaacatgagcttgatttccttactaccttcgttaacagcaactttcaagctgtgaacaactcgctaatgatgggggccaagtacgagactcatgatcccggcgttcatcttgacatctcgggcgatgtggagaagcctttgatgaaggcatctgcgagggagacaaaggataagaaggggaagactcctgctcgaagttgaacgttgagaaactgaaaaaatacagaatggtatcttcatgtatacaacttctgcttcttcagtattaattctcttttatcacttgt

SEQ ID NO: 3139 - DNA, 523 bp, Glycine max
  misc_feature (448)..(448): n is a, c, g, or t
  Peptide Sequence Number=SeqID_6656
  Probeset Number=SeqID_12918
catgcccctaatgactgcattctattgatcgctaccaatcaatgtttctgatcgattgcaccaagtgcttcgatgtgcccttggatcacatgactttgtctataggagacattgccccctctggcatggtattgcaggatgtcacctcagatggttgcacatacagcttcacataaacacctttgtctacccctttacatccctttctctcgatgcttatggtactttgcatgcaatttgccttctcacaggagaactcatcataccatcgctctataaccttgctagtgctctcttccgtggactttttctgcatctaccagcaactagtgtgctccagctgctgtggagtggtgtgaccattgaagcttggtggcgtcatgaccatctcaggatgattgaaacagcatcagcccatctatttgctgcgatccaacgattcctgaanatgttggttggtgttgacaccaacttcactgtcactgataaagctgctgaagaactgagtgtagtgaggttatat

SEQ ID NO: 3140 - DNA, 1426 bp, Glycine max
  misc_feature (14)..(14): n is a, c, g, or t
  misc_feature (20)..(21): n is a, c, g, or t
  misc_feature (24)..(24): n is a, c, g, or t
  misc_feature (32)..(34): n is a, c, g, or t
  misc_feature (672)..(672): n is a, c, g, or t
  misc_feature (874)..(874): n is a, c, g, or t
  misc_feature (1112)..(1112): n is a, c, g, or t
  misc_feature (1122)..(1122): n is a, c, g, or t
  misc_feature (1156)..(1156): n is a, c, g, or t
  misc_feature (1186)..(1186): n is a, c, g, or t
  misc_feature (1261)..(1261): n is a, c, g, or t
  misc_feature (1367)..(1367): n is a, c, g, or t
  Peptide Sequence Number=SeqID_6657
  Probeset Number=SeqID_12919
tttgtgtgtttgtngtcccnnggngcgcgggnnnacggtggcaatcctcgcgtcctttatcactctctctcgaccctccctacgcaccccacgcggcggtcccgcccaccataagaaaaggggtactcgtgggccgactgcccctcctcctcgccacctcactccactcacccgcccgaggctccccgtctcgctcctcgcgcccggggacccggggatcccttcatcttttcgatcgcaggtagtatctgtgtgtgttgtcgtcatcggcacgcctggacgtcgcgcgttattatcgatataatgtcgtgtctgtagcccctaccgacacgtccagcccacaccaacccacctcacctcctgacctgcagggagagccgctggatttttatgtggtgtattgttggtcctatcacacagtgagactcctctgattctccggccccgcaccgcacgctctgcgtgctgtctgtaatgtagttgagcagtgagtaagagccgcggcggcgcgccgcgggcgtgacgcggacatcgtggacgcgctgtcctgttttcttggtgtgtgtgtatctgatgtgtgtgtattatgtgtgtgtgagtcgagtgcgagcgcgagaaatcaccctccataccctgacgcatatgcaaccaaacacccgcccagcacccacngcgcacgcggtgcgctcatctaactcgaaatgctgctatcatgacagtcgtaacgacgcgcatcaatactcggcaccctccacactcgatggatttgcaactccatgcgtctccagttctacaacgccttgagctattgcttcatggatagaccaccgcacgcccctgcctcctcctccgtgatatctcgcatgctcgaggncaacgcccgccgctcaccgatgctctatgccggcgtataccgcacacacaactctctcattatccgtcgcgtcatctacgtgcacacaccacgtcgtcgctgtcctctgtccgtgccatgtcttgtcgcacatctgctgcctctgtctgagctactaaccacatcacgaccggtctaactctcacacctacacatcgatactcataacataagacgccggctgacagtgtggcggcgnaacaacctgngcgcgcttccactctcgacacaccccgatctacnatttgaacgcttgtggcatatactcacacntcggctgaccgcaccatacacaaccacgacgatcgacgacgcatacgtacacacttcgctcgcgcgcccgggcgntgttggtctctgcccgacagctcacacccttgaagaggcggggtgtgtcgtccgctgcccctcacgcaggacatcgttcatctgctgatcgcctcgctcgttgatnggtgtcgcgatcgaggtgatgcgtcacacatccgctaccacactgacaccacgacactg

SEQ ID NO: 3141 - DNA, 1486 bp, Glycine max
  misc_feature (31)..(31): n is a, c, g, or t
  misc_feature (47)..(47): n is a, c, g, or t
  misc_feature (58)..(58): n is a, c, g, or t
  misc_feature (75)..(75): n is a, c, g, or t
  misc_feature (80)..(80): n is a, c, g, or t
  misc_feature (106)..(106): n is a, c, g, or t
  misc_feature (146)..(146): n is a, c, g, or t
  misc_feature (169)..(169): n is a, c, g, or t
  misc_feature (187)..(187): n is a, c, g, or t
  misc_feature (203)..(203): n is a, c, g, or t
  misc_feature (208)..(208): n is a, c, g, or t
  misc_feature (252)..(252): n is a, c, g, or t
  misc_feature (266)..(266): n is a, c, g, or t
  misc_feature (294)..(294): n is a, c, g, or t
  misc_feature (300)..(300): n is a, c, g, or t
  misc_feature (323)..(323): n is a, c, g, or t
  misc_feature (365)..(365): n is a, c, g, or t
  misc_feature (374)..(374): n is a, c, g, or t
  misc_feature (407)..(407): n is a, c, g, or t
  misc_feature (462)..(462): n is a, c, g, or t
  misc_feature (510)..(510): n is a, c, g, or t
  misc_feature (551)..(551): n is a, c, g, or t
  misc_feature (578)..(578): n is a, c, g, or t
  misc_feature (621)..(621): n is a, c, g, or t
  misc_feature (623)..(623): n is a, c, g, or t
  misc_feature (627)..(627): n is a, c, g, or t
  misc_feature (629)..(630): n is a, c, g, or t
  misc_feature (632)..(632): n is a, c, g, or t
  misc_feature (634)..(634): n is a, c, g, or t
  misc_feature (636)..(636): n is a, c, g, or t
  misc_feature (638)..(638): n is a, c, g, or t
  misc_feature (866)..(866): n is a, c, g, or t
  misc_feature (876)..(876): n is a, c, g, or t
  misc_feature (893)..(893): n is a, c, g, or t
  misc_feature (949)..(949): n is a, c, g, or t
  misc_feature (1051)..(1051): n is a, c, g, or t
  misc_feature (1054)..(1055): n is a, c, g, or t
  misc_feature (1061)..(1062): n is a, c, g, or t
  misc_feature (1085)..(1085): n is a, c, g, or t
  misc_feature (1088)..(1088): n is a, c, g, or t
  misc_feature (1149)..(1149): n is a, c, g, or t
  misc_feature (1180)..(1180): n is a, c, g, or t
  misc_feature (1185)..(1185): n is a, c, g, or t
  misc_feature (1212)..(1212): n is a, c, g, or t
  misc_feature (1215)..(1217): n is a, c, g, or t
  misc_feature (1220)..(1220): n is a, c, g, or t
  misc_feature (1243)..(1243): n is a, c, g, or t
  misc_feature (1270)..(1270): n is a, c, g, or t
  misc_feature (1284)..(1284): n is a, c, g, or t
  misc_feature (1323)..(1324): n is a, c, g, or t
  misc_feature (1344)..(1344): n is a, c, g, or t
  misc_feature (1348)..(1348): n is a, c, g, or t
  misc_feature (1353)..(1355): n is a, c, g, or t
  misc_feature (1358)..(1360): n is a, c, g, or t
  misc_feature (1372)..(1374): n is a, c, g, or t
  misc_feature (1415)..(1415): n is a, c, g, or t
  misc_feature (1433)..(1435): n is a, c, g, or t
  misc_feature (1437)..(1437): n is a, c, g, or t
  misc_feature (1447)..(1450): n is a, c, g, or t
  misc_feature (1452)..(1452): n is a, c, g, or t
  misc_feature (1454)..(1454): n is a, c, g, or t
  misc_feature (1460)..(1463): n is a, c, g, or t
  misc_feature (1472)..(1472): n is a, c, g, or t
  Probeset Number=SeqID_12920
cgtccgtacgcgcgtaccgacaacgctatcncctcgtacctgaacgnctcggtcgcgnacgcgcgacacgccgtncgcancgatcgcgacgtggcggatcgagcantctgtcgcgagacgcgcgaagacgatagccgacgagacgncgacgcgatcgcatcgcgtacgntacgtcgcgacgcgactncgacgccgcgcgactnacgtngcgagcgcgcgctgccgatcggtacgacgtacggcccgcgcgcncgcgccgccgacgnacggacgaatcgcgatcgcgccggcgangcgatncgtcgtcgacgcgatacgctgtncatacgcggacggcgccgcgaaacgagcgcgcgacgcgacgnatcgcgcgncgcgaggtgcggcgcgctgcacacgggtgtcancgcgacgtgcaccacgcgcagtaatacgtggcgctcgcgctgtaggggcatgcgntgtgtctaggtgagtctgcgcaaagtcggctatagtgctgtgtacgtnagtgcgcgacgtaggcggtgctgctgttgaggacgagggcngaagtgcatgtagatgcgagcgtacgngagtatagcatacgatgactatgctgtcgtctgttgtcttgtntngctngnngngntnancacaccagcgggtgtacactcacacgtcgactcacatgatagtaacatcatagaactcacaacgtatctactcgttattctgatataagcaatgacatctcttgtgaagcatatatctagggtatctgtcctctgtagcggcttcacataacatctccttactatctacacacatacatccaacagcacacacgcgcgtagtaccaccaatacgaagagccaacacanaatgttaggncagtacacggatacctnctctactattattttctctcctacttgttctctctctacatcctcctctcagatanatagatataagatacatgatcactatgcgcttcatgcagaaccatcagtgcaaatacactccgatactctgccaaggaaggacaactacatacaaacctacnggnnttcaanntcaagagctctgttgtacagagnggnggaggctctccatccagcgctaactctctatcgttagtaagaaatatatatacctactatntagagcttctctcacatagactatatcttcncgcanctcgatacactgcgccgtcaacaccgntgnnntgnctgtaggcaacactctccgtgtnaggggtaactatatgttgactataagnatctatgaatttantaagaggtatgtgtggggggagaggagaggacactctannccaagtcatgtatctctcgnaagngagannntannntatatttgtcgnnnggaggtgtgtattattatagtactgctcgtttacatcctcntatccttgttggtgggtnnntngtggataaannnngngngggggnnnngggacacgnccactacaacaaac

SEQ ID NO: 3142 - DNA, 204 bp, Glycine max
  misc_feature (7)..(7): n is a, c, g, or t
  Peptide Sequence Number=SeqID_6658
  Probeset Number=SeqID_12921
tcgagtnagcacgtaggcccccccccccggttaattacagactctccatcgttgaaagaccatctcagcttcttcgacatccgcttgcttcgttacacttctcacttgagatccatcgatcattgatcaataccattccaatcaacacttcacaacatcaacaaacaaccaagcaagataacattgtcgccacaatgagctttc

SEQ ID NO: 3143 - DNA, 1625 bp, Glycine max
  misc_feature (171)..(171): n is a, c, g, or t
  misc_feature (554)..(554): n is a, c, g, or t
  misc_feature (568)..(568): n is a, c, g, or t
  misc_feature (658)..(658): n is a, c, g, or t
  misc_feature (680)..(680): n is a, c, g, or t
  misc_feature (924)..(924): n is a, c, g, or t
  misc_feature (929)..(929): n is a, c, g, or t
  misc_feature (964)..(964): n is a, c, g, or t
  misc_feature (970)..(970): n is a, c, g, or t
  misc_feature (975)..(975): n is a, c, g, or t
  misc_feature (1172)..(1172): n is a, c, g, or t
  misc_feature (1216)..(1216): n is a, c, g, or t
  misc_feature (1223)..(1223): n is a, c, g, or t
  misc_feature (1229)..(1229): n is a, c, g, or t
  misc_feature (1257)..(1257): n is a, c, g, or t
  misc_feature (1290)..(1290): n is a, c, g, or t
  misc_feature (1310)..(1310): n is a, c, g, or t
  misc_feature (1325)..(1325): n is a, c, g, or t
  misc_feature (1441)..(1441): n is a, c, g, or t
  misc_feature (1560)..(1560): n is a, c, g, or t
  misc_feature (1625)..(1625): n is a, c, g, or t
  Probeset Number=SeqID_12922
atagtgtgtgcctcacctacatatctatgcaataacaaatataatacatcgacatactatcgcctcatcatttggttcgctataatttaacacatacaataatatctcgtcccttgccgatgatatgagggataatgtcattattaataggtggtgttgagtgtcctcacncgcgcgcgttaacgtgacggagagagggtactctctctttatttatctcttatcatattaaatcagaaccatggcagactgtcacgtctattaagatataatactatatacggtcgctgtacgcagagaatacgatcccggaaatagcactgcgcgcgggaatcgcgtttcgatcatgatggatattaccttctctcatgagtcgcagctggtaactacgacatcatatataaacacaattatagtgtactactgactgattttgcatattgaagtgtgtgcgaaaagagagcgaatgcgtatactcgcgtttcataacgcggtcgtatcaatatttgtcgaatgtcagcgatattggtggtagaagaggatgtcttcgctanctgattgatagtgnattctgatgtgacgtatcataatatacgtccctagatacagtatagtggaatatagaagtgtattatgaggaagagagtggtacgtgtgnctgcattgacctctgtatattntgactgcgcgtctacgcggtctcgctgcatcctcgtaagatatgacgagagaacaatacaacacactagtataatgtctttgacgtattagtggtaagttgagtgtaagatagatgttctatgcccatataaatttattgtttatacaatcattgctctattgttgatgacggataatattatatgtatatacatactaggatgttatattatatacagcataactcccctctccactctcccncccancatatatcatatagactgtgtagtcgaacgtgtcngctgcncactnttatctttgttgtattagtgatacgagcggcgccaccatcatcgagccaccacgcagtcacgttagctcacacgcagcgcaatacatcctaatctgtatgcttctagttgtgtattgcctatatctaacgagacgtgtatactgttattccgcgctcagtcgtataattatatgcatacatatcctctcatgtctgnccgcgtacagtgacccatattatgataataactgacgcgatcgngactacntatacnactcagatcgttgtatgtcgtatcccgncgtgcgagcttactagcgtctgtcacgatgagntagtatatacatatttcgtncgcgtagggcgtgtngctatcttcagacgacacgacgctggcgaggataccacagatatatacgtgctgatgtgactatatgatcgtctatgtgcgcgtcgtctgttataacagcgcactcgcgcgtattnatctcttccgtcatgtaatacagctgtacggcgtcacgtgcgtgttatctttagacatgatcgcgcgtatattcttgtctatgatatcaccgtgtggctgcgtggcgatgacgacaacncgaccacgcatctatatgatcatactaaaactatacatactggacgaacgtaccatctgctgctn

SEQ ID NO: 3144 - DNA, 1868 bp, Glycine max
  misc_feature (3)..(3): n is a, c, g, or t
  misc_feature (91)..(91): n is a, c, g, or t
  misc_feature (99)..(99): n is a, c, g, or t
  misc_feature (177)..(179): n is a, c, g, or t
  misc_feature (198)..(198): n is a, c, g, or t
  misc_feature (275)..(275): n is a, c, g, or t
  misc_feature (407)..(407): n is a, c, g, or t
  misc_feature (428)..(428): n is a, c, g, or t
  misc_feature (448)..(448): n is a, c, g, or t
  misc_feature (546)..(546): n is a, c, g, or t
  misc_feature (561)..(561): n is a, c, g, or t
  misc_feature (563)..(563): n is a, c, g, or t
  misc_feature (602)..(602): n is a, c, g, or t
  misc_feature (640)..(640): n is a, c, g, or t
  misc_feature (684)..(684): n is a, c, g, or t
  misc_feature (740)..(740): n is a, c, g, or t
  misc_feature (839)..(839): n is a, c, g, or t
  misc_feature (1040)..(1040): n is a, c, g, or t
  misc_feature (1056)..(1056): n is a, c, g, or t
  misc_feature (1060)..(1060): n is a, c, g, or t
  misc_feature (1067)..(1067): n is a, c, g, or t
  misc_feature (1175)..(1175): n is a, c, g, or t
  misc_feature (1306)..(1307): n is a, c, g, or t
  misc_feature (1368)..(1368): n is a, c, g, or t
  misc_feature (1384)..(1384): n is a, c, g, or t
  misc_feature (1396)..(1396): n is a, c, g, or t
  misc_feature (1423)..(1423): n is a, c, g, or t
  misc_feature (1540)..(1540): n is a, c, g, or t
  misc_feature (1560)..(1560): n is a, c, g, or t
  misc_feature (1658)..(1658): n is a, c, g, or t
  misc_feature (1742)..(1746): n is a, c, g, or t
  misc_feature (1748)..(1751): n is a, c, g, or t
  misc_feature (1753)..(1754): n is a, c, g, or t
  misc_feature (1757)..(1757): n is a, c, g, or t
  misc_feature (1802)..(1802): n is a, c, g, or t
  misc_feature (1826)..(1826): n is a, c, g, or t
  misc_feature (1832)..(1832): n is a, c, g, or t
  misc_feature (1842)..(1844): n is a, c, g, or t
  misc_feature (1846)..(1847): n is a, c, g, or t
  Peptide Sequence Number=SeqID_6659
  Probeset Number=SeqID_12923
ggnggacgagacgaacgcaacgtgaatagaacaaagaaggcgggccgtgcaaacgtaagcgtgatgtagcacaggagagggcagacacganggacggcngccgacgacgaggcgcggcaaggagagccgacccacatggaagtaggtgtgcggcacgcacaagcgcacacactcgannnggcgacgaaaagacgagcnagaacgggggcaggagtgcgggaggggcgctagctccacgtcagaatgcgagactctgagagtgtgagttagacaanatgcgcaggacgaggaccgcgaggtagcgcaagtgcgcgacgcatcgtacggcgcaggccagcggccgcacgcgcatcacggcggcgacagagagcaggagaggcacgagagccgacgatagcgacacacanaagcgagcactgtagactgcngtgcgcaggcgctcggcacngcacacgcgccgtagagcggcgagacacgctcgcggcgacacacgtggggggtcacaaacatcacatcaacgcgagcgcgtacgcggcacagagaganagacacgacgaggcngngacgcgagaacagagagacacgacatggaaggcggagtnagagggcgcgcgaccagagcagaggcgagtcgagagtngagagcgcgagagatagacacgcagagcgagacggctctcacanaatacagaagaacgaatgcagactccgacgacgaccagtacacgagctaccgaganagcgaacaccatacaaacacagcggcgaggcgacaaccgacacgcacgagcagagaacagcaccaacaaacggcacaacgaggtcgcgcacagccgagncacgccgcagcgacgatgacgagacgccgacacacagacagccactaaacacacgaccagaggcgcgcggcgcaccccgcgcagcgagcgccgccatgccacgcacagcgtcacggaacgagacagcgagaagagagaaggacaccgagaagcgacacacaacaacaaacaagagcgggcgcgctcgcggtgcgagaacgngtgcgcgtggccgagncatngcatacnatgttagacacaacacgacgacgatcggagaggcgagcgacgcgcagaccacacccaccagcacacatgagctgcgcgcgggcgagcggtagtaggacgagagggcgncgaaggagagaggcgcaccggcaccaccagcgcagcaccgcgtcagacagtcggcgcgacagcagacgctgcaacgaatacacaacagtcgcgaacacgacgcggtacacgcgcagtcgcggggttatttnntggaagcgcacgcggcgcggcgccacgccgcgcagcgagcgaaacagcaagaaagagcgancgtgggcacgtgacancatggaacacgnagcggcgagcgagggcgcagggcgganagaaggctagtgggagacactccacccgctcggggcggcgaggagggcgagcgcgacacagagggaacgcgataccgacgcacacacaccagcgcgaccacaaaaagacgacagatnaggcgcgcacgcgacgccgnccaggcacgagcgcgcgagcggcgctaccggacgggtgaggcgcagaagggagggcgaagaggagcaagtgtgagagaggacccgacgcgggaggctnccggatgggcgggcaagcagcagcggggtggcgcaacaaaatggagagggggaggagagagagaggaggaggcacgagcaacannnnntnnnnannaanccgcgcggcgaccatcggagtctcagatgtgatagagcgcgtcgngcccgccgaacaatcacgcgcaanagaagnaaaaaaaaannnannaaggacagccaaacaccaaaa

SEQ ID NO: 3145 - DNA, 525 bp, Glycine max
  Peptide Sequence Number=SeqID_6660
  Probeset Number=SeqID_12924
ccctttctcctttccttcttctctccgctcgctcattccaaaattcctacgaccgagtgagatccgactggtaactcagctaccatcagtttgctctccctttagcttgctcgtcctcgactgaggcacctcccagctcgactcgcatgtgatgtgggcttggatcttgtcttccgctgccagcttgaatccatcttcagcatgaggatggcggcagcgttgtcttcccctagcgcgcgagccagacgcatcgtcgtcgttcccagtcgaggcagccagacacatcgtcgtcttcctccacatcggcagctttcttcgtcctacaggtcaagtgggaaccttaacatgttgactcttctgcaaggatagggggatgtggaacctcgagtgtgctccctatagaagcagcgctgcaatatgagatgacaccactgctagtactatctttccttcggaacacaactttgctgtgattgcctccgtaggtatgtcttacagatcccgccatagccgtccacaaatata

SEQ ID NO: 3146 - DNA, 741 bp, Glycine max
  Peptide Sequence Number=SeqID_6661
  Probeset Number=SeqID_12925
actacactcgtttactcttgagcggcactcgtaatcagtcaggaaaccctttgctttgcttgctatggctcgtcgtgactctcctcccaactttgctcaagactcatgtaccatcgagtttgacggtgcttccagaggaaaccctggaagagctggtgcaggagccgttctccgtgctccagataacactgtgctcttccgttctcgcgagggtttaggctctgctacaaacaacgtagctgagtatcgagctctcaatcttggcctcgagacggctcttaacaacggctttagaaatgtgcgcgtccagggtgattcacagcttgtctgtaagcaggttcaaggtgaatggagaacccaccacccgaaaatggctgagctttgtggacaagcacaggggctgatgagtcaatttgactcatgtgatattcaacacgttcctagggaattcaattcagaggctgatgctcaagctagccgtgcgaccaatytggcacagggtgaaagtcaatacgataatgcaggccgcggctatggaagaaggggatactaatatccaagtggagtaatatgcttattcctgttttcttgttttcttgttttaggaatcatgtcttttagcatgttatgtgttaacatgatgatgaacatgctcttctctctctctcttttgctttgtctcacggcatgttgactttcccaagaacatgtctatgtcgtctactgctacttattctatcc

SEQ ID NO: 3147 - DNA, 1722 bp, Glycine max
  misc_feature (28)..(28): n is a, c, g, or t
  misc_feature (31)..(31): n is a, c, g, or t
  misc_feature (101)..(102): n is a, c, g, or t
  misc_feature (109)..(109): n is a, c, g, or t
  misc_feature (129)..(129): n is a, c, g, or t
  misc_feature (131)..(131): n is a, c, g, or t
  misc_feature (158)..(158): n is a, c, g, or t
  misc_feature (161)..(161): n is a, c, g, or t
  misc_feature (170)..(170): n is a, c, g, or t
  misc_feature (173)..(173): n is a, c, g, or t
  misc_feature (175)..(175): n is a, c, g, or t
  misc_feature (178)..(178): n is a, c, g, or t
  misc_feature (197)..(197): n is a, c, g, or t
  misc_feature (271)..(271): n is a, c, g, or t
  misc_feature (288)..(288): n is a, c, g, or t
  misc_feature (292)..(292): n is a, c, g, or t
  misc_feature (295)..(297): n is a, c, g, or t
  misc_feature (352)..(352): n is a, c, g, or t
  misc_feature (380)..(380): n is a, c, g, or t
  misc_feature (383)..(383): n is a, c, g, or t
  misc_feature (400)..(400): n is a, c, g, or t
  misc_feature (454)..(457): n is a, c, g, or t
  misc_feature (459)..(462): n is a, c, g, or t
  misc_feature (494)..(494): n is a, c, g, or t
  misc_feature (496)..(496): n is a, c, g, or t
  misc_feature (511)..(511): n is a, c, g, or t
  misc_feature (521)..(521): n is a, c, g, or t
  misc_feature (545)..(545): n is a, c, g, or t
  misc_feature (550)..(550): n is a, c, g, or t
  misc_feature (561)..(561): n is a, c, g, or t
  misc_feature (572)..(572): n is a, c, g, or t
  misc_feature (636)..(636): n is a, c, g, or t
  misc_feature (639)..(639): n is a, c, g, or t
  misc_feature (642)..(642): n is a, c, g, or t
  misc_feature (646)..(646): n is a, c, g, or t
  misc_feature (648)..(648): n is a, c, g, or t
  misc_feature (651)..(652): n is a, c, g, or t
  misc_feature (745)..(745): n is a, c, g, or t
  misc_feature (795)..(795): n is a, c, g, or t
  misc_feature (805)..(805): n is a, c, g, or t
  misc_feature (999)..(999): n is a, c, g, or t
  misc_feature (1116)..(1116): n is a, c, g, or t
  misc_feature (1168)..(1168): n is a, c, g, or t
  misc_feature (1170)..(1170): n is a, c, g, or t
  misc_feature (1480)..(1480): n is a, c, g, or t
  misc_feature (1525)..(1525): n is a, c, g, or t
  misc_feature (1564)..(1564): n is a, c, g, or t
  misc_feature (1566)..(1566): n is a, c, g, or t
  misc_feature (1606)..(1606): n is a, c, g, or t
  misc_feature (1611)..(1611): n is a, c, g, or t
  misc_feature (1648)..(1648): n is a, c, g, or t
  misc_feature (1656)..(1656): n is a, c, g, or t
  misc_feature (1659)..(1659): n is a, c, g, or t
  misc_feature (1685)..(1685): n is a, c, g, or t
  misc_feature (1704)..(1704): n is a, c, g, or t
  Peptide Sequence Number=SeqID_6662
  Probeset Number=SeqID_12926
ccaccaagacagctatactacatcacgnagntcatctcgctgatcagtcacagatatatcgcatcgtgagcacacacacgcaactacgtgtatatcgtagnngtaagancagtatcgcagtgcagtacntnagtgtacgtagctgcagcgacactgancgnagcaagtgnccnancancatatctcgctgatcatgngtcgactcgctatcataccacgcagcgcatcacgcagcagccgcgacacagctcgtagtctacacgtcccagtnatgatatgatgtatagntgtnggnnnagtcgtgtgatcatatctcactatcgtcatgtgtatatatcatatgtgattcgtncgtctagtctcagttacgaacgcgcgantgngagtccagaacacgacncagcatcagtcgattagtatactctctatagcactgggaagcgcatgagcaagnnnngnnnnagtgacgcgcgatccgtgcttctgtctcagcntnagtcgcgcatccgtnatcgccgaanagctgcgcgcgttgtgtgctacanacctngtcggcatcanctcgcagccgnagcacgcataccgatcgttagtagatgtgcagatatacgcgcttccgacacgtgtgatattganagnagntggngnggnncatcgttcatcattcagtgcagtctatctctcgtatgcttctcactatcatctaagatcatttacatcaatactgtatcctacgagtatatantctcatgagtgtctaatatagatcatatatatcgcactacagcatcagcntaccggatcnggcgcactacagttcagtcgcactatacaagcttccgatagtaggcgagtatcagacagtgccgtgcgtgagtgccacgatccatctatgcagtgattcagatatggagctaccattacaacagtggatatatcgatgtgccgtgtctgatgaccgaccctcgactccttaccgcgtcccgtggtaccgctcgncatatcgtgtgctcgcttacttatataaatgtgagtagtacatggcctgcagcgagcacgtcgtcactctcctatctgtaaatccacatagcagtattaactagcccacgcccgcgncctgcctacatccggcagtctctgctatatctcagtcgctagagagccacancnacccaccgacacacgcggctactataacactaaacatacatgcacccttgctaagtttgagtgggacatatcccacacacatacgctcgcacacacgacgtaaataggtgttgggtatgtcggtctctctcttctctgtttgttgttgacgtatgcgtgtacttgaatgcggcgcgctctcgcgcaccgaacagcccacgagacacgaacaccaatatgcacatatctcaggtactctgttgactcgatgattgtctcgcggctcatactcattgagagcatcagacccactcatgttgatgcgatatanttatatagacagaggtaagtattataataatagttattgcatgtnttgtgttgtctggatgtcgtagtgtgcatcgtactgctngnctgcggtgctggcgtatagacctctccgtcagcagagacnatacncacgtgcagggccgcgcgccgagataggaatagagancacacacnagnagactctatgcattcatctcacgcgncatagcacataaaagatancacacctaacaaccaaat

SEQ ID NO: 3148 - DNA, 1402 bp, Glycine max
  misc_feature (18)..(18): n is a, c, g, or t
  misc_feature (75)..(75): n is a, c, g, or t
  misc_feature (164)..(164): n is a, c, g, or t
  misc_feature (342)..(342): n is a, c, g, or t
  misc_feature (361)..(361): n is a, c, g, or t
  misc_feature (419)..(423): n is a, c, g, or t
  misc_feature (436)..(436): n is a, c, g, or t
  misc_feature (598)..(598): n is a, c, g, or t
  misc_feature (1250)..(1250): n is a, c, g, or t
  misc_feature (1264)..(1264): n is a, c, g, or t
  misc_feature (1332)..(1332): n is a, c, g, or t
  misc_feature (1359)..(1360): n is a, c, g, or t
  misc_feature (1370)..(1370): n is a, c, g, or t
  Probeset Number=SeqID_12927
cgatacgccaatgctacnatggatagatcacgagagtccaccaggatagagaatcgcgttaggacactcaggatnagcgatgagtttaactagtgaagtggtgtgcaacgaggtgtaagaggacatcttcacagttacgctctgagtgattctgctacacaaanaaacgcagacagaggatgagtgatggacgatagggagtggagggcaatattcgctagagtagtacactaataactgcaagactgagggatagtaagcagaggatacaagtgcgagactattccgacgctcggtactcatatataaaatatcatcatatatgtgttgtttccacccctncgcgcggggcgggcagcancacgcacacacactatctattatgtcaggttttgtgttgggtgttcaaaccacagttnnnnncacaaaatttctncactcactaaacacactccatattaatttgtgaagaagatgtatttgggttacacacagggtatatctcatctgtataatcctcataatctctcaacacctaccctaccaatatagcgtgtgggggtgtggtggtggtgtgcggcttgcggcaataccattntaacttcttcgtgtccctattaactcctctttaaaatctccatacaataacacccagtatcctcacgagagtggtgagaagatagagtgcacgctagtatcgaagcgatatataagaagctcaccacttaggtgggtgaagatgggtagttctgtcagggtgttggttcattgtggataagtttatacagatttcaagccttaaagtgatcatgagatgagtagagtcgagcgtcaacgtgcaatgtgaggcgctaggagtggatgttacagccacacgaagaggttgggcagatcggtccggggtcgtgggcgagaacctcggcagtaatagtgaggtggatgaggcggatctatgcgccagatataagaatgctatattgattatttcaggcgcgaaagtgtgaagcagcggaaaatttggtagatctatgggctgggtagttaatattgtgaagagatatattctatcctgttttctatatgcgtcctaaaattcatttacccttgctccatgcatagatagttgttatagttataaatcatagaatatatacagaagagagattggtccgtagttctcccccactctgtagcctcctgggggggtagtaatcattcgtgtgagtatctttgatgagtcgccgcgcgcncgccgacatggcgngggtggtgggtttttccatggttagtagtagccgtgatgcgtggcaagtgataacaaatcatgtattntactaaacgaatatacatctccatgtnnacaccacccnctcatagactcagtaatctattcactatatac

SEQ ID NO: 3149 - DNA, 1598 bp, Glycine max
  misc_feature (375)..(375): n is a, c, g, or t
  misc_feature (556)..(556): n is a, c, g, or t
  misc_feature (594)..(594): n is a, c, g, or t
  misc_feature (626)..(626): n is a, c, g, or t
  misc_feature (816)..(816): n is a, c, g, or t
  misc_feature (873)..(873): n is a, c, g, or t
  misc_feature (982)..(982): n is a, c, g, or t
  misc_feature (1122)..(1122): n is a, c, g, or t
  misc_feature (1206)..(1206): n is a, c, g, or t
  misc_feature (1236)..(1236): n is a, c, g, or t
  misc_feature (1410)..(1410): n is a, c, g, or t
  misc_feature (1492)..(1492): n is a, c, g, or t
  Peptide Sequence Number=SeqID_6663
  Probeset Number=SeqID_12928
cctcactcctcccatctccctactactccctccatcactatcaataagatttaaatataaatgattatatatattacgaaaatgttatatatcgatcaatatctccccactacgaaagacgtcaaggcaagtgattcatactgatcacctcgcaattagcgtggttagaagagatgtgaaatatactgacaagctagacacatactcgcgcatagaatagtcacttgcgagacgtagtatagttaactattcgcacaccagcaataccagatatagcattgtctatgtactgacttataacacctatagagcgcatgccccatgacacacatataccctctagcaacgcgaactgattcataccagaatatgaangaccaagcgtcctacgctatatctccactattgcgacactgtatgagtaagattatcattccctcatacaacaactataatacctatctaccatttactcatcttcatattacaagcctttgatatacccgggtgacacatattaatcagaacagttacaatgcgatcatcaaaactgctntcatactgtctatcatatataatatgcgccacgacccngctcaactctctctattgctatgcctcttgtntatagcgctcacgctctatccatcaatcacagccaacctttacctaatatgatgccgcaccttagcacaacacccactacttcaaccaaattatatacaacctcctactgtctccactccctcatcaagctctacaccctcaaatactgcattggtctcctcacagctctctccacaatccaccgcgctnattatctgagatgctttcatacatcgacttcgttactacgcaccatattcgatcganaatacatgagtgagatatacgatcacattatagtaattatactatacatgcgagacactcggtcaccgtgttcgtttctctgcgtattgtcgcatagataatagatacntctgctaacacacaattatcacatatccataggataacccatagttagtaaatctctcaaagcgacgcatctctagacatacagatctctcctctttgtacatgttcactcctctctcttctgtattaataatgtgctanattggtgaatagcacgatagcgttcatctctatctatctctcgtacataacgacacatattcacctatgtcgttatcgtgcgcntagtctcttcctatcttatatatatataanaatataatacataaagaaaagatatcacaccatatatgtatgtaactcattacataacacataaggctatacgttataagacatagacacactcatattatataggttactacatcgactagcaggcataatactcatacgctatacaatctcctctactagtcgatagtgtangtaccatgtactgacaggtgtgtactatcgaccctccacgatcatctattattagaggctagcacacagaatgtcatgtcantgatgcataaacgctattcgtcatgcaccaactatacacaacagatatcccgctctccacacatcgacgtctctccatccacatatcacatgataatctatacatc

SEQ ID NO: 3150 - DNA, 785 bp, Glycine max
  misc_feature (785)..(785): n is a, c, g, or t
  Probeset Number=SeqID_12929
aaaagtattactttaagcgatgtgctattatgttcgattagctatgtataaccatccgtgtttaaacaattgtgtcctaaacaaaactctaccccaatgttctataaatagaaagaaagatagtgcattccaggattttttttttgtcaaaactatccttggcttatttcttctcttctgccaagatgttttcttcattcagggttgccatccatggcagatgctcatgtatcttctcatttttcatatccgtgggtgtaagttacggttttacaaacagtgagcttattactctcattattattgtttgttgcattctgtgttaactaaaaaaatctagccatgttaatctgcacattgccttagttttttaactcaaggtttttcatataaaggagaacttcctagagttgctgctgttagagaatggtgggaatagtctgttgtctcatctgctgaaatcttagtttatccagacgagttgagagtatctatatgattgttcaatatgaagctcgctgaagacaaggaacaaacatcattcactgttaagtgtgtgccctgagacaaagctactacaatggagaaatgtattaggcagtactcgctcataggtagtaatctttccattggactttggcttgaagtggtaaaaacttgtcaaacctgtattgagattttagacatttgaggattgagattatgcatctttgaaagctagattttaaaaaatggttattattgttgtcgtcamaaaaaaamaaaaaaaagcttatcgmtaccgn

SEQ ID NO: 3151 - DNA, 390 bp, Glycine max
  misc_feature (53)..(54): n is a, c, g, or t
  Peptide Sequence Number=SeqID_6664
  Probeset Number=SeqID_12930
tttactcgcatgcacgctcttcacctgatcctcttagcggccgagagcgttcnnttttttttttttttttttttaatttttaaaaacgtttatatataatcacgattttaaaccacagaatatgaaaataattgcattacatgttaccagctgggtatagaaatttgagcagggagccatgacaaattagagaatgggaatattgaatcacaggataatattggccacattcattaaagcaaccaaaaaaattaaactacatgcacagtactcttaatagatgccagaacgaccagacaccagctaaaaccttaggcaaatcgaaataccttcaactatttagcaataccataatataattttaaatggacataatgttgaagtgtagta

SEQ ID NO: 3152 - DNA, 619 bp, Glycine max
  Probeset Number=SeqID_12931
ataatattaatatattacgcttcgcaaagaaaacacgttatactttattagtccattacccgcctctgttctttctttctccattctccactaagaaacggaaattggaacacaacttttaactatgatgatggctgataatagcgataatacttcactaccgtcggaaaaaaccgaaagcacgtcgagactcgccacgctccactccgagatcatcgacgtgcacatcctcacacgactcgacggagccacgatgacatccgccacatgcgtatcgtacctcatgcaccgtcctctgcacactagacgatctctggcgctgattcagcaccgacacgtggccctcgctcctagaacccatcggtcgccaggtaattgtcggcatccccgagagaatacggtttcattgttttcggaggcgatcccgttcctgcaaaaattctcccttctggaggaaagggccgggtttgggagaaagggggggggctcccctctccgccgggggggattgggcttaaccaagggaaaacccgcgggttttccgtccggggttacccccggaaaaaaaaaaaaaaagtgggttttttccccccccccctgggagaaataaaggagaaaa

SEQ ID NO: 3153 - DNA, 683 bp, Glycine max
  Peptide Sequence Number=SeqID_6665
  Probeset Number=SeqID_12932
gattacgggataaaccttagcgccgcgagggcaacgcaacattcctacgaagatctgcatcaaacactgcttgtactctgaaaaatgcaaacgccagatgtaacgatacctaaagttgcacctaaaccgccgaggaaagtgaagcttcctacccccagagagctgaaatcacactatgactctaagggtatgcacacgcaagatgcgtcgatcacggacattgaggatcctctgaaagctctgattaaaggcatatcctcctggaaaggtatacacgactaggtatatgtactgtatccttctaggacaattgttgggaattatcccctaaactcccctgaatcttgacatcgaaggattggattccaaaggcctgctcacaggttgagacccttttagaaattggagtttagccacccgtggcctggcccctccaaagagaaattgggaggaaccccgccgcctccagattaattggccccctctttggtgcaaaaaatgagaactaatggaatacttctggcagttaaaatcgttcccccccaaaggcctataaaccaggaaactcaaaaaggcagggccacaaaatttttttttaatggaaaaggaaaaaacccctcacaatttttgtttaggcccaacctacagaaaaaaaaaaaaacagaacccggcccacacaaggg

SEQ ID NO: 3154 - DNA, 206 bp, Glycine max
  misc_feature (102)..(106): n is a, c, g, or t
  Probeset Number=SeqID_12933
ctgcagacaaattgagtgggattgtgagttcttggaggctgaaggaattatggattacagtcttttagttggccttcatttccgtgatgatgatacatatgnnnnngatgggattgtcaccatttcttttccgcaccggaatgtgggattcttatcagagtgaaaagttcatgcgtggttatcgctttcttgaagcagagctgcag

SEQ ID NO: 3155 - DNA, 2166 bp, Glycine max
  misc_feature (1)..(1): n is a, c, g, or t
  misc_feature (15)..(15): n is a, c, g, or t
  misc_feature (38)..(38): n is a, c, g, or t
  misc_feature (53)..(53): n is a, c, g, or t
  misc_feature (57)..(57): n is a, c, g, or t
  misc_feature (64)..(64): n is a, c, g, or t
  misc_feature (92)..(92): n is a, c, g, or t
  misc_feature (122)..(122): n is a, c, g, or t
  misc_feature (132)..(132): n is a, c, g, or t
  misc_feature (136)..(136): n is a, c, g, or t
  misc_feature (155)..(155): n is a, c, g, or t
  misc_feature (159)..(159): n is a, c, g, or t
  misc_feature (178)..(178): n is a, c, g, or t
  misc_feature (183)..(183): n is a, c, g, or t
  misc_feature (189)..(189): n is a, c, g, or t
  misc_feature (194)..(194): n is a, c, g, or t
  misc_feature (199)..(199): n is a, c, g, or t
  misc_feature (206)..(206): n is a, c, g, or t
  misc_feature (222)..(223): n is a, c, g, or t
  misc_feature (230)..(230): n is a, c, g, or t
  misc_feature (239)..(239): n is a, c, g, or t
  misc_feature (274)..(274): n is a, c, g, or t
  misc_feature (283)..(283): n is a, c, g, or t
  misc_feature (288)..(288): n is a, c, g, or t
  misc_feature (300)..(300): n is a, c, g, or t
  misc_feature (315)..(315): n is a, c, g, or t
  misc_feature (326)..(326): n is a, c, g, or t
  misc_feature (335)..(335): n is a, c, g, or t
  misc_feature (338)..(338): n is a, c, g, or t
  misc_feature (358)..(358): n is a, c, g, or t
  misc_feature (371)..(371): n is a, c, g, or t
  misc_feature (398)..(398): n is a, c, g, or t
  misc_feature (409)..(409): n is a, c, g, or t
  misc_feature (411)..(411): n is a, c, g, or t
  misc_feature (423)..(423): n is a, c, g, or t
  misc_feature (425)..(425): n is a, c, g, or t
  misc_feature (427)..(427): n is a, c, g, or t
  misc_feature (443)..(443): n is a, c, g, or t
  misc_feature (479)..(479): n is a, c, g, or t
  misc_feature (515)..(515): n is a, c, g, or t
  misc_feature (518)..(518): n is a, c, g, or t
  misc_feature (536)..(536): n is a, c, g, or t
  misc_feature (585)..(585): n is a, c, g, or t
  misc_feature (593)..(593): n is a, c, g, or t
  misc_feature (596)..(596): n is a, c, g, or t
  misc_feature (604)..(604): n is a, c, g, or t
  misc_feature (618)..(618): n is a, c, g, or t
  misc_feature (643)..(643): n is a, c, g, or t
  misc_feature (664)..(664): n is a, c, g, or t
  misc_feature (666)..(666): n is a, c, g, or t
  misc_feature (669)..(669): n is a, c, g, or t
  misc_feature (726)..(726): n is a, c, g, or t
  misc_feature (774)..(774): n is a, c, g, or t
  misc_feature (776)..(776): n is a, c, g, or t
  misc_feature (778)..(778): n is a, c, g, or t
  misc_feature (781)..(781): n is a, c, g, or t
  misc_feature (824)..(824): n is a, c, g, or t
  misc_feature (829)..(829): n is a, c, g, or t
  misc_feature (885)..(885): n is a, c, g, or t
  misc_feature (940)..(940): n is a, c, g, or t
  misc_feature (979)..(979): n is a, c, g, or t
  misc_feature (1109)..(1109): n is a, c, g, or t
  misc_feature (1111)..(1111): n is a, c, g, or t
  misc_feature (1204)..(1204): n is a, c, g, or t
  misc_feature (1230)..(1230): n is a, c, g, or t
  misc_feature (1269)..(1269): n is a, c, g, or t
  misc_feature (1292)..(1292): n is a, c, g, or t
  misc_feature (1376)..(1376): n is a, c, g, or t
  misc_feature (1467)..(1467): n is a, c, g, or t
  misc_feature (1491)..(1491): n is a, c, g, or t
  misc_feature (1509)..(1509): n is a, c, g, or t
  misc_feature (1519)..(1519): n is a, c, g, or t
  misc_feature (1609)..(1609): n is a, c, g, or t
  misc_feature (1917)..(1917): n is a, c, g, or t
  misc_feature (2008)..(2008): n is a, c, g, or t
  misc_feature (2129)..(2130): n is a, c, g, or t
  Peptide Sequence Number=SeqID_6666
  Probeset Number=SeqID_12934
ncagcctgctatgcngatgagtgcacagcttagtttanatatctaactgacgntcgnctcgatncagtcactgcgtcatcatcgtcgctgancgctacactgacttacgacgggtctgcgangacaaacgantcgncgcgtcgcacgacgctcgncgtncatgcggtcacgatactantctcntcatcnatacngtcancatcgtnaatacgagtcgatggnnagatgcntacagctanatctatcagcgtcgacggcgcacgactgctgatcnctacgaatnctgantgcgcaacgcancgcgtgcatctgagncgcagtgctangccagtacngtngcgcgatacagtcatggtgntgcactgtagtgntcacgagtctctgctgcgctgtatcgntagagcagacnangacgtcactgcncntngcacgagctggcgtcntacaccgacatcagcgcactacgtcgagcgacgatnacagtcatgagtcgacacggttgacgtagccagacngtntagtgtagtaatgtgatncgattgatggcgaccaagagtcatatagacgactacagtcgttgtggcnggggtttngtnatagtagntctgtgagggttgntgcgcgtcggaacgatgtgatgatntagtaatgatacagagaagtngnctnatataagacgacgcagaggacgtgtcgtgagcgcagtagagcgcgtatacagcctgnagactgacgagctatacacacgatcacgagccgtcgcgacacgcacancngncgngagtgcgcgcgctatcgtgagcgactgtataatataagcgtgntcgtntacatcgcactatgcgatgagtctcacgctcgacatactatgagttcgatcattangtcatatatctacatgcgtactcaagcaaataagcgtcgacgacgcgtcgcggangagatgcgatcacatcaccacacgcctgtacgcaagagntgctgcgtcgtcgcgagtgctcgcgcgcgcaacgcgcacgtgcacaatcatcggctatacgaacactatcgtgagtgaactaacgtacgacacactgatcgcggagtaaacatcggcaatacattatagnantatatgtcgcgtgcacatcgaaagatgcacgggtgctacgtcgcgtcgagcaccttgtcgaatatatgcgtctctgatcaagatcgcatatgntcagcattgcctgtacgatgggtagncgcgcgacgagtccgcaatacgcccatctacagcacacngatgacacactgtacaatccagncgcgcgagccatataagcgtccgatcttgagcgcatccgtgagataagttatgatctctcacagtgccgctctacatcggtacntacagcgtatacacagacgctggcgctgcgctctctccgaacatatactcgagcgtggcgacagcgcgcgcagccgcgcgcccacatcgcncggacgacgcctgctcacacgtancacacgaacaactcaatngaccacactnctgggagcgactactccatgagcggcactgctctgagagtctctctcattaagatatcacctaaccgctctagagagactcgctcacagngtcagtcgatgatctattcgtgttgctggactcacgagggggagcaccggccgtctgagtaacaaagtagatataacgaagatggacggatgaaatgtacatgatcatatcatcatgcacgatcacgcagagatagatcctgtataagacgagcaatgacaatacgagatgaagatatagtatcgtgaatgtgctcgagctgttgtatgtgcagcgctcgagcgcgcgctggtcgccgcgtacacatcgcgccctctcagcgctgcgctgacacgagatgtacagagcgtagctcgaatattaacganggagcgagagcacatagcctattgtatacacgctatcatataccagtataaaatcatatgtacgatagcatatagatgagctacataatancagcatactcatcactccatccgcctttcgagaggcgcgagaggaaacgacgagtgacagggtaaatcgcgaggcgagcaggagagcagaatcgaaggtagtgttcggggtatgttgtggnntataatgaaagtgagggttgatgaagaaggggaggg

SEQ ID NO: 3156 - DNA, 1983 bp, Glycine max
  misc_feature (1)..(1): n is a, c, g, or t
  misc_feature (10)..(10): n is a, c, g, or t
  misc_feature (17)..(17): n is a, c, g, or t
  misc_feature (41)..(41): n is a, c, g, or t
  misc_feature (58)..(59): n is a, c, g, or t
  misc_feature (65)..(65): n is a, c, g, or t
  misc_feature (76)..(76): n is a, c, g, or t
  misc_feature (82)..(82): n is a, c, g, or t
  misc_feature (99)..(99): n is a, c, g, or t
  misc_feature (120)..(120): n is a, c, g, or t
  misc_feature (138)..(138): n is a, c, g, or t
  misc_feature (157)..(157): n is a, c, g, or t
  misc_feature (200)..(200): n is a, c, g, or t
  misc_feature (248)..(249): n is a, c, g, or t
  misc_feature (253)..(253): n is a, c, g, or t
  misc_feature (263)..(263): n is a, c, g, or t
  misc_feature (301)..(301): n is a, c, g, or t
  misc_feature (306)..(306): n is a, c, g, or t
  misc_feature (324)..(324): n is a, c, g, or t
  misc_feature (331)..(331): n is a, c, g, or t
  misc_feature (382)..(382): n is a, c, g, or t
  misc_feature (413)..(413): n is a, c, g, or t
  misc_feature (444)..(444): n is a, c, g, or t
  misc_feature (459)..(459): n is a, c, g, or t
  misc_feature (464)..(464): n is a, c, g, or t
  misc_feature (493)..(493): n is a, c, g, or t
  misc_feature (572)..(572): n is a, c, g, or t
  misc_feature (609)..(609): n is a, c, g, or t
  misc_feature (675)..(675): n is a, c, g, or t
  misc_feature (710)..(710): n is a, c, g, or t
  misc_feature (712)..(712): n is a, c, g, or t
  misc_feature (743)..(743): n is a, c, g, or t
  misc_feature (906)..(906): n is a, c, g, or t
  misc_feature (929)..(929): n is a, c, g, or t
  misc_feature (988)..(988): n is a, c, g, or t
  misc_feature (992)..(992): n is a, c, g, or t
  misc_feature (1142)..(1142): n is a, c, g, or t
  misc_feature (1199)..(1199): n is a, c, g, or t
  misc_feature (1209)..(1209): n is a, c, g, or t
  misc_feature (1236)..(1236): n is a, c, g, or t
  misc_feature (1241)..(1241): n is a, c, g, or t
  misc_feature (1261)..(1261): n is a, c, g, or t
  misc_feature (1263)..(1263): n is a, c, g, or t
  misc_feature (1283)..(1283): n is a, c, g, or t
  misc_feature (1342)..(1342): n is a, c, g, or t
  misc_feature (1365)..(1365): n is a, c, g, or t
  misc_feature (1433)..(1433): n is a, c, g, or t
  misc_feature (1515)..(1515): n is a, c, g, or t
  misc_feature (1524)..(1524): n is a, c, g, or t
  misc_feature (1549)..(1549): n is a, c, g, or t
  misc_feature (1582)..(1582): n is a, c, g, or t
  misc_feature (1593)..(1593): n is a, c, g, or t
  misc_feature (1600)..(1600): n is a, c, g, or t
  misc_feature (1610)..(1610): n is a, c, g, or t
  misc_feature (1635)..(1635): n is a, c, g, or t
  misc_feature (1673)..(1673): n is a, c, g, or t
  misc_feature (1676)..(1676): n is a, c, g, or t
  misc_feature (1705)..(1706): n is a, c, g, or t
  misc_feature (1708)..(1708): n is a, c, g, or t
  misc_feature (1715)..(1715): n is a, c, g, or t
  misc_feature (1722)..(1722): n is a, c, g, or t
  misc_feature (1728)..(1728): n is a, c, g, or t
  misc_feature (1730)..(1730): n is a, c, g, or t
  misc_feature (1733)..(1733): n is a, c, g, or t
  misc_feature (1738)..(1738): n is a, c, g, or t
  misc_feature (1743)..(1744): n is a, c, g, or t
  misc_feature (1749)..(1749): n is a, c, g, or t
  misc_feature (1781)..(1781): n is a, c, g, or t
  misc_feature (1786)..(1790): n is a, c, g, or t
  misc_feature (1794)..(1797): n is a, c, g, or t
  misc_feature (1799)..(1801): n is a, c, g, or t
  misc_feature (1804)..(1804): n is a, c, g, or t
  misc_feature (1809)..(1812): n is a, c, g, or t
  misc_feature (1814)..(1814): n is a, c, g, or t
  misc_feature (1849)..(1849): n is a, c, g, or t
  misc_feature (1853)..(1853): n is a, c, g, or t
  misc_feature (1873)..(1873): n is a, c, g, or t
  misc_feature (1890)..(1890): n is a, c, g, or t
  misc_feature (1892)..(1892): n is a, c, g, or t
  misc_feature (1902)..(1902): n is a, c, g, or t
  misc_feature (1908)..(1908): n is a, c, g, or t
  misc_feature (1914)..(1914): n is a, c, g, or t
  misc_feature (1925)..(1925): n is a, c, g, or t
  misc_feature (1927)..(1928): n is a, c, g, or t
  misc_feature (1932)..(1935): n is a, c, g, or t
  misc_feature (1938)..(1938): n is a, c, g, or t
  misc_feature (1940)..(1941): n is a, c, g, or t
  misc_feature (1944)..(1947): n is a, c, g, or t
  misc_feature (1951)..(1952): n is a, c, g, or t
  misc_feature (1955)..(1958): n is a, c, g, or t
  misc_feature (1960)..(1961): n is a, c, g, or t
  misc_feature (1981)..(1983): n is a, c, g, or t
  Probeset Number=SeqID_12935
ngatattatnacgatgncgtacgcgtctgagatacgtcgtnttagttgtatgcatcanntcatancgatatatatnatatantacgacgagcgctatgncctcgagcgcgtatcactgtnatactgttcagactagcnggcgcgcgctgtactacantatactgatgactgacgtctgtgcgtatccgctgcgtctatantgtgcgtcggttgtctcgtatagatcgcgagcacgccttgtatgcatnnaaangctccttgtnagtgtgcgagtactacgtgtgctatcgccggaagacgntagcncggtctcagaccacgcgntacacgngagcatcataatacataacagtgaacaccgagagcgacgcgctgcggactnatcgcacgcgcacatatacagagcaacactncaccaccgcgtccgcgtatagttacattcanctctttcgtgttacntgtcntcgcttgcggcccaattaacgcggcgcgncgatatactactatcgcatcagcgctatagcgtcagcgcgagcgccggtgcgcgtgagaatagagacgatcggtagcanatgcggctggtggatgagtcgagcagacatacgtcanactactgtctagtcgcgttgactatgttgcgtgttacgtctcgtgaagatgcacgctcatagactnataagcatgtgtatgtcagtatgcagcatgtgagncnttgtggtgagtcatctaagactcactggtancgcagtatgagcggcaggagcagatgtgtgatgtgctgtgtgttgtgatcattatacgagtcagagatgacgagagacacactatacgtgctcatacgctggcgcgacaggatgatatcatacatcgtatatcctgtgacgctcagtgtcgactagccagctntatacggctcagtagtacgtagnctgctagtccgtctcgtcacgctctacacacgtggctgcgtcacgcgctagagcgtcgncagnagcgatcgctcgtagatgtgtatcggtccgtactcggctgacggtcatacatattcaatacactagcacgatgtactagtatgcacatcagcgtgtcgtcgcaagtgtagctgtgcgcgtgtatatctcatgaggtgtctcatggtcacntcctcatatatgctgatctctcgcgttgtgagacattagatatgagacgcagtagcngagtcagtanatgagcgaagtactagcatacgagcgngagangaagcagtacgctgcacgananttcgcgcatcacgcagcganctctattgaactgtgctgcgtacaacatcgtaatctacatgacggacaatatgtacatnacgcgttgcggagcatgtagtcnatatatacagcgccgttacttacaagtagcgtcatagtcgttcgatgacgtgtgcggcaccgcgcgtncgtgattatactacgtcgtatcagatcgcgtctgcttcaggtcgtcgacgagtaggtaggacgtgtgatgagtgaggcaganatatagatntacgacgtgcgcgcagcgggtgagnagcatgatggagtgcgtgatcaaagagcatagncgtcgcgtagnagcgtgntgcgatatgntgagctgtttgcagccgtgtgatcntgtgacagcagacccatcgctgcgcggtcgtcgcgttncgntgggagacacaaaaaaggccggcccgccnncnctcgtcntctttcntctctncnctnctctnttctnnctctncgatgtagtgaaggtacgctgcttcgcgcctnccccnnnnncgcnnnngnnngcngcgannnntngcgtctgtgtccctagctactagtactagtactcncacngattaggtcgacacgaaacncaatgcacgagtggcgnancgcgcagcantagagnagcgangcatagtgccnannaggnnnngangnnggnnnnaggnnggnnnngnngaaggggaaaaaaaaggggnnn

SEQ ID NO: 3157 - DNA, 674 bp, Glycine max
  misc_feature (1)..(1): n is a, c, g, or t
  misc_feature (209)..(209): n is a, c, g, or t
  misc_feature (243)..(243): n is a, c, g, or t
  misc_feature (302)..(302): n is a, c, g, or t
  misc_feature (602)..(674): n is a, c, g, or t
  Peptide Sequence Number=SeqID_6667
  Probeset Number=SeqID_12936
naagactctgtgaagtgtgcgtgagaaaggaacagagagaagaaaaagaaaaaagatggaaggagagaaagagaatcccgattgtaacgccactttggtgaactccttctgcgaaatcacttcctcttccaaagaagaagcccttttctttttggagagccacaatttcgacctagacgccgccgtttccactttcctcgacaacgccnacaaccctctcatccctcaaaacgacgacgtcgntgtcgccgcaaaccaaacccccactcccgttcccctccgtccggatctcactccccggnacttcaaccttttcaggtctccttttcgcgtctcggtcgcgaatcgaacgccctacgaaggtcggatcccggagggctcctcggaaagaaacccctccacaagccgccaagggaaaaatccgatctctcggggaatttcaaacgctccctccggggaggagaatcccgattcccgatcccaatttccaaaccgaagggtaaataacctgggggggaaaaaaaagggggaggtttggtccggcccccccccggggggaaaccgccacacccccaaaggggggggggaaattttttaaaaannnnnnnnnnnnnnnnnnnnnnnnnnnnnnnnnnnnnnnnnnnnnnnnnnnnnnnnnnnnnnnnnnnnnnnnn

SEQ ID NO: 3158 - DNA, 1825 bp, Glycine max
  misc_feature (26)..(26): n is a, c, g, or t
  misc_feature (79)..(79): n is a, c, g, or t
  misc_feature (84)..(84): n is a, c, g, or t
  misc_feature (109)..(109): n is a, c, g, or t
  misc_feature (133)..(133): n is a, c, g, or t
  misc_feature (230)..(230): n is a, c, g, or t
  misc_feature (389)..(389): n is a, c, g, or t
  misc_feature (1035)..(1035): n is a, c, g, or t
  misc_feature (1046)..(1046): n is a, c, g, or t
  misc_feature (1230)..(1230): n is a, c, g, or t
  misc_feature (1258)..(1258): n is a, c, g, or t
  misc_feature (1278)..(1278): n is a, c, g, or t
  misc_feature (1299)..(1299): n is a, c, g, or t
  misc_feature (1310)..(1310): n is a, c, g, or t
  misc_feature (1337)..(1337): n is a, c, g, or t
  misc_feature (1339)..(1339): n is a, c, g, or t
  misc_feature (1364)..(1364): n is a, c, g, or t
  misc_feature (1373)..(1373): n is a, c, g, or t
  misc_feature (1382)..(1382): n is a, c, g, or t
  misc_feature (1433)..(1433): n is a, c, g, or t
  misc_feature (1437)..(1437): n is a, c, g, or t
  misc_feature (1445)..(1445): n is a, c, g, or t
  misc_feature (1523)..(1523): n is a, c, g, or t
  misc_feature (1527)..(1527): n is a, c, g, or t
  misc_feature (1529)..(1529): n is a, c, g, or t
  misc_feature (1531)..(1531): n is a, c, g, or t
  misc_feature (1554)..(1554): n is a, c, g, or t
  misc_feature (1559)..(1559): n is a, c, g, or t
  misc_feature (1585)..(1585): n is a, c, g, or t
  misc_feature (1591)..(1591): n is a, c, g, or t
  misc_feature (1611)..(1611): n is a, c, g, or t
  misc_feature (1636)..(1636): n is a, c, g, or t
  misc_feature (1641)..(1641): n is a, c, g, or t
  misc_feature (1651)..(1651): n is a, c, g, or t
  misc_feature (1741)..(1741): n is a, c, g, or t
  misc_feature (1771)..(1771): n is a, c, g, or t
  misc_feature (1781)..(1781): n is a, c, g, or t
  misc_feature (1797)..(1797): n is a, c, g, or t
  misc_feature (1818)..(1818): n is a, c, g, or t
  misc_feature (1825)..(1825): n is a, c, g, or t
  Peptide Sequence Number=SeqID_6668
  Probeset Number=SeqID_12937
gatatgtttattcttctcatagtttntcatcttattgccctgtgtagccgtaagagtgatatgataggtggtcgatctntttcntgcttcgtgtcttacctttattacncgtttgcgtcttctcacatcatanatatacgcagacctagatcagatcactgctataatgtggagaactgctgcgttgctaccacactcgctcgaggagataggagagggaggcttcaccnagctgcgctagcgaactccagccctgtaccgcaactcgtcgcgcgtcaaatcctatacatgactattacataatcacaacatatcacattcaatactctatacatattgtttctcctatcgcgctgacgctgtagccacatgtacgtatagtgacgtcncacgcgtcgccgcgctctcgtgctctgaaccgacaacgtatggcggcacatgtgtcggcgcgcatcggatctactatcagtacgtcgttcgcgagcgcgcgacgtcttccagatcagacgtctggcgcatcggcgatatgttatagatattagatcaacaggcggtaggcgagaaaatgatatgtattgccgtcgactccgaaagtgatatgacacatggtcgcacattccgctgcgcgcgagctatcgcccgtgcgcgcgagccgcgcgccgcgttagaagtgtagcgatgagattatatccagactgacccgcaatagcgatgcattacaggcatctaatacaactaggacaaagagactacataagaagtcgcgcacacatcgtcgtgatgtcatgtgtgtgatgatccagtccgcacgcgtcgtattgtcactctcgactagcacggtagatgaataacgacttcatcacctatgcgtctatgaccactctgtctgttatcctgtcgtgtggtccgtcgcgtccgtcgatcacgcatcacgactccgatatgcgacgcgcactgctgctggtatcgtatcgatcttgcactctcagtgctcgcgtacgctcacgcacgaccctctgcgcgtcgagctctacnactcgatcgcnagaatccgcgcgcgatctatagcgatatttctcactgctcgtgactgcatcatccatatacgtgtattggaccactagctgagtatgaatgatgcatcgcatatcggtatccgacagagaactgcgacgacacacatgcgactacagtacgagagcattgacgcgcgagacgcatcacacacanccacgtatgcacgacacgcgtcaacacncgacacaccgcgttgatcgngatcgctgacgagtcgactgnacgtctagcgncatagctcgatgcgactgatctgcatnantgcgcagatgatgacgtatgctagncaacggagnatatgtcgngagtcagacgcgcggtcgcgcggcacacgagcgcatctgcgtatgactggntgcnctgaacgncgcactatgatatgatcggccgagcgatacgtatagcgtgcgcgactgtgtcgtacactacacgatcgcgcgtgacgnccanangnatgtagaaacgagcgagtcatanatatntatatcgatagtatatacagtatgcnatagantgcgagcgcgaggtgacgancacgcagtacgacaactacgactcngacgnacatgcgagngtggatgcgataatcgtcgtgatcatatacgaataaaaacgatcgaaagtcggcgcgatgcgactctatcgtaggagcgacgatatgaancgagtagatgcttgcgcgtgctctgattcncgtcgatagnatccaaactcatctgnatcgtatctgtgacgcgcgcnacagccn

SEQ ID NO: 3159 - DNA, 1078 bp, Glycine max
  Probeset Number=SeqID_12938
ttactgtatccatcccttttgtgctcatgtgggtctatgaatcgccaatgttcttggtatctaagaggaaatatcaagaggctaaggctattttggctaaaatatctaagatcaatggacatgtgccatcagattttgaattctctgaagaaaagcataatgtatatagcataacagcctctcagagaacctataacttcattgatcttatcagatataagtctcttcgcactaccactttccttggagctttcctgtgcttttccatatatttcaactattatggaaccatatttacgctcgcaagcgttcaagttgacacgtataagctcacagttattcttggaacagcagaatttatttcctacttgacatcaggctttatgactcataacctgactagaagattctcatttgccttctgttctggtgtttgttgcgtcgctaactttatattcgtccttttcccagtaccagagtcctgtgtagatgccgatgatacctggttaccaaatatatgctcaacttatcctatcaataataaatcgttttgcagtgtctatcatgctagccatgtcaggattatacatgaatgagctttatcccactccagtgagagcgcttggaccagctgtgactatctttatagggagacttggatcatttacagcaactattgctatagctatgtgcttagaatatgagataagcccaattttgttgtttgcaatagtgtctttcccagcaatacttgtttctatgatcatgaaggagaccaggggattgcctttgccagaatttattgaagaggaagatcctaatcatcctaatcatcagcgtacttcaaagaaaacaaggacaaaagcaaaaagcttgtatttaacatttaactaatggcaatacaagcaaaataggagaataggacatagctgacttgagtgcagaagtgtaattaattagtttttgtctaagtgataaatataaatatttttgttaattgaataataattgttaattttttacttgttttttaaaagcagtttttgtttagatttgtactggtaaataaccagatttt

SEQ ID NO: 3160 - DNA, 1469 bp, Glycine max
  misc_feature (35)..(35): n is a, c, g, or t
  misc_feature (49)..(49): n is a, c, g, or t
  misc_feature (193)..(193): n is a, c, g, or t
  misc_feature (201)..(201): n is a, c, g, or t
  misc_feature (732)..(732): n is a, c, g, or t
  misc_feature (903)..(903): n is a, c, g, or t
  misc_feature (988)..(988): n is a, c, g, or t
  misc_feature (1001)..(1001): n is a, c, g, or t
  misc_feature (1055)..(1055): n is a, c, g, or t
  misc_feature (1057)..(1057): n is a, c, g, or t
  misc_feature (1116)..(1116): n is a, c, g, or t
  misc_feature (1209)..(1209): n is a, c, g, or t
  misc_feature (1211)..(1211): n is a, c, g, or t
  misc_feature (1214)..(1214): n is a, c, g, or t
  misc_feature (1216)..(1217): n is a, c, g, or t
  misc_feature (1220)..(1220): n is a, c, g, or t
  misc_feature (1222)..(1222): n is a, c, g, or t
  misc_feature (1237)..(1237): n is a, c, g, or t
  misc_feature (1263)..(1266): n is a, c, g, or t
  misc_feature (1277)..(1277): n is a, c, g, or t
  misc_feature (1279)..(1279): n is a, c, g, or t
  misc_feature (1288)..(1288): n is a, c, g, or t
  misc_feature (1290)..(1290): n is a, c, g, or t
  misc_feature (1296)..(1302): n is a, c, g, or t
  misc_feature (1304)..(1304): n is a, c, g, or t
  misc_feature (1321)..(1321): n is a, c, g, or t
  misc_feature (1358)..(1358): n is a, c, g, or t
  misc_feature (1369)..(1369): n is a, c, g, or t
  misc_feature (1377)..(1377): n is a, c, g, or t
  misc_feature (1379)..(1380): n is a, c, g, or t
  misc_feature (1383)..(1383): n is a, c, g, or t
  misc_feature (1385)..(1385): n is a, c, g, or t
  misc_feature (1393)..(1395): n is a, c, g, or t
  misc_feature (1397)..(1397): n is a, c, g, or t
  misc_feature (1399)..(1399): n is a, c, g, or t
  misc_feature (1401)..(1401): n is a, c, g, or t
  misc_feature (1436)..(1436): n is a, c, g, or t
  misc_feature (1441)..(1442): n is a, c, g, or t
  misc_feature (1444)..(1444): n is a, c, g, or t
  misc_feature (1447)..(1448): n is a, c, g, or t
  misc_feature (1452)..(1454): n is a, c, g, or t
  misc_feature (1457)..(1458): n is a, c, g, or t
  misc_feature (1462)..(1463): n is a, c, g, or t
  Peptide Sequence Number=SeqID_6669
  Probeset Number=SeqID_12939
cggcgagactggggggatataggcgcaagacgcantgagcgccaagacngcatgcgcgtgcgaagtggcagtgagtagtgtagtcgtcgggacgtcggcctctcgtgcgttgcgtgtcgcatgtcggcgagctgtgaggtgtggcggtgcgtgtggcgccgtgctgtgtcgagattcacggtcttgttcttanctctcgcnactcgtcgtttggggtatcgcgataagcgatatactcatatatcatttcacactctcgcactcatgtctcatgcaccgctcagcgagtgagtgtggagtgggtgcgagtgggtgttgatactctatcgcgctgagactgcggcaggtaggatcgcgacacgagacgtagcatagggagagatagcgataacagacaacagcaggacatgatgaccgaggagagagcgtgcacgtgtacgagccgtgtgggtgggagcagtgcgcgtccgacaacacacctcaacccatctcacgcctagctctctgccacaccctagcgctggcaccgctatcccgacgctctacgtcgccagacgaaatgtggctccgcatgtcatccgcgcacacaacaccgctacgagctgtgggtagtgatgtgtgtggcagcacatgtgttcgctcatccggtcatattatatcataatctttcaccgcatcctcctcccactagtgatctgctatagtattttattttgtcttatgtatttgatntactctctcatctctcttgttctcttactttcgctttctgcacccgcttctcatgcctccccctgtcatctctcgttcactgactcatctccacaactctctctatatttacattagtacttatatagagattgtcgtatttgtgctatcgtcttgattatcttatattgngttattatttatatacatgtcatacctctacttcatcatctatccctcttgtctagcactctcacacacacacacaaaaaacaanacaccatcatccnccacacgacgtcgtcagagagggagagcctgtgcgacgtgcgtgcgtgcgttgngngatctattgtggtgtcgtgtcggggtggcgtgtgcagacatcacaagtcatgcgaggtncgatctgtgtggatagctaccggtccgggcatagtatcgcgtagggggtgcgagtgacgacgaatggatgcgcgggaaggcacgagagcggtngnagngnncgngncggcccccaccgcgntcgccgcgcgcgcgcgcggcgcgccnnnnccacgcccacncnccccgcgcncnccgcgnnnnnnngnccccgccgaccacaccnacacaccgcacgcacgcagaccgcagagagagagaanccacgccgacnacacaacncnnccncnccacgcannncncncncccccgccccgccaccgcgcccccccggggggcgnggcgnngnggnnggannnaanngccnnaaccaa

SEQ ID NO: 3161 - DNA, 642 bp, Glycine max
  misc_feature (642)..(642): n is a, c, g, or t
  Probeset Number=SeqID_12940
caaaagcaattaagcaaacactcgtaaaaaaaaaaaaagcatacgaaaacagcaaagttcgaatctctctccctctctatctcttataatggctctctcaaaatttctagggttcattctcctcgccgcttttttcgtttcgttcacggttgctcaatctcctgcaccagctccatctagcggaggaaggcggatctctccggcgcactcacctaagaaggcgatgtctcctgcaccagctgtttctcctactcctcaaaccgcattgactccagaatcttcctcctctcctccatcgccaccctccgcagattctccttcagatttgccggctttttctccctcttccatctccaactcgcctgctcaagctcccgctcccgtaagcggcaccgtttctaacaactacgcggtctttggatccgtcgcttttatgttaaccgctgccgttttggctatgtaggttctttgcatgaatttttagaataactaggtatttatttatttaaaatatttgcagagagtggcgattatttatttttcctttttattatttcggattactatttgtttctcatttttttgatctcacatgagtcacatacatattaatatatgagtttaccagatattattattgcn

SEQ ID NO: 3162 - DNA, 532 bp, Glycine max
  misc_feature (1)..(1): n is a, c, g, or t
  misc_feature (17)..(17): n is a, c, g, or t
  misc_feature (27)..(27): n is a, c, g, or t
  misc_feature (35)..(35): n is a, c, g, or t
  misc_feature (40)..(41): n is a, c, g, or t
  misc_feature (57)..(57): n is a, c, g, or t
  misc_feature (73)..(74): n is a, c, g, or t
  misc_feature (77)..(77): n is a, c, g, or t
  misc_feature (85)..(85): n is a, c, g, or t
  misc_feature (98)..(98): n is a, c, g, or t
  misc_feature (106)..(106): n is a, c, g, or t
  misc_feature (115)..(116): n is a, c, g, or t
  misc_feature (133)..(133): n is a, c, g, or t
  misc_feature (143)..(143): n is a, c, g, or t
  misc_feature (145)..(145): n is a, c, g, or t
  misc_feature (153)..(153): n is a, c, g, or t
  misc_feature (166)..(167): n is a, c, g, or t
  misc_feature (174)..(175): n is a, c, g, or t
  misc_feature (177)..(177): n is a, c, g, or t
  misc_feature (212)..(212): n is a, c, g, or t
  Peptide Sequence Number=SeqID_6670
  Probeset Number=SeqID_12941
ncagccgggggggcaanacaaggaggngggggacncaagnnggcccgagggcccganggagcccccgacaccnnggnccgagggnaagcaggagcccnacaacccncccagggcnnaggagtggacaacaggngacaaggacncngaggaaancggcgacgagggnnacgcccnncncaagaatttttttttttttgatgaagagaacatgntcaggttcaactatttcacccaccccccccgcagggcgttgcgtgttccgggctattaccagagttggcacattggcgtgagagctaagacgtcgaagaagttggttgctttcatcaggggcatccccgccaggatcagggctaatgaggagggtgtgacgatggccgaagacaatttcctgggtgtgcataagacgatcaggtccgagagacttggccctcgtatgatcccggcggcccccaggagcggtcatgtggagcagttttgggcagcgggcctatacggctgggggttggtcatcccgcgcgccgtggcgact

SEQ ID NO: 3163 - DNA, 460 bp, Glycine max
  Peptide Sequence Number=SeqID_6671
  Probeset Number=SeqID_12942
ggtgactcaatggaatctattgaagaaaacaatgtgaagggtcatttttcaaatttgtcagcagaaatgattttagattcaaattagcaatctagttccaattttggatctgaagtggtgtatgctgaaccagctttttttgttgcttttgcaaagtctgcaagcagaatcagaagtcagcaaaatgctttgtcaggggcgattttgcaaatctgtcctgcaaaacatttttaggcagcaattttgacacggattccaatattgaatgctcagtgttgtataatgaaaaattgtgtttcggtgtttttggggagcatgcaggcatataggatggaggcaagaaaatatgtttttagacttgctttggtggtaaggaaactaagaggtcaaaggaggttgtgcttcaaattaggcatcgttgggttgttcaaatcactttatttatgcccctacttttaag

SEQ ID NO: 3164 - DNA, 496 bp, Glycine max
  Probeset Number=SeqID_12943
ggaaacgttggccacatcttcttttgcaacttttccatcttcttcttgtcccttttccattctcccttcaagaagaactttcctttatcctcccaagactctccaatttcgtttaccctcctccaagcgtgatgatgctttcgattcatactccaaatataaaaacaagcgttcaattcttagtgatcgctgcctctctctttcccctctttccaaaaaattgtggggtcaggatgctgctatggggctggtgctgattgctgcgatcggcagaggatggaccacgggtttatggatggaatgcccctctgttcctgcagttggtaggtatatctaatcagggacggtgtatcatttcactttcacttgttctctcttcacgaattctcctaggagtctgatgctggtggctattacctgtaccgtgtgtggcctgcatacttcataggctatttattcgcatgcttacatctttgtgccttgttttatttgcggg

SEQ ID NO: 3165 - DNA, 1342 bp, Glycine max
  misc_feature (24)..(24): n is a, c, g, or t
  misc_feature (63)..(63): n is a, c, g, or t
  misc_feature (228)..(228): n is a, c, g, or t
  misc_feature (259)..(259): n is a, c, g, or t
  misc_feature (360)..(360): n is a, c, g, or t
  misc_feature (390)..(390): n is a, c, g, or t
  misc_feature (1253)..(1253): n is a, c, g, or t
  misc_feature (1297)..(1297): n is a, c, g, or t
  Peptide Sequence Number=SeqID_6672
  Probeset Number=SeqID_12944
catatattgatatatagactgtangtatattcgatcgtctgtcatatatagcgatgtggtagngcatagtcgtcgatgacgcgacgggtatgataaagtacagaaatgttgtgcataaaactgtatctacgcgtatagctacgcgcgtctttatagatcacagctagagtaatgagtgcgtgtgcgataacataatattatcaagacggttgaggtagtggcggagtnaacactctagtggaagtaacttatccattcncgcgtacacacgttcacatgtgctatagacgacagtatgacgtattgttgaactcttgtatgggtcgtcgcgtgcggcgcttatagagaggagaggtagantgcatgtacgtggcgtctgagagtgtcggntgggggttctatgctctattactcgctacagcagatgactctggcattccgaatatagtggcgtgtataatgagatagagtcccagtatatatagtattacacataaaaagaagatgcgtagagatgtatgacactagacgacagtcgtgatcgtacgtatatataggatattagaagggtgggtatagaatctacatctgataagagagagtgtagtgttgtgtcgacacacacacacgacttgatagtcatatttgtaaacataacactgtcgggtcggtagttgaatagatcttgtctcttatcgatagattacgcacacctatctatactaattgtggtgaggaggtggtcatatgtatgagacgaggcagatattcgtcatcagaatgctgggggagtaaagagacaacgaactacgggccgacgacagccaggtctcctcttctaccacctaggctcgatgattacatatatgacacgatctggcaagtgatatggtatgtggtgggatatatagtaaattttttattttattattaatatgatcgagcacatgtttgatattcttatttagtatatctatataaattaaaaatgagttagggaacaagacactctctacacagactacaagatttcgtctgtagtatacgtgtcgctgggcagcgccccggcgacgttctttctttttcatgctatatatacttgtatatctattaatattatttattagatatatattcatatatatcctatccaagcaagtggcggagacgagagcaacaacgaacgaagagcgacttgagtcgagatccgccgtgtgccgcgagagatatgatgtgtgtcgggcgcccacaanaaatacaaagggaaccaaaacagaagtaaaaagtcaaatataanaaacaaacaccactgccgaagaacacaaaaaaaagaaacaaaaaa

SEQ ID NO: 3166 - DNA, 431 bp, Glycine max
  Probeset Number=SeqID_12945
acagattctcgagctctaggacaagtcttgttgtgtatcgatctgtggtttgcgtagagttcccatcgaagatgaagagaatattcggtgcgaagaacaacaaagaacctccaccctccatccaagatgcctctgatcggatcaataaaagaggagagtctgtggaggataaggtgaagaggcttgacgctgagctctgcaagtacaaggaccagatcaaaaggacacgccctggtcctgctcaggaagctatcaaagctcgtgctatgcgagttctcaagcaaaagaaaatgtatgaaggacaacgtgacatgctttataatcagactttcaaccttgatcaagtttcttttgctgctgaaggactcaaagatgctcaacagactatgacagcgttgaagtctgctaacaaggagttgaaagggatgatg

SEQ ID NO: 3167 - DNA, 514 bp, Glycine max
  misc_feature (483)..(483): n is a, c, g, or t
  Peptide Sequence Number=SeqID_6673
  Probeset Number=SeqID_12946
gatgcgccttttttgttattgtagtccttcttgtttgcttttctttgccttttccatttctttttcttaactttgattggagtgttgacccagaattttcttggtctggttaacagtttctcaagtttgttcttttgggttctcctattagcttctgaaagtttccattttttcattttctagtctgagtttttgtggaattttcatttggggttaattcggtgtcttttgtgagttttttttttctacgacttatcaattctgtagtatatgaattttttttaaaaaaattgttttctggttttactattagtttattactgttgctgcttttgtaaaaaaaagtttattattattattattattattattattattattattattattattattattattatgttctatacagatctcttgtgattagggtggtcagaaacgctttattcctcactgaagtttggtaattgagtgtattancaaatgtccttccgcagtattgttcgtgatg

SEQ ID NO: 3168 - DNA, 1540 bp, Glycine max
  misc_feature (40)..(40): n is a, c, g, or t
  misc_feature (43)..(45): n is a, c, g, or t
  misc_feature (47)..(47): n is a, c, g, or t
  misc_feature (53)..(55): n is a, c, g, or t
  misc_feature (59)..(61): n is a, c, g, or t
  misc_feature (64)..(64): n is a, c, g, or t
  misc_feature (72)..(72): n is a, c, g, or t
  misc_feature (81)..(81): n is a, c, g, or t
  misc_feature (86)..(88): n is a, c, g, or t
  misc_feature (112)..(112): n is a, c, g, or t
  misc_feature (118)..(118): n is a, c, g, or t
  misc_feature (209)..(209): n is a, c, g, or t
  misc_feature (256)..(256): n is a, c, g, or t
  misc_feature (279)..(279): n is a, c, g, or t
  misc_feature (330)..(330): n is a, c, g, or t
  misc_feature (353)..(353): n is a, c, g, or t
  misc_feature (376)..(376): n is a, c, g, or t
  misc_feature (404)..(404): n is a, c, g, or t
  misc_feature (473)..(473): n is a, c, g, or t
  misc_feature (479)..(479): n is a, c, g, or t
  misc_feature (522)..(522): n is a, c, g, or t
  misc_feature (527)..(528): n is a, c, g, or t
  misc_feature (585)..(585): n is a, c, g, or t
  misc_feature (671)..(671): n is a, c, g, or t
  misc_feature (715)..(715): n is a, c, g, or t
  misc_feature (722)..(722): n is a, c, g, or t
  misc_feature (831)..(831): n is a, c, g, or t
  misc_feature (890)..(890): n is a, c, g, or t
  misc_feature (1003)..(1003): n is a, c, g, or t
  misc_feature (1242)..(1242): n is a, c, g, or t
  misc_feature (1281)..(1281): n is a, c, g, or t
  misc_feature (1290)..(1290): n is a, c, g, or t
  misc_feature (1310)..(1310): n is a, c, g, or t
  misc_feature (1315)..(1315): n is a, c, g, or t
  misc_feature (1363)..(1363): n is a, c, g, or t
  misc_feature (1438)..(1438): n is a, c, g, or t
  misc_feature (1540)..(1540): n is a, c, g, or t
  Probeset Number=SeqID_12947
ggagtgtgtgtgtatggtggacggtcgcccccccctcgtnttnnntntttctnnntttnnnttntcctctcncccccccgnccccnnngccgcgctcgctcataactatcgnctctcncttcttcatatgtatccgatatgtgtatgaggtatcgatgactgtcctccgtagtattctctatctcttcttcgcctcacactagagagtngtatagattatgtggtatgcagcgctgctcgcccgcgcccgccgccngctcgggcggctgcagacgcgcngacgccgcgcgacgtcgctcctgtgctctgtctcacatcctctatatagtngaagcacacaacacgacgctgtnacgcgtacagtctacatatgaanaatatgtagtgagactgtgatagcagangataatgtagtggtatagatggtgctgcatcgtccatctcccctccatcactcgctagtatgtactcantagctngttgtgtgtatatattctcctcacatcgtttcgtgggaggggntcgcnngcgggtggggctagcggcggtctgcgctagagtgttggatagatgagcacagtcaangatacgacacgctcaccataactacagccgtcacactctgctctctgccgtatgtatctgcagtcgtcagatggtgatatcatcantacataactcatagcatattcgtggattgtctgctatcgctcancactggntcgctagtgtcgtgtgctacttggtgctcgcgccgacatccaccaccacgcctcatctataacatacatcgtcgtattgagcactggctagttgcttatccaatcagantgtattagtctgatctacctccagctcgcatatcgaagttatcgtacgagatagcacanatgatagaataggcttacgctatactcgtagatgagccgcgtcgtcgctctacgcgcatcccgcgacgtgtatgtgtgttgtctgtatgtgtggtgtggtgtgggcgtcgtgntgtgtcgcgtctcgtcgtatgtcgttcgcgcgtacgctcgtcattacatagagcgtgcgcggatactactgtatgtagccagtcctagcgagcgataacatgagttggatatgaggcatgagcgcgatcctatatgctgtccacccccacagcgtcgcgaccaccctacacctgctcttcatgctcgcagaggagaggacgccgcacactgagcgtgtctgaggcacgtagctccactntcacatccgatcctatatgctgtcgtcactgctagtganttatatgtntatatcactgatatgttgangatanaatattgtgctatctacgacgcatggatgcacagcatgattgatgcgntatcaccagtgatctcatgcgtcacgaagctagtgtaagcagatatatagcaggcgcgtctgtgctatggatcantgtacactcactcgctctgtccgctagtcgcaggggcgccgcgcgcgtcctctatcgtctcacagttgctgataatacgtcccagaactccttacccacacn

SEQ ID NO: 3169 - DNA, 443 bp, Glycine max
  misc_feature (24)..(24): n is a, c, g, or t
  misc_feature (38)..(38): n is a, c, g, or t
  misc_feature (94)..(95): n is a, c, g, or t
  misc_feature (98)..(98): n is a, c, g, or t
  misc_feature (140)..(141): n is a, c, g, or t
  misc_feature (145)..(145): n is a, c, g, or t
  misc_feature (148)..(148): n is a, c, g, or t
  misc_feature (159)..(160): n is a, c, g, or t
  misc_feature (221)..(221): n is a, c, g, or t
  misc_feature (251)..(251): n is a, c, g, or t
  misc_feature (260)..(260): n is a, c, g, or t
  misc_feature (322)..(322): n is a, c, g, or t
  Peptide Sequence Number=SeqID_6674
  Probeset Number=SeqID_12948
atagcagaggccaggttgtctgcnagcgtttgttgtcnaaccctcatcatgagccttaggattgtatcgagttgttgttttcgacagctgtctnnganagcattgaaggtgaaactattgccctgccaaattagactgannagtngcnttcctgtgtcnngagctttagtggacgtttcaccccttcggacagcaaccactaaccttcaaccctgtcggtncaaatcgaagaaaagtcgaaagaaggaccnaaagggacnagatgaggaggaggaagaggatgatgatgaaaaagacgaagttgatgaacatgaggatggancattaccaggagagaaagaaagggtcctaaaagtcggtcaagttagaacagataaagttttgaagttagcaactcattcggctaggatggttgacgaggcatttcttgaaggaagactcta

SEQ ID NO: 3170 - DNA, 2700 bp, Glycine max
  misc_feature (2700)..(2700): n is a, c, g, or t
  Probeset Number=SeqID_12949
ctcggaattcggctcgagcgcttctctcaccatccccatttcgcgttggtgcaaagcatccttcgtttcaatttctctctctcagcgctttctgcaatcgaacctttcatctccaaagggatccacaggccgaaggagaaatggggctgacattcacaacgcttttcagacggctcttcgcgaagaaggaaatgcgaattctgatgggtggcctagctgcccacgcgtccggtggcctaagaagccttactctctttttctcatcagcatcatcatggaaccaaaagaaagaaagtaaaataagtattagtactaatataaatcccacaaaacaaagaaaattataaatccttcaaaaggggaaaggtagctagaggaaaagtaactccacacaacacatcacagcctaagagaattggattctaagctctagagagagagagagagagagagagagagagagaagaaagaatcatgtggtgctggaaaggagacggaggctagaagaagaagaaaaaaagaagagctagagagagggtaccctcttgttaatttgcactgtttttgtgtctgttgctgcacttttaggagttcttctattctaacaacctctgccaaccaacaaaacaagcctgaaaataaaatagagatgctgcctccttgctggcgatcgttcgggaagaaacagtaatgctactgacatgggaaagaaggggagttggttttctgcaatcaaaagagttttcacacaccactccaaagggaaggattcagataataacaaaggcacaaaagagaagaagaaaagtctaggaaaactaaagcatggagagaccaattcattcatccccctcttcagagagccaagcagcattgagaaaatcttcggggacttcgaaagggagcaacaattactggggttaaggcctgccactcctccggagagacctaaaacaccaccttatgtccctccaagagctccttctcctagacctccctctccgagggctccttctccaaggcctccgtctccaagggctgcttctccgagggtggcttctccacgagttacctctcccaaagccgcgtcttcccggattgctcatcaccacaaggaggttggctacagaccagagccaactttgaggcaacagcatgccacagctactaagatccagtctgtttacagaggctatatggccaggaggagttttagagctctaaagggtctggtgaggcttcaaggagtggtaagaggacagaatgtgaagaggcagacagtgaatgccatgaaacacatgcagctgttagtgcgagttcaatgtcagattcagtctcgaaggatccagatgttggaaaaccaggcacgatatcaagctgatttcaagaatgataaggatgcagccagtatcttgggcaaactcacttctgaagcaggaaatgaagagtgggatgatagcttactgaccaaagaggaagtagaggcaagattgcagaggaaggtggaagcaatcatcaaaagagaaagagcaatggcatttgcatattcacatcagctatggaaagccactccaaaatcaactcacaccccagtgacggatacacgatcaggtggattcccttggtggtggaactggttggaaagacaaacaccagcagcaactccacaagaaagacaaagcttgaagaattttcaaatcacacctccaagaccatactcagagcaaaagactagtccaagacctggctccagcactcaaaggcagccgcagcagcagcagcctcattttgcctttgataacatggacactcccacaccaaagtccacaaaatcaaccatagtggcatcttcaaaaccggtgcgaatgcctccatttagaactcctcaggctaacagctcaggctcaggctctaaatatccgagaccaagggatgtagggtccaattcaccctttgatttgccattgaaggatgatgacagcctcacaagctgcccaccattttcagtgccaaactacatggctccaaccctttcagcccgggccaaagtacgtgctagtagtaatcctagagaaaggcttggtggaactccaactagtactgattcaaagaggaggctctcattccctttatcacaaggaattggatcattcaagtggtctaaagggttctcaagcaaggatcaaagggtcccagataaatttcagtcacttgaatctataggaaacgtgagtgtggattcaacggtgtctttgcccgcaagggtggtgggaagaaagccttttacaagatttgtgtgatttattttgttttattcttttttttaaccattttattttgtcaatgctggtggtgttatcagttacattatgattatgatttcagtgtattggtgatagtttgatgacaggtatacccgttgtaaactaataaaaacaaaataggaaatgatggtttggtaacttcaaaaaaaaaaaaaaaaaaaaaccttcgattggacttagagctttcttttcctggttttgattcctatagacagtgtcttaaaagcatcggctaagagatctttacatagaaagtcacttttttaagggttgcattgaaaataatgggaacgtatatggttattctttctaatcaaatccttgtcattcatgtttttggggtacaaaaaaaaaaaaaactaaaaaaaaccccccn

SEQ ID NO: 3171 - DNA, 1441 bp, Glycine max
  misc_feature (22)..(23): n is a, c, g, or t
  misc_feature (88)..(89): n is a, c, g, or t
  misc_feature (94)..(94): n is a, c, g, or t
  misc_feature (97)..(97): n is a, c, g, or t
  misc_feature (101)..(101): n is a, c, g, or t
  misc_feature (247)..(247): n is a, c, g, or t
  misc_feature (869)..(869): n is a, c, g, or t
  misc_feature (1008)..(1008): n is a, c, g, or t
  misc_feature (1433)..(1433): n is a, c, g, or t
  Peptide Sequence Number=SeqID_6675
  Probeset Number=SeqID_12950
gtgggtgcccacctcaatactnncgttgggtggtgttgtcccgttccccactcctcctcttcccctccgcacccgccccgcccggcgnnccccnctngtgngtgtgcgacgggcggcgcgatcctctttacccgtgcagatatttccagcacggacattggctacggagatagaggtgtcagtctcttccacctctttcctcctagtggatttttcctttgcgtgtgtgtatccccctcccttctcntgtattattaattttctactctagaacgcgctacgtgctttatttatctttctccgcttctcccttattttttctagcacgtgctgacgggcgccgctagtgactattcagacattttcctccctcctctcctccccaccgtctatagagatttatagtatttacagcggctatatacgaccatacgccgccccctccaccctaccaaacgctcaacacgacccccaaagtccgaggagcagcggacgggagaatacggtagcgaccacctcccccacccaatcgaatacgagattaccgtgtacgcgagtgctgagacgattctcatgggacgttgtgacgtgcgggtcaattctccgattctagtcgaccgccacctgccgcccccgcgcctgcacggcccccgctatcgcgctcgcgaccaccgtcgggagacacacgcacccttagctccaacgctctgtaggtgttgcattatagtcacgtcgttcctcgctcgtcccttacgtccccgcgcacacccgccgtccccgcgagtgcgttaaatcagctaaaccacgccccctacatccctccttggtaggaggatgagtgagttattgatacaccaaccaacgacacnccgccccccacacagtctgaatacgaggctgcttggctcacatttccccactgctcccccctcctccacctattcacccacaaccccttcccacaccgccgggatcatgtaaacagcatatccagacaccgctcgacangtgtacgcaacgaactaaccatacactatttatgttatttacttttctctacactattgatgtggcgggcacataaaacaacatcacacaacgtggtcggtgctatgtcgtgcccgtgcatctatcactttctgtggtgtacgacaaagcgggttgtctcatagtaacaattctcccacgcaccgcccccgcccctcactcgcatttccgtactaagatgaaacccgccctcatcacactacccgccacatccgctcgcgcgcagcagacatattagtgtatggacggggttgtcacgcgcccgttggctcgcctctcaccgactctattaacttataacctcccgctctcttctcacgtcaatgcgctccgccccacaccacgctattccacacccacgcgcaagctcctatgtcgccactatnacgtttag

SEQ ID NO: 3172 - DNA, 839 bp, Glycine max
  misc_feature (839)..(839): n is a, c, g, or t
  Probeset Number=SeqID_12951
atcagtcgatcagccagtcagccaatcatccatccatccggagaagaagaagagtctactgtgctgtgggatcgacactagcgtagcgtacgcgatggggaagaacggcaacctgtgctgcttctctctgctgctgctgcttctcgccggatttgcgtccggccatcaagttctctttcaggggttcaactgggagtcgtggaagcagagcggcgggtggtacaacatgatgatgggcaaggtcgacgacatcgccgccgccggagtcacccacgtctggctgcctccgccgtcgcactccgtctccacccaagggtacatgcctggccggctctacgacatcgacgcgtccgagtacgggaacgcggcggaggtcaacacgctcatctcagcgctccgcgggccgggaggccaagggggggtcgcagggctcatcgcccgaacctgccggcgactaccaccacggcccgcggcccccgactggcatcctgggagggggggcaacggggggaagggcccggcctattactggcgggccgccaaggtccacctccccagccgacccagaccccccaacgggggggcccccccccaatggaaatttggcgcccggaaagaaaacccaccccaaactctcccaaggggtacccgggcaaatctctggaaaccggggggcggagaaattttccgcccccggggggcccgaaatctgaaccccccctttaagaggaccggcgtcccgcggtgggggagttacggggggaggggcctccccggggataaaaaaagaaaccctggattttcgaagaggggggcgtcttttgtcttccccccggggn

SEQ ID NO: 3173 - DNA, 826 bp, Glycine max
  misc_feature (779)..(779): n is a, c, g, or t
  Peptide Sequence Number=SeqID_6676
  Probeset Number=SeqID_12952
gcatgcctgcagtattttttctacactaatcttttgcaatatctaaatcaccacacatcgtacattgaagaaaagcctgcatgtaagaagattatcttaaaagttttgaaagtgatatataggtatttgtcatcaacaatgatgttgatgataaggacacaattagctggctaactgaaacttacgctttatacctaccaaacatatatcactcatgttagtgatactagttgcatttcgcgtatactatgtcgtagatctattaattaactacctctaaaacaaacctattatacaaagtccacataggaataaaataagtaaattttaaacctgtatatctacaacattggttattaatcatcttaaagctagaaggtcacatatgttaacaaaaaaatctcatgtgtcattctcttcttccaacataaaagagtgtgtctcaattggttgttttaaatcttagttcacgttggatctacgtatctctcttaaaaaaaaaatccataactacaccaatgcctttttaccctcatcattctttgtccctatgttcacgagagaaaaacaaaagatgtctaccgctttaaaatgataacgttcaccctcatcatcctttgtccctattcccacgagagagacatgaagactccctgagctttacagtgataacatttttactcatactgtagctcaaaataagcagcctaaagaaaacaagaagaaatgattaaggaattctttattctccagcaagcgataaggcattcttgactctncacatgaggtttaatttgcaggcatcttaagcatggtcatgtgtaaa

SEQ ID NO: 3174 - DNA, 549 bp, Glycine max
  misc_feature (42)..(42): n is a, c, g, or t
  misc_feature (100)..(101): n is a, c, g, or t
  Probeset Number=SeqID_12953
tttcaaaaataattatttctgggtgttctgctttccctgacncgggggcttgttgaccccgaataaaaaaggctttttttcggagctttgtttccctttnngggggcccccgttgttttaataaagtgaacgtgtttgtggccaaagagggggggcaaccggttcatggccttaatcccgggttgtagttttgtttcccttttcatgggggggagttagggccacacttccccccaatgtttggggtggaaaaaaatgacgcgttgaacttcatcgaaaaaatttttgacgagagattttgatgcaaaatttgtttatcgccgttgccaattccccctgtggggcaattcgaggggtggggcaactatatgggaaagggcaaactggggggggggtcctatttttaaattacgagcagcctgggggaaaaggggagttttttttcaaacgcgattttagttgggtaacgacatggttttctccagtcgcgaaagttttaaaccgcgcgggcagtaggcggttcgtaatacggattcttatcaggccgaa

SEQ ID NO: 3175 - DNA, 1323 bp, Glycine max
  misc_feature (1323)..(1323): n is a, c, g, or t
  Peptide Sequence Number=SeqID_6677
  Probeset Number=SeqID_12954
aatcacttaattaaatcgagaagtgtactatgaggagaccatctgccatcaacactaaggtccaagacgacatctatgccttttccagcactgcaccagattccagtaacactaacttggatgaaggatcctccccttaccctttatacgacaacaatctttctgattcagactccttctcagacaactccaagaagatccgtaagaagcgtaacacctatcaaaagatctctgacgacatccgtgtagatcttcttgaatctgtcaagaatggagaaacacttaaagcagctgctaagcgccacagaatcaattattcttctgctaaatctattctccatacctaccgaaaggaaggtagaatcctgaagaagtccgctcaagaaagaagtatcaagaagaaggttgtgtctactccagaaaaggtcccaagatcagctagaaaggaaaacgaacactcaacttacggcactcgtaaggctgttcaatctttagctcccttggcagaaaggaaaaagttccaaactgacaatcatcaatatgatgaagaagtcagcccaatgaaacctgtcaaggaacttaattctaactatgccaatatgatgaagatggaacaccccgaaaacaatatcaaggcctcagtcgaagctcctaagccactcaaggaaatgactgtgatgactgagacatcaggaatgaactatcctggccatgttgagggtatgcaccctaaccacatggtttatagacaagaaacacctaaacaaaaagaaggcaaactttttgaaaacttcttcatgaattattctgattctcatgttaatgaggctggatatggtcagacatacactgaaggtcctgagtgtaccaattatatgtatttcccccgtgaatttgattctttcaatgacatggtcacctcgttacaaggaaattcatcccacgttgatgatcttactcaagaggaattaatatgcctgtcggaacagacgatagacatatcaagatggaacatggaatgaattatgatgagagcgcagaaaactatctaaactgtcccttgaagggtttaatggataatcaaggcatgtttagacaagctctgagaaaatcatctttctttagttacaacggaaattctgctggcttaagaaagagctctatggatttcttttaatctgttataaataaatgctaatagcgattaaccttttgcaaactcattttattaagatcaaacttttttctgtgttgctatatatttttttactctcactaactaccaacttattattcttgttgatgttgaaatttaatactttn

SEQ ID NO: 3176 - DNA, 1543 bp, Glycine max
  misc_feature (13)..(13): n is a, c, g, or t
  misc_feature (17)..(17): n is a, c, g, or t
  misc_feature (30)..(30): n is a, c, g, or t
  misc_feature (44)..(44): n is a, c, g, or t
  misc_feature (47)..(47): n is a, c, g, or t
  misc_feature (51)..(51): n is a, c, g, or t
  misc_feature (120)..(122): n is a, c, g, or t
  misc_feature (167)..(167): n is a, c, g, or t
  misc_feature (224)..(224): n is a, c, g, or t
  misc_feature (414)..(414): n is a, c, g, or t
  misc_feature (455)..(455): n is a, c, g, or t
  misc_feature (694)..(694): n is a, c, g, or t
  misc_feature (1331)..(1331): n is a, c, g, or t
  misc_feature (1377)..(1377): n is a, c, g, or t
  misc_feature (1416)..(1416): n is a, c, g, or t
  misc_feature (1462)..(1462): n is a, c, g, or t
  misc_feature (1496)..(1496): n is a, c, g, or t
  misc_feature (1543)..(1543): n is a, c, g, or t
  Peptide Sequence Number=SeqID_6678
  Probeset Number=SeqID_12955
tgggtggggttgngggnctttttgggcctnctttctcaccctcncgncctnccccacccgcgctgtggccctacgaatccggcgcggagcgtgtagcggcacactgatgttgtctgttannnaaaaacacctgtattatactcgctcataaacgcgggcggagaaanagagacatcaaatgttgcgtcggttttattatagttgctgttgtggtgggtgggtgnaacgatagagaagaaagacaacgctacgacgagcaacacctcgtcatgagtcgtaacaatgggacgctcgctagatcgatggatcacgcccaccccctactttcccccgtgccccgtatccccgcaccaccataacgcccaacccacgtataacactcccgctaatggcacgctaggatgtggtgggganggtggtggcgcgcagtcctgagcattgcgggtgtgttattntgtgtcgggcgtagtttgtgccccctcagtgtgatctacatttacaatccacacgctgcatagtgacacgcccgaactactcctgtcacgtcgccatcacaccgttctcgtccgtggctccccttctcctttggctgtcgtgtgttctcggtcctgagaatgcccaggtttttgttgacgagagcgcgttgggagccgtggggatcaggcgaggtggaggtcgtggctgcggtgggtantgacagacgacgcgcgcgcacacagttatacgccaacgtcattaaatagatgcgaatacctctatagtccactctccgtgttctgtttatatatttcattatctcctaagtccggtgcccactccagccatagtgtttaggctgatgctgtgaagtgggcggtggctggtgtgacacgtagcagttcaattaccaccgcctaatacgtaccgcttctgtcatgtcttctcgacacactacgcgttgcagcgcgtaccgtgttgggtagtgtggaaggaggtcgcgagacacggacagcggcagacaaatagccacgatatcgacgagagtgagtcgatttattcgttaatgtgaggtagacgatgtgagtggtaagggaagggccgcacgcaatatgaaactgttcagcgatcgctgtcacatcatacatacacaccctcggagtgctacgaattgttatctaactcacacccactcatagtagctcacatccgatgttcattcagtcgcactcgcgcacgacggtgcgtgcacgactgcgattgcatgtgtagcgcgcccgggcgcgcggagaacgacgcacgatgacctgtagtgacgccgcgcattagcttcatatgtactttcaggtgacgcncctctgtgtgtactgcgacgataatctgcgtcatcgcgtacaagancagtgcggaacatagccgctaccgactcgcagatatgantagtgctgacggataggtgacagctcgctctctctagttagcgagncgtatgagatatgagacgatataatagacatgangttaatatatcacggctctgcgacgagcatagacggactcaactgan

SEQ ID NO: 3177 - DNA, 280 bp, Glycine max
  Probeset Number=SeqID_12956
aggaattgcggccctccgtttaccacccccaaacccaccaacaagttctacttcttctacggccaccgcaacccctcccagaaccgccccaccgtccgcggcggcctcttctccaaccgacaaaccctaaaccctaacccttcccaacccaaacccaccaccaaacccttcaacatcaaaaactgggaccctcacttcctatacaacccaaactcaaacccctccccatcaaccctctcctccgcctccctacgcctctccccgatcgcgaacttcatcg

SEQ ID NO: 3178 - DNA, 566 bp, Glycine max
  Peptide Sequence Number=SeqID_6679
  Probeset Number=SeqID_12957
aaaagtaatctcaattcgttttgttttttttcgttctcgcctgtctgcctgccctaagccgagaaaccaaaaatcggcgccatgacgaagagcaggaacaagaagaagagagacgacgacaccgtttctatggacgtttccgaaactaagagcgtcgtctctgaatctgctccccaagccatggacacttcggagaccggagacgccaaactcgctgctcgtaatcgtaacctgacaagcgcgaagaaaggaaaacctatgaagagaacgaagaatgcaagaaaggtgaaagctgtggctaaagctatagcaaagaacgacaagtatgaagagaaagcttccaagaacgtttccaaaaaacagagaactctttccgccaagaaattgtatgaatgattttgttctcaactcaaagcgaaaagttttttaaggttaaaggtttcgtagtctatttttgttcttgtgcttatcttagcaaaagaatctctacaagtttgtacttctcctttttagtttcagaattttttgatatttacggatattatcatatgggaatatttgttacc

SEQ ID NO: 3179 - DNA, 1819 bp, Glycine max
  misc_feature (12)..(12): n is a, c, g, or t
  misc_feature (19)..(21): n is a, c, g, or t
  misc_feature (24)..(24): n is a, c, g, or t
  misc_feature (26)..(27): n is a, c, g, or t
  misc_feature (101)..(101): n is a, c, g, or t
  misc_feature (192)..(192): n is a, c, g, or t
  misc_feature (219)..(219): n is a, c, g, or t
  misc_feature (255)..(255): n is a, c, g, or t
  misc_feature (282)..(282): n is a, c, g, or t
  misc_feature (352)..(352): n is a, c, g, or t
  misc_feature (410)..(410): n is a, c, g, or t
  misc_feature (513)..(513): n is a, c, g, or t
  misc_feature (1116)..(1116): n is a, c, g, or t
  misc_feature (1120)..(1120): n is a, c, g, or t
  misc_feature (1382)..(1382): n is a, c, g, or t
  misc_feature (1642)..(1643): n is a, c, g, or t
  misc_feature (1647)..(1647): n is a, c, g, or t
  Peptide Sequence Number=SeqID_6680
  Probeset Number=SeqID_12958
tttttaattatntaatttnnnatntnntttgaattaaaaaaatatataataatattaattaaaaaattatttatattcattatattataatattctaaaantaacaaattacttataaatgaccttttcaaactattttaacatcgcctccgccccttcttattcaaacaccttctaattctcatactcccnactgttctctttatctgcctatttaanttctacgaggatacataaatatatgtcatatatatntaaatcataataactacataaatatanccctctcaaacaaccaagataactacgtgacataactcctctcctaacgatcatcaacacaaaactatantaaaagttaacgatagacagatacatgcagagatattagagatataaaaaataaatanaagtaaaaaccaaaactaacaacatcccaacttccctttatttctacctattttttctccctctcctttctctcgtctacaacccaaaacactatattcctantataaatatcattttacactatactaaataggtataattattcctcccctctctctctctcctgcctctctcctctccttttctcctctctttcttctttgtctctattcctcttcttgttttctctttctccttatatattattactcccacttcgataatcattgtatctacactaaacttataatctcttacatatcttcactccacaattcatatccatccgtctactattttgtttatctcttttatcaatacattcccacaaacctatcaacactttctccataaactattactcacaactcccataaacatctcatctcttttaataaacctatctccataatctatatatcctcattaacccaacccatatatatatctcacaaacatataacatttatctaccacacattcactccatacaccctacacatatataccctatttttccacctctccacaccatgatctactcaccctcccctcacccatcacatctctcttcatcctaacttctttcatctctataacgcctaatttcacttcaccaatatcacctaactctcttatactctccacccaccacatacatcgctnctcntcctaacatctatccacatctcatataaatcagaatacataaacacatctatccatcacttaacaaatctatctacacacacaccactaaacatattttaatattatatctcaataccttcacactattataaacttactcccaactactctctcaactatataccaacacctaccactactcacaacatcactctactctccaactcactccttactcctcccactccgcgccctcacctctctctcataatgacatactnactcacatcacaaacaaacacactataagaacaacaaatacacaccacatcatatcacactgctcacccctctacccccccacgcctccacctccaattcacttcacacaattctgtcgcttactctatctttcatcctctattcactactgtctcgcgccgtccctctcccctcttctctctatcttcgctactcccacacaccacccttctctcttctaagaaacctacttcctccacaccatacgctctctattctnnctanctcgttcatagcgcaacaacgtgatcgttagttttaggtacaccgtcttatcacgacgccatcatcgttcagtaccgcatactctctccgcacattttcttcttttctgtccttacaaaactcagtctcctcctatcccttctaccgctccacatacaaacatctactctct

SEQ ID NO: 3180 - DNA, 422 bp, Glycine max
  misc_feature (24)..(24): n is a, c, g, or t
  misc_feature (337)..(337): n is a, c, g, or t
  misc_feature (342)..(342): n is a, c, g, or t
  misc_feature (346)..(346): n is a, c, g, or t
  Probeset Number=SeqID_12959
atattcaccggatgggcgatgccngttcaagtattcagcatatgaaagtgggttaggtgtcaaaactgttggttggtcaccatgtgggcagtttttagcagtgggcagctatgatcaatcagtgcgaatattgaaccatttgacatggaaaacctttgccgagttcactcatgcagcctcgattcgaagtccctataatgctgctgtatttaaggaagtggatgacccatttcagcttgatatgtcagagttatgtctaagcgaaggcttgtctcgtaacatgcgagacaatggcactgaaaatggctcagaagtaggttctagagtaaaatatgcngtganggangttccaatcaccgtgccagcacagaaaccagctagtgacaagcccaaccccaaacaaggaatcggtatgctgtcgt

SEQ ID NO: 3181 - DNA, 1422 bp, Glycine max
  misc_feature (17)..(17): n is a, c, g, or t
  misc_feature (24)..(24): n is a, c, g, or t
  misc_feature (111)..(111): n is a, c, g, or t
  misc_feature (916)..(916): n is a, c, g, or t
  misc_feature (1079)..(1079): n is a, c, g, or t
  misc_feature (1256)..(1256): n is a, c, g, or t
  misc_feature (1285)..(1285): n is a, c, g, or t
  misc_feature (1331)..(1331): n is a, c, g, or t
  misc_feature (1342)..(1342): n is a, c, g, or t
  misc_feature (1373)..(1373): n is a, c, g, or t
  misc_feature (1422)..(1422): n is a, c, g, or t
  Peptide Sequence Number=SeqID_6681
  Probeset Number=SeqID_12960
tgtgccgggccccgctnggagggntggtgtgttgttcgggtggtcgtgtgtgtgcctgtgttccccattgtgcctacaaccatcctgtcaagcctcaccacgtcgtgctgngaagggagcgggctctaagcaaactaggtgctaatacctcctcgctggactggggaggataactttctatagcgtagttaccactatagacgtatgtaaccatccactcagatccagaaagaagacagcgttcgtatatcatgcatctctctatcctcatcgctctcatggccacccccgtctatgcactaggccaagaaggatccactatgacattcaccctaccgaggcgcggctctggcttcgcgtcgtcgtatcgttgcgcgtccgcggtgtgtagggctcatccgagtcgtctctctcttctacgcctcccgagaatagcagcgccgtgcctcgtccagccactactgtcgacatcggccatccctttactgctcactctggtccacgatgcaacgcctcacacgccgccgtccctcgccctattcctatgcttcgacccctttcgcgacgtgtgtccgcgctagcctctctgttacgtctcgttcgtactcttattgcgtgtgctccgcgtcggcggtctgctaccggtgctgtatctattgctactcatgtccgtctgttctttcccgccccactacaccagtcactttctcagatagtggtgatcttctccacgacctccactactgtctgacctatccctccacctcaccttcacatatgctcacaccgcgctctatctgcgtgcgctttaccctacagcatttacagagccggagctcgcaaggaatctatgagagacagtccgtgttgtcgtcttcgcgctcctctcttgtttattctgctgctcacacatccnacttttggcgcatatatcttccacaccatcttacctcttgctacttgaatatatgatctcagcctcgccacacttgtgctgcgagagtccacgtcgccctaccacatccaatataagttatacctaactctccgttctctacaactacgacgcgaccgtctanaccacacacatacacagcgcatgtgacgcgcacagacacaatcgacactctactatcctatcgcataatgatatgtgttcgatatgtcgtgtcttgctgacaacatagtaagctgatcgatacatgcgtcgagcggagacgcatactcacgaccgtcactattgatactcacacatncacatctacatgcacgacaatctgatacncctgggtatcgctcttcctactcgtctgaccgtctgactcggctantgtgctattangcaccaccgcgctgcacgcatgctgctcganctactcctgtactcacacgtacgtgatcacgcagtatgggcgtagacgn

SEQ ID NO: 3182 - DNA, 606 bp, Glycine max
  Probeset Number=SeqID_12961
aattcctcacacgcacaccctcttcgatctcaacgcctctttggcttatattctcaccgacccacattgccattctcaccattctttgcagatcacgcacccctttaggaagagaggaaggaaagtctagtttttggttcgtgggggttggtttgcgaaatggcctctttctcggtccatgccccagtgtcctacaacttctttctctccccctttggggttgaatctctaaatgtttcatttcaaagggggtgagcttgaagccttctcttcaatccgatctttgcctgctgaatctgctgcatcaaggattcagtggcctaacagggaagcaattttcttgttctgaaggctactaaaagtgaaaattccaattcctgccccctgaaatggccaaggcaccctatggttgctccatcgaaaaaaaaaaaagggcataaaggaaaactctccgggggaaatacccccaaaggaggttcacataatgcgatcagggcccagagttcaaaaccttgaaaaacccgggaattcaaaaaaaattttgggaacttccacttaaaaaaatcaaactgggggccccagaaaaaaaaaaaaaaaaactttccg

SEQ ID NO: 3183 - DNA, 554 bp, Glycine max
  misc_feature (477)..(477): n is a, c, g, or t
  misc_feature (488)..(488): n is a, c, g, or t
  misc_feature (541)..(541): n is a, c, g, or t
  Peptide Sequence Number=SeqID_6682
  Probeset Number=SeqID_12962
acgaggtgggctctcgtcaaggtcgccgagcccggcgacctcgtcattgcgcttcacgtcctcgactccatcactgagggaacggcatcgctgttatctctcgtgaagacgttcgattccgttctcggcgtttatgaaggcttctgcaacctaaaacaggttggtctgaggcttaaagtgtgtcgcggaggttcggtaaggaaggccttggtgcaagaagcaaaggcctttggcggttccaccggtgattttggaaccttcgaaaatctattataccaatccatccttcccgggggtggcaaattactgcccaaaaaaatgcccgaattgtatctctgtttgctccgggaaaatggcaaaatcgggttccggagagaagctgatggaagtggccggtgatcgaaagaattgggtgaagggtcaagttgttcgatcaaagtcatgggggttgccacaagataagattagaagaagttnggagagatagnaatagagagagagatgggagaaagaggtggaagagggagtggggagagataanaaagagaatgaag

SEQ ID NO: 3184 - DNA, 1631 bp, Glycine max
  misc_feature (85)..(85): n is a, c, g, or t
  misc_feature (194)..(194): n is a, c, g, or t
  misc_feature (278)..(278): n is a, c, g, or t
  misc_feature (573)..(573): n is a, c, g, or t
  misc_feature (677)..(677): n is a, c, g, or t
  misc_feature (680)..(680): n is a, c, g, or t
  misc_feature (708)..(708): n is a, c, g, or t
  misc_feature (739)..(739): n is a, c, g, or t
  misc_feature (815)..(815): n is a, c, g, or t
  misc_feature (959)..(959): n is a, c, g, or t
  misc_feature (1006)..(1006): n is a, c, g, or t
  misc_feature (1016)..(1016): n is a, c, g, or t
  misc_feature (1098)..(1098): n is a, c, g, or t
  misc_feature (1134)..(1134): n is a, c, g, or t
  misc_feature (1256)..(1256): n is a, c, g, or t
  misc_feature (1289)..(1291): n is a, c, g, or t
  misc_feature (1293)..(1293): n is a, c, g, or t
  misc_feature (1350)..(1350): n is a, c, g, or t
  misc_feature (1354)..(1354): n is a, c, g, or t
  misc_feature (1396)..(1396): n is a, c, g, or t
  misc_feature (1419)..(1420): n is a, c, g, or t
  misc_feature (1443)..(1443): n is a, c, g, or t
  misc_feature (1453)..(1453): n is a, c, g, or t
  misc_feature (1531)..(1531): n is a, c, g, or t
  misc_feature (1549)..(1549): n is a, c, g, or t
  misc_feature (1556)..(1556): n is a, c, g, or t
  misc_feature (1575)..(1575): n is a, c, g, or t
  misc_feature (1583)..(1584): n is a, c, g, or t
  misc_feature (1631)..(1631): n is a, c, g, or t
  Peptide Sequence Number=SeqID_6683
  Probeset Number=SeqID_12963
tcttttgacctcttcatgtctacttctaagtacttcgtcctacataacccacagcaataaccacacaacacaagctctcgacttngccgcgtgcaggtgccccttcctcaactctgtataacatacattatgtgtaaaccaccaaacactatgataacaaaacgaactccaaaacccatatataagcattattncttactttttagtttgttgtgcaaaaacaaagcacatcgatctcttaccaaccaacggaacaggctcatcataaatacataaanaaataaattaaatatactccttacacctctactagcgataagacctcaaagatatagagtactacttctgtcgtgtgatttcttatgttatatgttgcccctacttcacctcgtcgctgtggacttcgatcacgagcctctctgcgcgattataacaaactgtgcgagtgcaagcgatacttatctcccgaatcgtgcctccgcctgctggtgccattctgtacatgtattctgttctctttatagtatatacttccccttgtcgagcaggagccgcaccgaatcgcgctcttgntatcactatactcttgtgactctcagaactcgcgctctcacgccactcgcctagatgttcctatctagtccgctccacctctagcaataccatattattgtctnctncccgcctatatatatctcgctgagagtnatcgagggatgctgcgagaaataggagaacnacaatgtagcgcgaagagatacacagaacgcacccagtatatattcacagtaacaaagcggaaggtgactaggttnacagatttaacgatggtcacaagtgcgacatgagcagctttagttctatataatatatactgttcattactaagtgttagatatgacgatgagctgtgaggtcaggtatgcatcgcagattactttacatgtatagcatcgtgntaatatattctggcaataacactaccaacatgatatgtatatacgtnacgcggcgtnactatgcaccctatactgtgtattgacatagacgacctcatactatgtcatatatacagcttagacgatgtggatgcggccnttctcaaatcatgactacctattatagaactgctanaacaattcagatcagatcgttgacttatatggaggtcgccgtagactatatagtatggagatgagcgattatctcatatatcatatcgtagcgcgagcagaacacatggcatgatgtgaacncactgtagagtatgaggtgtgaactaaggtgcnnncnttggtatcgttgtatcgatggaatcgaccatagtgccacagtgcggcgagattgtgntctnacgtatacatcactcaacaacatatatacgagagagatacangatatatatacttcatattgtcnncctctctctcacgacacatgctntctcatatantaatctatataattgcactgacacagttataccagatctacggatatctaatcactatgtgcaggtgtgatgtagtcngatgcgtgtactgacganatgcacncggctctgacgtgccacgncgagcttnncctcacgtcgtcgttgcgccgtctacagactactcacgtaaccccgn

SEQ ID NO: 3185 - DNA, 555 bp, Glycine max
  Probeset Number=SeqID_12964
gcttccactgtcacccccgggcttatcgcctgggtttccacccgttcgaccgagggcgtggccaatctggcaccgttcagtttctttcaggtgatcagtgacaacccgccgaccttgctggtcaacgtcaacacccgcgacgatggcagcctcaaggacagcctgcgcaatgcccaggccagcggcgagctggcgattcaactggtcagcttcgctcaggccgaggcgatgaatgccagtgccgcgatcctgccgcatgaggtcagcgaatttgcccactgcgccattgccagccagccgtgcgcgcgcatcgacgtgccgcgagtcgtcggcgccccggtgaccttcgaatgccgtgtgacgcaaatccagccctatccggcgcagcaacccaattgtcatctgatcttcgccgaagtgttgctggcgcatatcgatgacgcagtgctcaacgagcagggacgcatcgacccgctcaaacttgatctggtgggtcgcctcggtggtagcgcctattgccgtacacgggatcttttccagatgcagcggccctga

SEQ ID NO: 3186 - DNA, 1415 bp, Glycine max
  misc_feature (226)..(226): n is a, c, g, or t
  misc_feature (248)..(248): n is a, c, g, or t
  misc_feature (510)..(510): n is a, c, g, or t
  misc_feature (514)..(514): n is a, c, g, or t
  misc_feature (607)..(607): n is a, c, g, or t
  misc_feature (690)..(690): n is a, c, g, or t
  misc_feature (769)..(769): n is a, c, g, or t
  misc_feature (814)..(814): n is a, c, g, or t
  misc_feature (1142)..(1142): n is a, c, g, or t
  misc_feature (1322)..(1322): n is a, c, g, or t
  Peptide Sequence Number=SeqID_6684
  Probeset Number=SeqID_12965
cggtcgggcggtagtgtgtagatggtggtagtctgtggtgttatgtgtttattttcggatcatttatttattcacagcacaacactttgtatttatgtataagggagatgtcgtgcgttgttattgggttgatttatcttccacactcttcagtgcgggtaggtattatatagatgtggtgtgtgtctgacctagtgggtgatatgagtgtggtgtgtgagtgtantgggtataccgcgcctgtggtnttgtgcttcttctggcttattcgtgaggtgagtggttgtgttgttcgtgttaccccacgccaccgcgcaggacaatatgggcaagatcgcgttgacacaagaagcacgtgggcaggcgcgaacagcgccacggcaccacgcagccgccgcacgcagtgagaggacggtatggagattagtgaaatgcggttggcacaacagataagaacacgccaccaaggcacgggtacatgagctagccgcgcacagcgcgggtgcgacnggcnacaaacaacagataacatggctgtcgcatgacgagccgagcaccaccacgaacaggcaagggggcgacacgccgagcagggagcggagcaggngtcgcgcgccggcctgagccgtagcgaccgaccgagggccgagccggcgcgggcgccgacgggaggcggccgagccgagaccnacgggagcacgccaggcacgaggcgtgacaagtaggtctacaaccaccaacagcgatgaaccatcacaccggctacgcntacgcagccacccaaccatacatacagacccatgaacaacaacangacacacagacaaaacacagtaaatattagtagaaagaacaccgacatacgatataataacgagtggcaaatagaatataatctgtatatctgacttatataacaagagagttactaagtattgattaatattagtgattacaattttgtatttggttctctgttttagtgcgtcctttgtctctgtcttgttgttgcgtacgctttgtgggatgtgtggtgtggtctctgtttgtgtgtagcacggtatgggagagtgtatgtgtgtgtgtgagtgatgcccgcctcatctattttattattctgacacgttcaccattccgccttntttttattttgtttgttgttatctattgttggtgcgcgtcgactatatttatttgttatgtattgtcttcgtcctatagtgtttgttttttaattatgtggagtcctcccaaaggggagtgtgggagtgggattgctgttgtacggagagtggtatggtgttagggtttataataggttngtagggtttgttctagggtaatcttgttttttgtgttatttatattatattataattgttgtatatatgagatttaatttatttttttgtgtt

SEQ ID NO: 3187 - DNA, 382 bp, Glycine max
  Probeset Number=SeqID_12966
agctgaacccaaaccagagccagtctctactacttcaccaaaggtgagcaccaagatttctgatgtggtggcgttcagtgggccagcacctgagaggatcaatggaaggttggccgtgattgggtttgtgggtgcattggcagtggaagtagccaaagggcaaggtgtgttagaacaaatttccaatggaggtttcccatggttcttgggaacttgtgtggaccatacacttgcttccttgatgccactcttccaatggatcagagtgtagtctaagttcagaaggttcgtgtccgtaaatgcagaactgaggagtgggagtatagctatgtagggtatgtctacactggcttttactgagtatgttatggggaggagccta

SEQ ID NO: 3188 - DNA, 663 bp, Glycine max
  Peptide Sequence Number=SeqID_6685
  Probeset Number=SeqID_12967
aaccttccgaatgggacgactgcagcaagggatccaaaagtacactgccaggcttcaaacaaccaaggcaccagcaagaatggaacaacccacaaaccaaacttaatgggcaagcaacgcttcaatcttctttttttgtaacgcaacaagcaagccgtaattcagcaactttcaacagcagcaacccattgcacagtgccctggggtcgagttcggggctccccctcctgcaaagtgaaggcaccaatgtgaatgtgggaaggagggtttcctgactttgtgcgtggcggcagccccccaggggagggtttgcccagtggtggaaggggtatccttgggaagtagcaaccaggaaatggggggttcaagtgaagcccccggtgaagggggtgaaaacctctccctcaaagttgttgatgatggaaactaggtagctacccccccaaaaagaacaagctttttttagtttaattagttaggaagccaccaagggaaaaaaccttgaagatgatgattaaaaaaaaagtgggattaaaaaaaaggaaaaagcaaacctaaaagtataaaaaaaaaaattaaaaacataaaatagcccattttttaaaagggggggggggggggggggggggggggggggggggggggggggggggggggggaagg

SEQ ID NO: 3189 - DNA, 459 bp, Glycine max
  Probeset Number=SeqID_12968
agttcggaattcggctcgatttacagccgcgtggtacatttcagtcaaggacgccactgctaggggcaagattgattcagcatcacttctgttaacgcacttccatgattgttacgttcgggggagcgatgccacagcgctgctaaattcaaaaggaaacaacaaagcagaaaaagacgggccaccaaatgtttctttgcatgcactctatgacattgatgcagcaaagaaagcactagaagcttcatgccctggtgtggactctcgagctgacatccttgctctggcagcaagggacgcactcattctgtcaggaggacctacatgggatgttcctaaaggaagaaaggaaggaagaacatctaaagccagtgaaaccagacaattgccagcaccaacctttaacttatcacaactgcggcaaaagttctctcaaagaggactgtcaggggaagacct

SEQ ID NO: 3190 - DNA, 1734 bp, Glycine max
  misc_feature (53)..(53): n is a, c, g, or t
  misc_feature (375)..(375): n is a, c, g, or t
  misc_feature (471)..(471): n is a, c, g, or t
  misc_feature (738)..(738): n is a, c, g, or t
  misc_feature (983)..(983): n is a, c, g, or t
  misc_feature (1176)..(1176): n is a, c, g, or t
  misc_feature (1468)..(1468): n is a, c, g, or t
  misc_feature (1556)..(1556): n is a, c, g, or t
  misc_feature (1578)..(1578): n is a, c, g, or t
  misc_feature (1597)..(1597): n is a, c, g, or t
  misc_feature (1681)..(1681): n is a, c, g, or t
  Peptide Sequence Number=SeqID_6686
  Probeset Number=SeqID_12969
gccgtttggccgaggacgagagggagtgcggttggtgcgggtgtacgtagtanagatacacagcacgcccagctattacggtcatatgtgtgttgtaactagtacaacatatatcgttctgtagtgcgcgttcatacaaatgtagtgataggattatctctgcgaccttacatcgagagccgacagagagcagagcaggagatagagagggtagctgcttaataagatagaatatgactatcgagtcacgatacaccatctcgagtataaatccttgccaggttcggggatccggcgcggccgtacgactgtcctatctcacgtcagctactaacatctctcaaacatgacactcaggagcgagtgcggggcgcncccagctcgcgtgaggtgatgtgttgttgtcgcgtgcgtgtgtgttctctttctgacagtcacttgtgtgagtctacgatttgattctgtgacgtngtggagggcggtgagtggatggacggcgtgacgttcgcgcgtgctcccgtaatcgtgtgactacgcgcatctctgcatcatcactgtgtatcggacgcagtgatctgctactttagttccgcgctgcatttcacgagtgtgtagtgagggcgtgtggtagatgcagtgcgcggcgctgggtggtgtgtggagaagctgatgatgtgctatcatgtacgtgtggcgctgtgagctcttgtagcgatgcacagtgagatgacagcgagngaattcgagctactctatatcacacattcatattagatatcagtatctaaattcacaatcacgtatgacggatcgcgcactctcactctagctgagtcgcgactctaggcgggataatatgtcactggtcaatgtagtacagccagtagtggtatgtagcgtcgggttgtgctctgtttgttatagctatgaatcttactgtccgtcgatgtaatgtctcagcatgcgtgtagcaggattagttnagtgaactgatcatcatatggcgagaagcatgcggagacgtgaatttatgataggagtcgtgctgtcgcacgcgaagtcggtgaacgtgcgagatcgcgaaggcggagcacgatgatggtgggtgatgttgcgcgtaagttccgcgtgtcgcacgagaccgtgatattgcatatatctctgtcactattgacnactgagttctgtactagtacactccatactcagcaaccgatttgtaagagcgtatgaagtactaggagtgcgtctcgcgtcggcgtagttgtaacgtctgctgtctaggatctcgacggcgtggacatttctactgcagatgtattgtgttatgtcgggcatggatgttgatcgttgtacatgcgtgatgtgtatactgcggtgcgtgtgcaaagtatcaacgagagaatcagcgtgattacatgcacacgtgtatagtacgagagtcctgtatcgatcgtgtccgcgcctntgtatctcgagcttgagtctgttactctcgtctgatggttatatagtccgttcatactctgctgtctatactgtatgcatgtcagcgnatgtcagacgatgctttgagantggtatagacgcgatgagncactatatagaacgcgctatctccggtgcattgcacagctcggaagtacgtcatcataacggcgagacgcacgaatcttatggntgtgcgagacgattgtcaatcactcacgagagagtcaagctacgagacgtgct

SEQ ID NO: 3191 - DNA, 1942 bp, Glycine max
  misc_feature (1)..(1): n is a, c, g, or t
  misc_feature (84)..(84): n is a, c, g, or t
  misc_feature (171)..(171): n is a, c, g, or t
  misc_feature (214)..(215): n is a, c, g, or t
  misc_feature (220)..(220): n is a, c, g, or t
  misc_feature (246)..(246): n is a, c, g, or t
  misc_feature (249)..(249): n is a, c, g, or t
  misc_feature (251)..(251): n is a, c, g, or t
  misc_feature (270)..(270): n is a, c, g, or t
  misc_feature (290)..(290): n is a, c, g, or t
  misc_feature (308)..(308): n is a, c, g, or t
  misc_feature (327)..(327): n is a, c, g, or t
  misc_feature (332)..(332): n is a, c, g, or t
  misc_feature (346)..(346): n is a, c, g, or t
  misc_feature (355)..(355): n is a, c, g, or t
  misc_feature (369)..(369): n is a, c, g, or t
  misc_feature (376)..(376): n is a, c, g, or t
  misc_feature (378)..(378): n is a, c, g, or t
  misc_feature (383)..(383): n is a, c, g, or t
  misc_feature (412)..(412): n is a, c, g, or t
  misc_feature (427)..(427): n is a, c, g, or t
  misc_feature (439)..(439): n is a, c, g, or t
  misc_feature (450)..(450): n is a, c, g, or t
  misc_feature (475)..(475): n is a, c, g, or t
  misc_feature (487)..(487): n is a, c, g, or t
  misc_feature (494)..(494): n is a, c, g, or t
  misc_feature (519)..(519): n is a, c, g, or t
  misc_feature (543)..(543): n is a, c, g, or t
  misc_feature (596)..(596): n is a, c, g, or t
  misc_feature (614)..(614): n is a, c, g, or t
  misc_feature (637)..(637): n is a, c, g, or t
  misc_feature (647)..(647): n is a, c, g, or t
  misc_feature (844)..(844): n is a, c, g, or t
  misc_feature (914)..(914): n is a, c, g, or t
  misc_feature (923)..(923): n is a, c, g, or t
  misc_feature (1009)..(1009): n is a, c, g, or t
  misc_feature (1085)..(1085): n is a, c, g, or t
  misc_feature (1124)..(1124): n is a, c, g, or t
  misc_feature (1391)..(1391): n is a, c, g, or t
  misc_feature (1399)..(1399): n is a, c, g, or t
  misc_feature (1409)..(1409): n is a, c, g, or t
  misc_feature (1637)..(1637): n is a, c, g, or t
  misc_feature (1682)..(1682): n is a, c, g, or t
  misc_feature (1715)..(1715): n is a, c, g, or t
  misc_feature (1718)..(1718): n is a, c, g, or t
  misc_feature (1721)..(1721): n is a, c, g, or t
  misc_feature (1725)..(1725): n is a, c, g, or t
  misc_feature (1740)..(1740): n is a, c, g, or t
  misc_feature (1743)..(1743): n is a, c, g, or t
  misc_feature (1745)..(1745): n is a, c, g, or t
  misc_feature (1789)..(1789): n is a, c, g, or t
  misc_feature (1812)..(1812): n is a, c, g, or t
  misc_feature (1825)..(1825): n is a, c, g, or t
  misc_feature (1828)..(1828): n is a, c, g, or t
  misc_feature (1830)..(1830): n is a, c, g, or t
  misc_feature (1855)..(1855): n is a, c, g, or t
  misc_feature (1872)..(1872): n is a, c, g, or t
  misc_feature (1882)..(1882): n is a, c, g, or t
  misc_feature (1896)..(1896): n is a, c, g, or t
  misc_feature (1898)..(1898): n is a, c, g, or t
  misc_feature (1908)..(1908): n is a, c, g, or t
  misc_feature (1921)..(1921): n is a, c, g, or t
  misc_feature (1926)..(1928): n is a, c, g, or t
  Probeset Number=SeqID_12970
ngtgtacgcagtgtagtatgagtatagtaatatatgcgtagtcagatgatatgtgtgtatatattgtagttgcatagttgcgtntagtgatatgatgatgataaagagagatgaaatagagtatcacagatcgcatgatacgtgattgtcagtagtcgagtctgatggagnagatgagatggaggtggtgatgagaggagtatatagttatganngagangtgcgagcgtgtatgtatggtgtaantantntgtagatgatatgtgtganttataatggtgacgagtatnacacggtgtgacgtggtntcaatagtatgtaatttgnttatnaagaggtgggatanttgggttantatcgggcagtgtnagacgtntntcganagatatgataggctacggacgagcttgantgagtgacgaattanacaagtagactnagagtctatantataacacaattcagtactatcgantgagtatgatantggagtntgcgatacatagcgattgtgagagnagagatatatagtgctgatatgangaggcagtagagagatagttaagacttgtgtgtgtctgatgtatgagtgtcanacatgatatgagttgagnatgtaagatggtatgtgcgcagncgatgtcatnatagtagtataatacttcttttatttattataacgtccgtggtgtttgagtgaggtcttgagtcacgaagatggaactagtagtgatatagagtacagtattcatgatatgtgtagagtagcacatatatgaagtggttgcggatgattatatatatgataatgtaattacatctgaatctctgcttattgttgagntatttctagacagtatacatataataaatgtatattatatagatagacaagtgattgtcagtagatatanagagtgtcncgtgttattctcttgtgtctgtcttgtcgtattgatgtagtatatgatagtagtttgagtgttagtgtgtgttgaatgtgagttanttagtttgttaatatattatgttgatatgtttgtatgtagagtagtatatctcgatgagagtagtataatatatanagtatgagaataatgtgggtattatagagaggtatgtantgtgatgagatacatgtggattgtatagtagagtgtgtgtagttaatgtagtaagtagtagtgttagagcagttagattgatgcttatatctttcgttgatgagatattgtctggctggcttaagatgtgtatggttagtgtggagatgatagttggatgtatatagatatgttgtagaatataatattatatatatatagtatagtgatagtagtagtatttgtgtgatggttatagaagcgagggtgattgtgcagggctcaacngctatcanggtggttagngtgtgatagagaggaaggacggagacaaatgttggtgagcagtggtagtgttgatgtatgcatagtgatgtgtgagtgattgttgcgggataagttgcgagttgattagtagagatactgatatgtattagtagagttatgtcatctattgtatgatagaggatgtatgttatgatagtatgtgtagtattagtatggatcgggtggagaagtagacgtgtgagaganagagcgaaaagtatagagagaggagacgtgatgatatagggtagnacgtcgtatcgtgtatcatggagaggcacgggnggntgntagnggagggtggtagagncgngngcgggtgtgtggagatgaaaatatgaggaacaacataagcactntattacaacgagaagtatagttnaagtgtatatacngtntntagttatataaatgctgtgttctgntgtgtgtatgatgtagngtatgtatanggatatatgaatananatatacaaanctgtattactctnactcnnnttttcgcttttttt

SEQ ID NO: 3192 - DNA, 2008 bp, Glycine max
  misc_feature (1)..(1): n is a, c, g, or t
  misc_feature (4)..(4): n is a, c, g, or t
  misc_feature (6)..(6): n is a, c, g, or t
  misc_feature (11)..(11): n is a, c, g, or t
  misc_feature (22)..(22): n is a, c, g, or t
  misc_feature (24)..(24): n is a, c, g, or t
  misc_feature (41)..(41): n is a, c, g, or t
  misc_feature (43)..(43): n is a, c, g, or t
  misc_feature (50)..(50): n is a, c, g, or t
  misc_feature (68)..(68): n is a, c, g, or t
  misc_feature (72)..(72): n is a, c, g, or t
  misc_feature (81)..(81): n is a, c, g, or t
  misc_feature (87)..(87): n is a, c, g, or t
  misc_feature (97)..(97): n is a, c, g, or t
  misc_feature (106)..(106): n is a, c, g, or t
  misc_feature (116)..(116): n is a, c, g, or t
  misc_feature (120)..(121): n is a, c, g, or t
  misc_feature (124)..(124): n is a, c, g, or t
  misc_feature (137)..(137): n is a, c, g, or t
  misc_feature (139)..(139): n is a, c, g, or t
  misc_feature (145)..(145): n is a, c, g, or t
  misc_feature (148)..(148): n is a, c, g, or t
  misc_feature (166)..(166): n is a, c, g, or t
  misc_feature (174)..(175): n is a, c, g, or t
  misc_feature (199)..(200): n is a, c, g, or t
  misc_feature (202)..(202): n is a, c, g, or t
  misc_feature (217)..(217): n is a, c, g, or t
  misc_feature (254)..(254): n is a, c, g, or t
  misc_feature (260)..(260): n is a, c, g, or t
  misc_feature (263)..(263): n is a, c, g, or t
  misc_feature (291)..(291): n is a, c, g, or t
  misc_feature (312)..(312): n is a, c, g, or t
  misc_feature (335)..(335): n is a, c, g, or t
  misc_feature (352)..(352): n is a, c, g, or t
  misc_feature (406)..(406): n is a, c, g, or t
  misc_feature (417)..(417): n is a, c, g, or t
  misc_feature (419)..(419): n is a, c, g, or t
  misc_feature (422)..(422): n is a, c, g, or t
  misc_feature (424)..(424): n is a, c, g, or t
  misc_feature (445)..(445): n is a, c, g, or t
  misc_feature (470)..(470): n is a, c, g, or t
  misc_feature (483)..(484): n is a, c, g, or t
  misc_feature (489)..(489): n is a, c, g, or t
  misc_feature (495)..(495): n is a, c, g, or t
  misc_feature (497)..(497): n is a, c, g, or t
  misc_feature (499)..(499): n is a, c, g, or t
  misc_feature (507)..(507): n is a, c, g, or t
  misc_feature (524)..(524): n is a, c, g, or t
  misc_feature (536)..(536): n is a, c, g, or t
  misc_feature (542)..(542): n is a, c, g, or t
  misc_feature (563)..(563): n is a, c, g, or t
  misc_feature (578)..(578): n is a, c, g, or t
  misc_feature (599)..(599): n is a, c, g, or t
  misc_feature (627)..(627): n is a, c, g, or t
  misc_feature (629)..(629): n is a, c, g, or t
  misc_feature (644)..(644): n is a, c, g, or t
  misc_feature (657)..(657): n is a, c, g, or t
  misc_feature (719)..(719): n is a, c, g, or t
  misc_feature (752)..(752): n is a, c, g, or t
  misc_feature (760)..(760): n is a, c, g, or t
  misc_feature (770)..(770): n is a, c, g, or t
  misc_feature (799)..(799): n is a, c, g, or t
  misc_feature (856)..(857): n is a, c, g, or t
  misc_feature (859)..(859): n is a, c, g, or t
  misc_feature (867)..(867): n is a, c, g, or t
  misc_feature (869)..(869): n is a, c, g, or t
  misc_feature (879)..(879): n is a, c, g, or t
  misc_feature (887)..(887): n is a, c, g, or t
  misc_feature (893)..(893): n is a, c, g, or t
  misc_feature (902)..(902): n is a, c, g, or t
  misc_feature (909)..(909): n is a, c, g, or t
  misc_feature (912)..(912): n is a, c, g, or t
  misc_feature (919)..(919): n is a, c, g, or t
  misc_feature (929)..(929): n is a, c, g, or t
  misc_feature (936)..(936): n is a, c, g, or t
  misc_feature (951)..(951): n is a, c, g, or t
  misc_feature (957)..(957): n is a, c, g, or t
  misc_feature (962)..(962): n is a, c, g, or t
  misc_feature (1032)..(1032): n is a, c, g, or t
  misc_feature (1052)..(1052): n is a, c, g, or t
  misc_feature (1054)..(1054): n is a, c, g, or t
  misc_feature (1121)..(1121): n is a, c, g, or t
  misc_feature (1126)..(1126): n is a, c, g, or t
  misc_feature (1133)..(1133): n is a, c, g, or t
  misc_feature (1194)..(1194): n is a, c, g, or t
  misc_feature (1211)..(1211): n is a, c, g, or t
  misc_feature (1220)..(1220): n is a, c, g, or t
  misc_feature (1261)..(1261): n is a, c, g, or t
  misc_feature (1298)..(1298): n is a, c, g, or t
  misc_feature (1304)..(1304): n is a, c, g, or t
  misc_feature (1306)..(1306): n is a, c, g, or t
  misc_feature (1323)..(1323): n is a, c, g, or t
  misc_feature (1345)..(1345): n is a, c, g, or t
  misc_feature (1350)..(1350): n is a, c, g, or t
  misc_feature (1358)..(1358): n is a, c, g, or t
  misc_feature (1364)..(1364): n is a, c, g, or t
  misc_feature (1386)..(1386): n is a, c, g, or t
  misc_feature (1390)..(1390): n is a, c, g, or t
  misc_feature (1392)..(1392): n is a, c, g, or t
  misc_feature (1449)..(1449): n is a, c, g, or t
  misc_feature (1484)..(1484): n is a, c, g, or t
  misc_feature (1526)..(1526): n is a, c, g, or t
  misc_feature (1572)..(1572): n is a, c, g, or t
  misc_feature (1624)..(1624): n is a, c, g, or t
  misc_feature (1632)..(1633): n is a, c, g, or t
  misc_feature (1667)..(1667): n is a, c, g, or t
  misc_feature (1674)..(1674): n is a, c, g, or t
  misc_feature (1677)..(1680): n is a, c, g, or t
  misc_feature (1687)..(1687): n is a, c, g, or t
  misc_feature (1692)..(1692): n is a, c, g, or t
  misc_feature (1697)..(1698): n is a, c, g, or t
  misc_feature (1707)..(1707): n is a, c, g, or t
  misc_feature (1734)..(1734): n is a, c, g, or t
  misc_feature (1753)..(1753): n is a, c, g, or t
  misc_feature (1807)..(1807): n is a, c, g, or t
  misc_feature (1853)..(1853): n is a, c, g, or t
  misc_feature (1869)..(1869): n is a, c, g, or t
  misc_feature (1883)..(1883): n is a, c, g, or t
  misc_feature (1891)..(1892): n is a, c, g, or t
  misc_feature (1894)..(1894): n is a, c, g, or t
  misc_feature (1902)..(1902): n is a, c, g, or t
  misc_feature (1907)..(1908): n is a, c, g, or t
  misc_feature (1910)..(1913): n is a, c, g, or t
  misc_feature (1915)..(1916): n is a, c, g, or t
  misc_feature (1918)..(1918): n is a, c, g, or t
  misc_feature (1921)..(1921): n is a, c, g, or t
  misc_feature (1924)..(1925): n is a, c, g, or t
  misc_feature (1933)..(1933): n is a, c, g, or t
  misc_feature (1939)..(1939): n is a, c, g, or t
  misc_feature (1942)..(1942): n is a, c, g, or t
  misc_feature (1949)..(1950): n is a, c, g, or t
  misc_feature (1979)..(1979): n is a, c, g, or t
  Peptide Sequence Number=SeqID_6687
  Probeset Number=SeqID_12971
ngangntgtcnggtgatggtantnagcatcgacgtgttgcntncgactanctcgacatcagtcgatcntatnaacacatcngtacgntcgtcacgtnctcatcatntgactgatgntacnnccnacgtagacgcatncncgacgngancgatgagctacgaccatnatcgttannatcgaggtgcgctgcgcatggcgnncngttgatagtgacagnaccagtcaggaacgatagtcgacgagtagtgataggnagtcanganataaaggaagatagacatgacggtcagnaacgaagctaatgcaatcaancgacttctagatcatatattcantatttaatatatcatangtaaatagatgattcatcatggtatgttgagagtagacgtggaagagacgaganatgagaatgtngntgntngtggtcagattgatctgaatngttgtacgacgtgtcagtgtgtganttttacttctctnnagcgntcccgntnantatcatcnatacgctactcatcgtngctacgtcatcngcatgnaaactacctgcagatcgatgngcactacgtgtggtngtcagtatcatatactattancatatcacgagcatgacggatagctagnangaatagtcatacgtnagtgatgattgcnttgagtgactttaagtatcgtgtatcgacgtcgtgtattactgatagcattgagataatagnatgaatagtagtacattacgtcagcagcagaanaacatcgnatagatagtnaatatatagtatgaatagtatgttacatnagtcgcaacgcacacgagcgaccacgcatggactatagatgatatgatacgtgtctnntnccactcancncaacccacanctacgtancacgancactgtgtntgttganttnttcatantatgtcactntgctcgnctcatgcgacgtagngcgagnacgcnacgacaatgtgtgtgtgtgtactatcagcagacgacgaatcgatatgttctcgagcgtcgtatgctggtnatagtgatcactatagcgancncaacgacataccccacgtgcaacacacgtcatacgatctatatatgatatgagtgtgatagatgatntttgnatgtagngagtaattgcgataatgaagctgatcgtgtagatatgtgatgttgtagcgagttcgcgttngatagatgttatagtanagatgatanatcagtatgataaatagatagtgagagatcaagcaatatantatgtagtgtgatagagcacactacaattcgtggtcntctgtntntctcatcgcgccgtctncccccatcgcgcctgtgcgtgncccgntcgtgtgncggcgncgttgtcgtgagacgcagtgangatngntcggtagagtgggtatgaaatatatatcatgatagatctgtgtgttctcctctcaantaggtgagttggtgggatgagacgtatagaacganaggtggtggagtgagtgtgttgagtgatggatgtagtagcanccaaacacgacgcaccacggcgatccagaaagacgaagacacaatnaagagcgcacggcgagcgactcacacaaaatataacaataacgacaagacgnaggagaannttacacacactcgcgctctcaacacacatatatnaaagatntgnnnntttctgnccccncctgnncccataganacacacccagagcgagagaagtaatgntacccactcattcaaggtngctgtataaggtagagcagccatgttatgtgttagaacattgcgtggcgtagtntagatagtataatgcttatcgtacaatctatcttgatgagcacctnattccaatcagcatcnaataatatatattnaatattcnntnttttattntttcnncnnnntnntnttntanntaattttntttgtnttncctcctnntatccttctgcgtgttgtgtctcgccccntctgtgctttaacaattactacaatattg

SEQ ID NO: 3193 - DNA, 498 bp, Glycine max
  Peptide Sequence Number=SeqID_6688
  Probeset Number=SeqID_12972
cgggttgtcagtttactgtctttattcagagatgacaaagaaacacatacaaggcgatgcgcgtgtggccgtaacgacgtccgcagcagcaacgcaaacagaaaaggccactgtaaaagctaaagcagcatatcaaccgaatctaccatctgccaccggagtacacggcggaggtgacgccggcggccgcggccgcggaggcttggccttcggcggagggggcgccttcaccggcaccctctgccccagagacctcgctcccctcgctgcagttctgcggccaccatgggctccctccgccgccaatggcaccgcgcttcacaccttggctacgccgctcgtgccaacggtgtagcgcgatttgccgacggacgtggcgcaggagcacaagaggagggccgccatgagcagtgaagtgagcatcttcttgcagtacatgactgagtgtgcagtcactcactgagctagtactgccagttatctgtccaagtatcgatc

SEQ ID NO: 3194 - DNA, 1460 bp, Glycine max
  misc_feature (1160)..(1160): n is a, c, g, or t
  misc_feature (1315)..(1315): n is a, c, g, or t
  misc_feature (1363)..(1364): n is a, c, g, or t
  Probeset Number=SeqID_12973
ctcccccccaactctataccaatgattatagaaggtacgcgtcgcttcccataaacaataggtggtatctccccgggtgacgagtagtacttctattaaaaatgttggccccccctcgggcggcggcgagagactcgttgcaagagtaaattaccaacgagaatctaaattaaatctataaaatattgttttgaattcgagcgttttcgttggtaattagaagacagacacgccgcaaggaccccagaaatgtggacgctactctgcgctctaagctgctgcggagaccgccagaacacgaagagagtcatcggggtgtaccgacctcacctgtcttattctagtcaatcagggttaattgttcagcgtcagaccttcacccctaaatgcttcatctcggacagtatccacgacgatgacccagtggaccagggacgctatacactcttcggcagcaggggatacaggaccgacgacacgacgagactccactctacgctttcatcatgtataagatatgaatctaacctccttacttttctttctggccacccgcgctgggtgccgcacgccacgcgagtaattattccccgctccacgctatcctatccgccattatatattatcatatataacctggacttatgccacccccaccacctcatcaatacaaatgagcctcaccactagacgccgcttatctaccactcgactgacgcctagaattgtaattttcgcccgacgccgcctctcttttctcgtatttacccctacgacccgcctatcatgccgaaattagatacactcttcctcgttcacccccagcgctccttctccgccgctcgagtcgcaactcagaaatataagaagatatagcgggcgtacacgagcaggcggttatttactacaggagtgtagccctacacttgagagaaccgcgtctgtgccgcacgctacagacacataattgtcactattatatattcacctccggccgcctgtccacgcaccccgcgcatctgactttctatagagacaaacgaacagaacaaatacaacaagttgaactacgtgacggtcgccgatacgagcggagctgtcgagctcgcctgtgcgtcgaggagctcttacgccgtctacgttttccgcctctgctggcncctctcagcacgcgacaatatatgtcgcatgtgctcttaccgctctgcaatagtgtgggacaggcggcgatctatccctgcttacattgttgatgacgcactgcgatgacaaatgcgatgagttcgagacgcctcatgacgtcatcttcacttgnctagatattcgcgagaatgtatattgtccctacgagactattgttctnntagtatactatcatccacgcgactcaaccactctatatcacttggatagatgagtctatattcgatcgctttgtccggtgaaatcacagtgacgcg

SEQ ID NO: 3195 - DNA, 1420 bp, Glycine max
  misc_feature (553)..(553): n is a, c, g, or t
  misc_feature (643)..(643): n is a, c, g, or t
  misc_feature (645)..(645): n is a, c, g, or t
  misc_feature (657)..(657): n is a, c, g, or t
  misc_feature (703)..(703): n is a, c, g, or t
  misc_feature (743)..(743): n is a, c, g, or t
  misc_feature (761)..(761): n is a, c, g, or t
  misc_feature (818)..(818): n is a, c, g, or t
  misc_feature (844)..(844): n is a, c, g, or t
  misc_feature (885)..(885): n is a, c, g, or t
  misc_feature (895)..(895): n is a, c, g, or t
  misc_feature (907)..(907): n is a, c, g, or t
  misc_feature (932)..(932): n is a, c, g, or t
  misc_feature (938)..(938): n is a, c, g, or t
  misc_feature (943)..(943): n is a, c, g, or t
  misc_feature (954)..(954): n is a, c, g, or t
  misc_feature (958)..(958): n is a, c, g, or t
  misc_feature (985)..(985): n is a, c, g, or t
  misc_feature (989)..(989): n is a, c, g, or t
  misc_feature (995)..(995): n is a, c, g, or t
  misc_feature (1060)..(1060): n is a, c, g, or t
  misc_feature (1078)..(1078): n is a, c, g, or t
  misc_feature (1105)..(1105): n is a, c, g, or t
  misc_feature (1112)..(1112): n is a, c, g, or t
  misc_feature (1121)..(1121): n is a, c, g, or t
  misc_feature (1123)..(1123): n is a, c, g, or t
  misc_feature (1130)..(1130): n is a, c, g, or t
  misc_feature (1133)..(1140): n is a, c, g, or t
  misc_feature (1150)..(1150): n is a, c, g, or t
  misc_feature (1152)..(1152): n is a, c, g, or t
  misc_feature (1157)..(1157): n is a, c, g, or t
  misc_feature (1176)..(1176): n is a, c, g, or t
  misc_feature (1211)..(1211): n is a, c, g, or t
  misc_feature (1219)..(1219): n is a, c, g, or t
  misc_feature (1222)..(1222): n is a, c, g, or t
  misc_feature (1224)..(1225): n is a, c, g, or t
  misc_feature (1228)..(1231): n is a, c, g, or t
  misc_feature (1235)..(1235): n is a, c, g, or t
  misc_feature (1240)..(1243): n is a, c, g, or t
  misc_feature (1245)..(1246): n is a, c, g, or t
  misc_feature (1248)..(1248): n is a, c, g, or t
  misc_feature (1250)..(1250): n is a, c, g, or t
  misc_feature (1257)..(1259): n is a, c, g, or t
  misc_feature (1315)..(1315): n is a, c, g, or t
  misc_feature (1318)..(1318): n is a, c, g, or t
  misc_feature (1345)..(1345): n is a, c, g, or t
  misc_feature (1378)..(1378): n is a, c, g, or t
  misc_feature (1402)..(1402): n is a, c, g, or t
  Peptide Sequence Number=SeqID_6689
  Probeset Number=SeqID_12974
tgtggaccgccccgcccgccgcccgctgccccaccctcctccccaagatagacagcagcattctctaacaaaggggacgagggcgcgcccccacgtacgaaaacaggcataataccgccccccccccaaaccgcgcaggatgaggcgttcaatatattattcatcttcacaatactagaggccgcccgactccaccatatagagatatatacatagtctcggccaactgcctgcctcacaactatcatctatcctgtactcatccaactgtcgcccttcctcctctttagacgatcacccagcccgcagcctacaatcatatagttctttcgctgcatggcctaataattcttcgctgtgtttcctagtccacgactcgccagcggcgcctagctcattattgagtggaggacgtgttcctagcacgcgcaagtcgttagagatgcggacgaagaatacctcgtgcgcccctcgtgtatcttgtgtattaagccgacgagtccggtcagtggccgcgcgcgagccgagcgagtatgtgctaaccgcctcctgngtgagcagccgcccgcgccacactagatataattcgctccgtgtgggcttctgtgctatcgcactggcgtacccccgcccccgccgcggngncgggtctgcttntcgtttggtggtgagggggagtgtgttgttgcgcccgccgccactngttgcgagccgacgccccggacgtggccacgcgcgtttantgagtgtgtgcgtgtgcncgcgcccgtgctgtcagccacactactcggcgaggcgccgcgaggcggctgaggcancgaccgcctcaccgtccgacacgagncggcggtagtgtgcggcgtcccgttctcgctcgcgcacgangcggctgtgngggtctgctgcntctcccgtgctgcacgccgcgcgcnaccggnccgcncgccaccgctngatngtccttgtgccgcagtggtgggtgggntagngagatncactcttcagtgcgagggtagttgcgttgatagctgaacgccggggcgtgtgcgctcgcgccagncatcgtgggagcggagtncacagcagacgacgcgcgagagagctngcgcgcncccgtgtgngngtcgccnccnnnnnnnnctctatgcangngaagnggtccggtgacgcgactcngtacagatagaactgtggagcgtgaggtatggtgngcgcgagngantnnctnnnncacnacccnnnngnncncncgccttnnnctaccatgacctaccatacatgttcatagtggctgcgtgagatcgtagaatcacgncgntgctagcacatctatgctcacaaatcntctcacggacagcggcacaggccatagactagnggtacactgacgatacacgcatanatggcgtgagtgctctta

SEQ ID NO: 3196 - DNA, 764 bp, Glycine max
  misc_feature (411)..(411): n is a, c, g, or t
  misc_feature (601)..(764): n is a, c, g, or t
  Probeset Number=SeqID_12975
ctcgagcctaatcggctcgaggtaaaacgttggttttctctgagaatggcaatgcaggcaggcgaactctgtcagcaccaaagtccacattgccctctctttttcttcaacccgattcccgattttggttccttcagcggagggttgtttctcgagcccaaaatccccgattccttcggtcgttccatttcgctgaagatccactccactcccttttcagaatccaatcctcgccgccaccggagaagggtcccggcagcgtgctttctatcggggagctcgcccgagtgaaatctcgttaccgaaacccaaactgcaaaatggcgaacaacgtggcaaaaccaggtgacaccctcaaacggtggccctcctcaaaagaaaggggaggggaacgaggaggaaattcccgcnaacaccaccaaaaatctcctgggccgggtgctggaacccgctatggccctcaagaactttggggggggccccacttaaaagggctcaaggtggaacaacctagccccggcgcgcaaaaaaaagagccctttatgaattttttttagggaagcttccctccttcccaaggggctgacaacgatttttccgnnnnnnnnnnnnnnnnnnnnnnnnnnnnnnnnnnnnnnnnnnnnnnnnnnnnnnnnnnnnnnnnnnnnnnnnnnnnnnnnnnnnnnnnnnnnnnnnnnnnnnnnnnnnnnnnnnnnnnnnnnnnnnnnnnnnnnnnnnnnnnnnnnnnnnnnnnnnnnnnnnnn

SEQ ID NO: 3197 - DNA, 211 bp, Glycine max
  Peptide Sequence Number=SeqID_6690
  Probeset Number=SeqID_12976
ctaggccctattacttgaacattacaaaatatccagagggaccctctacagcctatctactcgcatgctagcttggaactggacgctgattgacaacgaaaaagactgggagaacccttatgatactcaagttaatcagcttccaggagatcctcctatagccacctgcaggcatagcaaataggccctgaccgatcgccctaaccaacag

SEQ ID NO: 3198 - DNA, 450 bp, Glycine max
  Probeset Number=SeqID_12977
tatctttcctcttcctcatgctcattgtttgctcttcatcattagtgaaaggctctgtccagcttgaaggcgcaaagatgcatgagagtttcatgctttacaagagtgaggaggtggaagtgaagaagatctcgagtcacaggaagttgatgttccactcgactacggactacgacgacgcaggagccaaccctaagcacgacccaagaaggaggcccggaggcaaggcaagccttgaattattcaacatacgattctctctcgctctctctatataaattagcctatatataaacacatgcactagtatctatatatatgagtgtatgtatcctattctgacattttgtttggatgagatcgttgtacaatacccttcggaaacgcttcgtgaaagggggactagttttctttacatagactaaacaatgaatgaactattatcatctt

SEQ ID NO: 3199 - DNA, 2193 bp, Glycine max
  misc_feature (1)..(1): n is a, c, g, or t
  misc_feature (12)..(12): n is a, c, g, or t
  misc_feature (14)..(14): n is a, c, g, or t
  misc_feature (22)..(22): n is a, c, g, or t
  misc_feature (29)..(29): n is a, c, g, or t
  misc_feature (38)..(38): n is a, c, g, or t
  misc_feature (44)..(44): n is a, c, g, or t
  misc_feature (49)..(49): n is a, c, g, or t
  misc_feature (52)..(52): n is a, c, g, or t
  misc_feature (59)..(59): n is a, c, g, or t
  misc_feature (72)..(72): n is a, c, g, or t
  misc_feature (89)..(89): n is a, c, g, or t
  misc_feature (98)..(98): n is a, c, g, or t
  misc_feature (135)..(135): n is a, c, g, or t
  misc_feature (138)..(138): n is a, c, g, or t
  misc_feature (158)..(158): n is a, c, g, or t
  misc_feature (161)..(161): n is a, c, g, or t
  misc_feature (164)..(164): n is a, c, g, or t
  misc_feature (176)..(176): n is a, c, g, or t
  misc_feature (187)..(187): n is a, c, g, or t
  misc_feature (192)..(192): n is a, c, g, or t
  misc_feature (209)..(209): n is a, c, g, or t
  misc_feature (235)..(235): n is a, c, g, or t
  misc_feature (237)..(237): n is a, c, g, or t
  misc_feature (240)..(240): n is a, c, g, or t
  misc_feature (243)..(243): n is a, c, g, or t
  misc_feature (261)..(261): n is a, c, g, or t
  misc_feature (269)..(269): n is a, c, g, or t
  misc_feature (278)..(278): n is a, c, g, or t
  misc_feature (290)..(290): n is a, c, g, or t
  misc_feature (313)..(313): n is a, c, g, or t
  misc_feature (316)..(316): n is a, c, g, or t
  misc_feature (336)..(336): n is a, c, g, or t
  misc_feature (341)..(341): n is a, c, g, or t
  misc_feature (343)..(343): n is a, c, g, or t
  misc_feature (376)..(376): n is a, c, g, or t
  misc_feature (384)..(384): n is a, c, g, or t
  misc_feature (389)..(389): n is a, c, g, or t
  misc_feature (395)..(395): n is a, c, g, or t
  misc_feature (400)..(400): n is a, c, g, or t
  misc_feature (426)..(426): n is a, c, g, or t
  misc_feature (429)..(429): n is a, c, g, or t
  misc_feature (452)..(452): n is a, c, g, or t
  misc_feature (467)..(467): n is a, c, g, or t
  misc_feature (479)..(479): n is a, c, g, or t
  misc_feature (481)..(481): n is a, c, g, or t
  misc_feature (483)..(483): n is a, c, g, or t
  misc_feature (487)..(487): n is a, c, g, or t
  misc_feature (496)..(496): n is a, c, g, or t
  misc_feature (517)..(517): n is a, c, g, or t
  misc_feature (522)..(522): n is a, c, g, or t
  misc_feature (542)..(542): n is a, c, g, or t
  misc_feature (544)..(544): n is a, c, g, or t
  misc_feature (553)..(553): n is a, c, g, or t
  misc_feature (561)..(561): n is a, c, g, or t
  misc_feature (584)..(584): n is a, c, g, or t
  misc_feature (660)..(660): n is a, c, g, or t
  misc_feature (693)..(693): n is a, c, g, or t
  misc_feature (696)..(696): n is a, c, g, or t
  misc_feature (716)..(716): n is a, c, g, or t
  misc_feature (718)..(718): n is a, c, g, or t
  misc_feature (741)..(741): n is a, c, g, or t
  misc_feature (758)..(758): n is a, c, g, or t
  misc_feature (771)..(771): n is a, c, g, or t
  misc_feature (775)..(775): n is a, c, g, or t
  misc_feature (789)..(789): n is a, c, g, or t
  misc_feature (803)..(803): n is a, c, g, or t
  misc_feature (823)..(823): n is a, c, g, or t
  misc_feature (845)..(845): n is a, c, g, or t
  misc_feature (848)..(848): n is a, c, g, or t
  misc_feature (869)..(869): n is a, c, g, or t
  misc_feature (902)..(902): n is a, c, g, or t
  misc_feature (909)..(909): n is a, c, g, or t
  misc_feature (914)..(914): n is a, c, g, or t
  misc_feature (931)..(931): n is a, c, g, or t
  misc_feature (962)..(963): n is a, c, g, or t
  misc_feature (965)..(973): n is a, c, g, or t
  misc_feature (978)..(979): n is a, c, g, or t
  misc_feature (981)..(983): n is a, c, g, or t
  misc_feature (1001)..(1001): n is a, c, g, or t
  misc_feature (1038)..(1038): n is a, c, g, or t
  misc_feature (1059)..(1059): n is a, c, g, or t
  misc_feature (1140)..(1140): n is a, c, g, or t
  misc_feature (1142)..(1142): n is a, c, g, or t
  misc_feature (1144)..(1144): n is a, c, g, or t
  misc_feature (1161)..(1161): n is a, c, g, or t
  misc_feature (1166)..(1166): n is a, c, g, or t
  misc_feature (1169)..(1170): n is a, c, g, or t
  misc_feature (1176)..(1176): n is a, c, g, or t
  misc_feature (1182)..(1182): n is a, c, g, or t
  misc_feature (1187)..(1187): n is a, c, g, or t
  misc_feature (1189)..(1189): n is a, c, g, or t
  misc_feature (1257)..(1257): n is a, c, g, or t
  misc_feature (1295)..(1295): n is a, c, g, or t
  misc_feature (1313)..(1313): n is a, c, g, or t
  misc_feature (1355)..(1355): n is a, c, g, or t
  misc_feature (1360)..(1360): n is a, c, g, or t
  misc_feature (1394)..(1394): n is a, c, g, or t
  misc_feature (1399)..(1399): n is a, c, g, or t
  misc_feature (1468)..(1468): n is a, c, g, or t
  misc_feature (1483)..(1483): n is a, c, g, or t
  misc_feature (1486)..(1486): n is a, c, g, or t
  misc_feature (1501)..(1501): n is a, c, g, or t
  misc_feature (1509)..(1509): n is a, c, g, or t
  misc_feature (1512)..(1513): n is a, c, g, or t
  misc_feature (1515)..(1515): n is a, c, g, or t
  misc_feature (1557)..(1557): n is a, c, g, or t
  misc_feature (1637)..(1637): n is a, c, g, or t
  misc_feature (1677)..(1677): n is a, c, g, or t
  misc_feature (1720)..(1720): n is a, c, g, or t
  misc_feature (1726)..(1726): n is a, c, g, or t
  misc_feature (1746)..(1746): n is a, c, g, or t
  misc_feature (1752)..(1752): n is a, c, g, or t
  misc_feature (1754)..(1754): n is a, c, g, or t
  misc_feature (1774)..(1774): n is a, c, g, or t
  misc_feature (1805)..(1805): n is a, c, g, or t
  misc_feature (1817)..(1817): n is a, c, g, or t
  misc_feature (1850)..(1850): n is a, c, g, or t
  misc_feature (1888)..(1888): n is a, c, g, or t
  misc_feature (1898)..(1898): n is a, c, g, or t
  misc_feature (1914)..(1914): n is a, c, g, or t
  misc_feature (1918)..(1919): n is a, c, g, or t
  misc_feature (1939)..(1939): n is a, c, g, or t
  misc_feature (1953)..(1953): n is a, c, g, or t
  misc_feature (1955)..(1955): n is a, c, g, or t
  misc_feature (1963)..(1963): n is a, c, g, or t
  misc_feature (1966)..(1966): n is a, c, g, or t
  misc_feature (2002)..(2002): n is a, c, g, or t
  misc_feature (2006)..(2006): n is a, c, g, or t
  misc_feature (2029)..(2030): n is a, c, g, or t
  misc_feature (2060)..(2060): n is a, c, g, or t
  misc_feature (2062)..(2062): n is a, c, g, or t
  misc_feature (2077)..(2077): n is a, c, g, or t
  misc_feature (2096)..(2096): n is a, c, g, or t
  misc_feature (2118)..(2118): n is a, c, g, or t
  misc_feature (2123)..(2123): n is a, c, g, or t
  misc_feature (2135)..(2135): n is a, c, g, or t
  misc_feature (2137)..(2138): n is a, c, g, or t
  misc_feature (2147)..(2148): n is a, c, g, or t
  misc_feature (2155)..(2155): n is a, c, g, or t
  misc_feature (2161)..(2161): n is a, c, g, or t
  misc_feature (2163)..(2164): n is a, c, g, or t
  misc_feature (2171)..(2172): n is a, c, g, or t
  misc_feature (2177)..(2179): n is a, c, g, or t
  misc_feature (2193)..(2193): n is a, c, g, or t
  Peptide Sequence Number=SeqID_6691
  Probeset Number=SeqID_12978
nggtcgagctgncnaaactacntcaccangttgcagtnagcatncatgntanttcagtngatcaggcgactncatgacgtgcacaccantatcagccncaccgacgatgtgatccgagggtcatgctgtagtagnctntcaatatagttcatacatgntantanttgatgcgtcgntcacctgcgangttgnattagtagctgtcacgntacactagtcgttgcatatgtactantncgntantgcactgatcatagtcancagacagnagtgagctntcatcaaagtantctagcttgatgatgtctcatantgnagatcgaacatgagtgtagntgatnantcactactcatctcatccccttctgatcaccancgagacgngccgncacganccttngagtcgtgactcgatacgtcaacttntancgtatgtcttcgtatcgcagtangtgctcaccatccanctttacatcgantngngacnttcactagncgtgaggccgtgagcatacancacgntctagctacgagacagatcnancgtcgacgncactacgnatcgatagtctgaatgcgcgcantctcctactatgtcgcacgtgcgcgtccgtactgatcgtgacgtagtcatctctactatctgacgcatgtgtactntacgacatagctctatcatactgacgcgtcagnatnagtcgcagagtagcctgctngnctatcagacagctatgatcgcgngatgatgatggagtagnatgatcgcgcagntacnaaacacaacatgcnagatcacgagtatntgccatagtaggtagacgtntgcgtctaccacatcgtacagnagngactatgtatgcagacgtgcngtcaaggccgagtctgtatcacatattcactanccacagntcatntgcttgcgccgtcggtngccgctgactgaagaggggtgggcgtggtgnngnnnnnnnnnttagnngnnngtagttacgccgatcatnacatcactgataacagtatcatatcacagacgatatnacacagctgatacgcatcatncatgcgagacgtcgtatcttgtgtgtagtgtgtgcgtgagggggtgtgtggagtggtgtgtggggtttgtttgtcttcctntntnttggttttatatatatntattnttnntttttnatatantatantntatatactctcattgatatgtatatatatactatcacatcgttacgactgacgtgcacatcgacagcntgcgctctgagtgtgacattctgtcgagtatagtacgntatgtacagcctctgatngattatatcacgagcactactaataaatctattatactcatnttcantcacagcatattctgagcatcagcgctggtgtgnagatnctctacgctgtgcgactcaagtcagttcgtcgtctgagagacatgacgtactcgagaatcgcataaacnatggatcgttgagtngtntgcgtcactagcctntggagcgncgnngntcttgtgtctattagacgagcagaaggacacgaggcgtctcngctgtcggcgtgctgcagatgatgcgcacagatcgtctgagatcgtccctctcttagtcgtccttcattgatactatagnacacatggcgcccgcgatcatacaagtatcgaggcgatcnatacgcgccgtgacgtcgagaatacgactaactgctactaccnctctcncgtagagtcatgtctaagtnggagcntncgtgggctgtagcacgaggnccctatgaccgtgcgagagtcggtcttagcntgctgtgagcancagaagcatcatacacccatacgagactttacnagaggagaaggtaggactgatgactagtaatagagtangagactaganatggctgtagtatgtntgtnntctctcgtctctctatgtgnactagtaagtgagngngatgctcntgngtgctttgctgatagttatgatggggggagagctgnatcntttgcctcacgtatcatagtatnngagggggcgacgcgcatcgatgtctattgnangaatatatatgttgnattgttgtggtgctctctngggttgccgacagacgaagggnagtanggtgtgtagatntnntacgtacgnncggcgcnagaagnannaaaaagnnaccgnnncaaaccccaaaaan

SEQ ID NO: 3200 - DNA, 1395 bp, Glycine max
  misc_feature (1)..(1): n is a, c, g, or t
  misc_feature (5)..(5): n is a, c, g, or t
  misc_feature (128)..(129): n is a, c, g, or t
  misc_feature (181)..(181): n is a, c, g, or t
  misc_feature (272)..(272): n is a, c, g, or t
  misc_feature (415)..(415): n is a, c, g, or t
  misc_feature (477)..(477): n is a, c, g, or t
  misc_feature (1028)..(1028): n is a, c, g, or t
  misc_feature (1207)..(1207): n is a, c, g, or t
  misc_feature (1372)..(1374): n is a, c, g, or t
  Probeset Number=SeqID_12979
naatnatatcgtgcgtcagcgtcgtagagttacgtctcggtcagattgtgaatgagatgtagcgtgtcacggtgcatgttcgtatcatgagagagagtagtcatcaaagtgcgcgagagtagtcacanngccggcgtaggcgtctccatattctccatgctctctcacatctctctatatnacgtacgacacacacactcgtcgacataggacagtagaaaaacgtggtgtagccgcgagagagagcgtgaagtatctgtacagatctgtanttattattattatatcaattcatagctcggtcacaatcagatggtgatatgttccacaagcacgctcgctaggtggtaccgtgtgtggatgatgcggcagagcgcctactgtattctagttgctgcgcgcatcacactctagngtctccctccgctgcgacatgcgactcttacaatagcagaagagtcgtactatgtagagtgncctgtttgtgtgcgcgtgagtgacaggcgtgcatatagaagtgattagcttacactattgtaggtacatgcgcggggcggagacttccagcagcttcgcataacatgcgtcttgatactaagacgtctggctgtgcactcaccagtgggatcctcacacacctacatgatgaggtagctgcgaagacgagaggaggtgtctgcaatctaggataacttctgagttctctctacgagagtgtgagagaggcatggtgggacacaatcgatacaattctaagcagacggctacctgcgcgcttgtctctctaaggatagtgccgttgatctcttgtagaataaaactcatagcgtggagctgtgcgtgagataaagactggaaatgaaggggtaatgagggaaatggtaagaggacaaagtgaataaggtatctgtagtacttcgagtgaggcggctgtgctaaaggtctttaacgaaggtcgatactggactatacaagatacccgggcgggcgtcactataacgcgcgggagcacacggtgagtttaatgnggaagagtatatcggctatcgcggacacgtcgtggcaaatcgtcaataaaatatacacctattcgtagggagaggactattcgcgtctatggtgctataatagacgccacattgtgagtgatgttatgagattatgagtagcagatgtgagcgtcgctgagctgagatagcatatgagncacaatagtggagtgatatcttcttggcatgtctctcggcgggcatcctgagtctaattctcatagtaggttggtctcgcgcggccggctccctgcgggccgtctctccctttctgccctcttacccacgcgcgatattatatttgtaggaccagctgggagtgnnnggcgcgaggagtagtagaaga

SEQ ID NO: 3201 - DNA, 1363 bp, Glycine max
  misc_feature (129)..(129): n is a, c, g, or t
  misc_feature (253)..(253): n is a, c, g, or t
  misc_feature (347)..(347): n is a, c, g, or t
  misc_feature (576)..(576): n is a, c, g, or t
  misc_feature (943)..(943): n is a, c, g, or t
  misc_feature (997)..(997): n is a, c, g, or t
  misc_feature (1076)..(1076): n is a, c, g, or t
  misc_feature (1290)..(1290): n is a, c, g, or t
  misc_feature (1296)..(1296): n is a, c, g, or t
  misc_feature (1303)..(1304): n is a, c, g, or t
  misc_feature (1310)..(1310): n is a, c, g, or t
  misc_feature (1317)..(1317): n is a, c, g, or t
  misc_feature (1320)..(1323): n is a, c, g, or t
  misc_feature (1330)..(1331): n is a, c, g, or t
  misc_feature (1340)..(1346): n is a, c, g, or t
  misc_feature (1349)..(1349): n is a, c, g, or t
  misc_feature (1356)..(1356): n is a, c, g, or t
  misc_feature (1363)..(1363): n is a, c, g, or t
  Peptide Sequence Number=SeqID_6692
  Probeset Number=SeqID_12980
cttgacggcgtatgagttgagtgatgtgtgtgtcgggaggactatattgtatatgagtaatagtcttgtgtgagaggacgagcgcgtactatgggtaagtgtatagaatgtagatgctgcgtggagcgnaggttggagagaatgagcgaggtggtggagaggatggagagattgagagtgagagaggcaggtgaggagaaggtgtgggagcgatgtgatggttgattgttgagcgcggagttggaggtgggantgagatgagatgaagtggagacggtgagagtgcggatggcagtgtgtagatgaagggagtgtggagcgcggtgtgggcggcatgtcgaggagangagaagatgagagcatgagagaagatagacgaacagagagagacacggagcgatagtatattaaagatgccagaatatattattgatcaaggtaatcgcaagtgtgatgtttgttttgcgtttactggcgacggggaaggtcacacactcgattttagttgcgaggtcaaagagtagcaaggcgagaaggataagcgatgtataattatgactgaaagacaggcgtggnagtgggtgttgggtgtaaagaaataataaagtcgattgctgtgaggttgtgttagtgagcagtggggcgagggtcgcggttgggtattatatagttgtattttcgaagtgccgcgccggggagagggaggcggacgtagcggaggttgatatatgtattgttgtgtgtatcgttctgttatctatgagattgcgagagagaaatgcgtggatacggaacggagtaaattcagttcggcggttgtgttcgtgtggtgtgtgctagtggggtggtgcgtttgttgtggtgcaataaactgttggtggttcatctttgtgtaatgatagtaaatactttcacccattatttgtgatgaaatacaagcggncgattacagtggcgcttgggggggcggcgggcgaagattcgcgcgcgcttcctntgcccgctcgcttagcataacacaatatttttatggacttcgtctagaacaaaaacacagtaaggattaaataagaatnccacatagcgaaaatttattatcataaataactaaggtgtaggtgaggggcggagcggtggtatcttatgtgtagtctgctcatgctcgttctgctgtgcacagtaatgtgccgtgtcaagcgcgcgagaggggagcacatcgtagatttcttatgagtctgcgcccggcccggtctgtcgcgccggagtcatgtcaggtctctcgcaaaacancaaaantaaatgnnaccacnaaacccnaannnnattcacnncacacaaannnnnnnaanacccccnaaaaccn

SEQ ID NO: 3202 - DNA, 1814 bp, Glycine max
  misc_feature (43)..(43): n is a, c, g, or t
  misc_feature (89)..(89): n is a, c, g, or t
  misc_feature (186)..(186): n is a, c, g, or t
  misc_feature (243)..(243): n is a, c, g, or t
  misc_feature (513)..(513): n is a, c, g, or t
  misc_feature (540)..(540): n is a, c, g, or t
  misc_feature (651)..(651): n is a, c, g, or t
  misc_feature (681)..(681): n is a, c, g, or t
  misc_feature (1128)..(1128): n is a, c, g, or t
  misc_feature (1236)..(1236): n is a, c, g, or t
  Probeset Number=SeqID_12981
cgtagcattcatgtggaccacaaaatgacgtcgtgggtagtanttatgtcgtcgacgcgagacggctgatgtggagtcgctacgcacanttcgcgtatctatggatcgcgacgtgtcgcgcgccgcgcttcattacttcactgtaattagatgcgcgcagcgctggcgccgccgcatcgtagtatncaacctctagtgatcgatatatatcgatgggactgtagctagctaccacgtccgccngtgtacgtgagcgtgtgatttatcacatatcctccgcgcgcacagccagcgcagcgtatattattgttctaggcgcagatagcagagcgacgcgccgaccgagcctaatttttttgagcccacctatactatatttgtatatcaattactagcgtccggccgcgcgacggtgagcagcgtcgtattcactcgccattgtgtgctcacgacgcgcccgcgagcgatatttatgtgcgccgccgtcgcgtatgtatttttatctcgagagtnacgtcggacgacgacgcacgcacgagncagcgcacgtattttgtacgtcggagccgcgacgtgacacatgtattgtcgtacctctatcctaatatcattgtgcgtctgtttagcacgatgtcatatctatttgttctnatctatgatcatcataagcgcgagcagtcngtattcgatgagatcaggccgtgtttggttagacataaacagatgtatgtctcatacaatcaacatacgacgcttcttgttgccactgactaaatagcacgtcgggaggagctgaacgcagccatcatatattgacacggtatagtgctaacgtcgccacaacgacacagcactgtattcgtgtcgatttatattgtgcgacaccgattcattgtctcagtgtagacacacatgttgtgatagtcacatattcaccgccccatcgtattatctacattgcacgcgcgcgcggagggatgcgtattgtaatcgcgcgcgtcggtcacccattatcatacaatcatgcgtgcgcgcagtatacatacaacaagcgtgggtgatcaccaacataagtatagataggcggttattcggcagccagcaagctatttcgtgtattagataatnatatatgttactatttttatctatccacacacggtcaggagatgagttcgcgcgatgagatcatatataaccacccacgcgagacgttggtatatataaacacctttncgcgtgtcgttggtcgtgggtaggaggtggaggatgcgcgcagaacagcagcgtgggtctttgttattccgtcgccgccgttcgagacaataacgcggtgcaggggcattgagggggtgcggcgattaatatagagaaattataaggcggcgcttatagctcgccaatattattttaagtatattgatgaaggtagtacatgaacgcggactgcggtcgggtggcaactacatcacataaatggagaggatgccgcgttaacaagatgtcggtggcgcgggcaatccggtgtgacgacaacgctcttggggtgttgcacacgagtgttgttatctgtgtggtgtgcgcgagagcgacgcataaaaaccagtaatgtatgcaacacatcacatctcgcacggcgcgcggccggactaaaattatactatatattcgtgttatcgcgatacgatagcgaaggggcgtacgacaacagagcaagcgcaagaaagagacggcgatcggggttcgcgggtcggcaccttaatggtgatcagacggttagaacgtagcgaccgccggttggtcgctggagtctt

SEQ ID NO: 3203 - DNA, 282 bp, Glycine max
  Peptide Sequence Number=SeqID_6693
  Probeset Number=SeqID_12982
cattgtaattggtctccatatagggggaattgggtagcggcagtcccctcgagttagctaggtagtcggtgattcctcctcttgatagtcagtcatatgtcagcactggtgttaaaggcacttttgggtgatgttgatcctgagtatttcaggtcccggcagctgccagaaaaatgtgacgtatattcatttggggtggttatgttcggaagtgatgtgtacaagagcacagagtgtgccatcagcatcaacagggtcacattaccttgaaagacatgggaa

SEQ ID NO: 3204 - DNA, 638 bp, Glycine max
  misc_feature (638)..(638): n is a, c, g, or t
  Peptide Sequence Number=SeqID_6694
  Probeset Number=SeqID_12983
tcagctacgtaggccccccccccccaatttattgaaagccgtttccgatggagttgttgcactgaaaggaaatgttaagtcattcggaattgttaccacaccgatgttgcactacatggttgtttgtgccaatacaaatggtgcctatggcacaccaaccgaagaaggttattatcagaaattaataactgcattcagagcattacgtggaacggaatgtgaacgtggcaattacaaaaataaacttttattcgatggttcgaatggcgttggtgcacgcaaaatgattcaatttcttaaacggatgaatggtgaactgaatgttgaggtttacaatcaaggtgaagggaaaattaatgaaaattgcggtgccgattatgtgaaaatcaaccaaacagtgccgattggaacgccagccaccgaaccatacacgcgttgtgtttcaattgatggtgatgctgatcgtattgtttacttctttaccgatgaaaacaataaattttatcttttggatggtgatcgaattgccactttgtatgctgggtatctgatggatttggttaccaagtgtggaattgatttgaagttgggcattgtacaaacggcatatgccaatggtggctcaactgattacatcn

SEQ ID NO: 3205 - DNA, 1512 bp, Glycine max
  misc_feature (39)..(39): n is a, c, g, or t
  misc_feature (384)..(384): n is a, c, g, or t
  misc_feature (634)..(635): n is a, c, g, or t
  misc_feature (1066)..(1066): n is a, c, g, or t
  misc_feature (1068)..(1068): n is a, c, g, or t
  misc_feature (1075)..(1075): n is a, c, g, or t
  misc_feature (1147)..(1147): n is a, c, g, or t
  misc_feature (1171)..(1171): n is a, c, g, or t
  misc_feature (1324)..(1324): n is a, c, g, or t
  misc_feature (1422)..(1422): n is a, c, g, or t
  Peptide Sequence Number=SeqID_6695
  Probeset Number=SeqID_12984
ttgttcgcatcgtcatgggctatcggtacatttcgtctncacctacgtatatatcgcgtctctcattgcctcttgcagtgtgtattagattagatatcaaaattgttacatagatagactctcgctatgcaccatagaagcgtgtatgtacctgctcgtctgagtatacgacgtggaccacaactcacactcgtagtcaccacactcataatactaaatcacaacaccacgccaagtaagagcggcaacgcaccaacacaacataatattatattctatctacatatcataatatattattatacatcaatccgcatgatgtgtacgatgagcacggtatgtgtggggcatggtcacgcgttggttgatccaccatcgcacgancatccactccaagacgaccgcgggcgccgcccgcgccgcgaccacccgtcgtgcgcagtgcgcgcaccgccaatcactaatacaagagtcatcacttaatcacttatagtaatatcaatcattcttttatctatgtgtgagattatcgcaactcaagactaagcgccgccgcaacaaacagaacagccactaacaacgcaggcagcacgcgcagcgatggctcagcactccacacagcagcgacgtcgannagtatcgcgtaacacagtacgtagagtagatcaccgtgctgcgctacgactctcgccagcacatgacaatatccttaataattaagtacataggacgcgtaccggcgaccaagcacccgcgtggcgtggggtcgacgttctctctacatctataccttctcagtcagaccagtccaggcgacgttcagtctttattggttattgtataaaatactgacatgtatatcgagacataagtaccacacatcccacccctctcaccttcacacacacctgcctcatccgtgtatccttcttcttctctaattttcatacacaaacagattgatgacagatagaggttgtattgtttgtgatatatatatattattacatatccatcctcatcacaaccacacagcgttgtcgtatcgtcatcattcaatcgggtncnctgtttngttggtgaaaaagcagacgacgttaattgttgtgtaacgtccattttatctatcactactttccatcactcnttcttgggtcgtctgtccgcctgntcggtttgtggtggaattacatcggtgggatgggtaacagagtattatagacaaccgaccgagtacgagtgttagatgatattctatagtatcactaactctctctacatacatctcactaacatatacaattacaaataattatactcattnaggagatgatagatatatttacaaatcatattgctcatcctattcttactttgtctctcttattctctcctaattccgacgagaccgcgggcggcggngaataattagtaattcaacacgagaggtgtaatgccgttgttgtgtgttgttggtgtgtgttacacaacgcgacacagcagcagacgcaa

SEQ ID NO: 3206 - DNA, 1652 bp, Glycine max
  misc_feature (417)..(417): n is a, c, g, or t
  misc_feature (852)..(852): n is a, c, g, or t
  misc_feature (1203)..(1203): n is a, c, g, or t
  misc_feature (1315)..(1315): n is a, c, g, or t
  misc_feature (1320)..(1320): n is a, c, g, or t
  misc_feature (1371)..(1371): n is a, c, g, or t
  misc_feature (1450)..(1450): n is a, c, g, or t
  misc_feature (1617)..(1617): n is a, c, g, or t
  Probeset Number=SeqID_12985
gagggacgtgagtcgggcacgcgtctgcgctcggtctcattacacccaccgcgccctctactaaaaaccactatagagtgtagttcggtgtgtggtccccccttctgccgcaccgcctgttcatctgcgctgctgtctctactagcgaattatttactatatttctggcacttcatatggatcctggatgttgtaattgtgtaagcgagccgaggacagacgacataaggtggatcgagtagctgtggcccctacgacgccggttctatggttgtcttaccctatacatacggctaagcgccgacagccaggtcttcgcgcactccagattcagatgcatgagtactactgttatttatactctctgctagcgcatcgtacatatgtcttcttacttgtatgcacgagcgacaatcnaactctaacacatatcgaataagggctgtaagataataacaacatctcatagccctatatattcaatctccatcaatctagaaggtgtgtattcgatacgcagtaggggcgatgtttaaggaatagacaccgacgcgtggagacatatacataggggctagtgtgagagtatgtagtgccgctgacaggcagcagtcagcgagaaccggaggagacttgggaggccgaagatgagcaggtcgctctatcactccgaccttctacagagcatcgtctgacgggacaacaggtcgtgatgagacggggcgctcgacatggagtagagtgatgtagactgagcacagtctactccgagcagcgcatgcaagcctggtgtgcccctcgcccagcaagagagataagctgactgtatccctaaggtatagagaacgggangtgtctgcccgagtgttaatcattaataactaccgagagacggacgttattcaccgtcgcgacacagctgtgacgatcgtagtgcggtagtattatagagtgttatcgatgatcgtgctacacggtagagtacgaatagtcgagagcgttgtatcactatatgaacggagacgtaatgagaaaagtcacgaacgcacatgagtcgacacatatgtcgcatcgtaacaaatgtgatatatcttgatgtaggctcaagttcgatcggaggtaatggacagatatattattgtcagcttacgaggtgtctagagtaaagggctgcataagagtagctgaacgtaggcgacttanaccatgagatgcatggtagcgaatacacgcatgatagaacaaagcgcatacgggcgacgctagacattcatttgtcgcaatcgatacagagtggagacatgagaacgagccngtctnctatatggctgcgtcagagacagcctgcatgcgctagtgatcgattctcangacgtccgcgacactagagtatgagagacgatatccgaacatgcagatagagtagtgccgtgagtcaccacgacatgantgtacgctcatgagcatcgaacatctgagtcgctgacaagtgtcataggacgtcatgccacacgacgatgactataggtgtttcgtcagcacacacatctgtcagtacgatctgacgtgatgcgtagataggtcgatatcaaatctgattctgtcgaatagccgcantagtcgagctcgctttctataggtgtgcacgccag

SEQ ID NO: 3207 - DNA, 510 bp, Glycine max
  misc_feature (15)..(15): n is a, c, g, or t
  misc_feature (431)..(431): n is a, c, g, or t
  misc_feature (445)..(445): n is a, c, g, or t
  misc_feature (448)..(448): n is a, c, g, or t
  misc_feature (454)..(454): n is a, c, g, or t
  misc_feature (472)..(472): n is a, c, g, or t
  misc_feature (474)..(474): n is a, c, g, or t
  misc_feature (488)..(488): n is a, c, g, or t
  Peptide Sequence Number=SeqID_6696
  Probeset Number=SeqID_12986
tcgagtcagctacgntagggccccccccccccaaaaaagtgaatgttgatataattgtcaacgtggaggatgagaataattcggatatggagtcaaaggtgaatgtgaaggaaattaaatctaagaaatcactgttaacaagaacaaaaaatcaaaatgaaatgtcagataggttagaaaaagcagaggagagcgatttaaataaaagcgagagcgttggacaagcaacagagcaatacatgaatatttgtataaataatgaggttgatagtgatggtggcgaaggttttagttttttctatgttaacaagaacgtgtataacaagaccaagcactattttgagacaaaaacagacctgaatgaagtctgctcgtgtgttggagggtgtactgatcctgcgatttgtccttgtgcgaggtacaactttganaattgcgggaagantgnttgctntatttatgatcctaaacncnagaaaaagaagatntttaaccaattgttgagcaaag

SEQ ID NO: 3208 - DNA, 666 bp, Glycine max
  misc_feature (22)..(22): n is a, c, g, or t
  misc_feature (24)..(24): n is a, c, g, or t
  misc_feature (78)..(78): n is a, c, g, or t
  misc_feature (100)..(100): n is a, c, g, or t
  misc_feature (160)..(160): n is a, c, g, or t
  misc_feature (177)..(177): n is a, c, g, or t
  misc_feature (205)..(205): n is a, c, g, or t
  misc_feature (623)..(623): n is a, c, g, or t
  misc_feature (662)..(662): n is a, c, g, or t
  Probeset Number=SeqID_12987
ccgcgtagcttataacagtctntnaacctattattctgcagtgcagaatttgaaagaagatgcatataagaattgacntactatccaagctttagtgagnaaaagaaatggacttcatctttatattattaggtggaaaaagaggatagtgagcttcaangctattccaactaccgnaggtaaatgggattagagagcatgtaanttttcttgggatttgtacccgataaagcacttacctcttattgtaaattagctgatttatttgttatgcccagcaaaggggaaggttttggtattgtatttattgaagccataagaaatcaaatggcaattatagctgccaacaccggaggtacacccgaagccctaggttacggaaaatatggcaggttggtagacccggataatattcatgaattagctactgcaattcgcgaggagtattataaaaagagagcgtcaaacgataataattggtctgaaataatgcatttatatggtattgaacgtttttgtaatgaattgaataatcatatacaagaagtacttttatgagtagtaattcaaaaaagatcctgattatctacgagtttttttatcctgcttttaaggcggggggnataattaggtctcttgagggggggcccggacccaagagnaaac

SEQ ID NO: 3209 - DNA, 377 bp, Glycine max
  Peptide Sequence Number=SeqID_6697
  Probeset Number=SeqID_12988
acagcccaaaagggaccagtggctttattggggtcagaatccgcacaacaggggcggattgctcccactcctggacctcatccaccacttaaccctacgaggcctaaccgtcacaatcataatcacaccaaaaaacgttgctatctgaaaccctgttttatactcgcattcaaacacggaccaaactttaattctgccattccctacccaccctaacaggctctctggcgcagacaacggccgtgaggtcggcaacagaagacactaccccttcatcaacgccctctgcaaactgcaaccagaaattatccactgggtcgcaacccacagtaaccctactgtaacactcgtaatcgatttctttctcgggtggactc

SEQ ID NO: 3210 - DNA, 1427 bp, Glycine max
  misc_feature (56)..(56): n is a, c, g, or t
  misc_feature (143)..(143): n is a, c, g, or t
  misc_feature (194)..(194): n is a, c, g, or t
  misc_feature (218)..(218): n is a, c, g, or t
  misc_feature (359)..(359): n is a, c, g, or t
  misc_feature (524)..(524): n is a, c, g, or t
  misc_feature (1239)..(1239): n is a, c, g, or t
  misc_feature (1394)..(1394): n is a, c, g, or t
  Peptide Sequence Number=SeqID_6698
  Probeset Number=SeqID_12989
tccataatcactccgactcatctagatcttaatctattcacaatattatacgtcgnctctgcgcagctacatgttgttgaatatatcgtttacgttacactatcatctcttcatagcactattgatgtgatccgagatcaacnagtacggtatcagtccgtgggatatccactcagtaaccacgatagattttngcctatcacatctcactcttctgntggttccctctctacctgcgagtctctgttaacgcgtccgtattttcattcctcgctcacttatcagctaggttcatcttattacaatacaagacagcgttctccatcactcagtgtgacgtaatatacactctacgtgcncatatatctctcggtgtgtgcacaatctatctacaatctcattactgaaacttatcaatataacactggtgttcaatatatataagctataagtgtaatactcttctgagtaatcactgtattatcacacttcatcatctatatataatcacgatatccacaatntcttcgacaaatagtcgatcaatcatcttcccatctattgcctacaatactacgttagtctcttcgactcatcttatttacattatgtaggtattctctcacttttcgcttgattttatttatctcattgtttatcttgattaatctatttttgtccatctttcatgtcgtctaatatatcacatcaaaatcgttcctcatatcattatatgacgtatataatagttttattgtgcacaatatatattttgtgtgaagaacactcactataccagcttttgactcttactttctaaattgctgcatcttatacacaccatgaaatatatctaactgtaattgcatctaagctcgatcacttagattgtttactctatatcaattctcttgacatacacatctcgtgtcaccacctataagaacaaaaacgacttgcaattatagactagatattattaaataaaattacaactgtctctcccctatactatttttttcgttttatataccatatacattttgatttctctcctatatctcttattatttgtattctctctccttcttaccttatcttcaatatctcgtttcttaacagacaagccacatccctttcattctatcttcttttagcttatttctcactatctactttcctccactctctcctgctcatactacaccaattttcttcaatgggtcaaatgtattaatnttgggtgttaaacactctcattcatatctttgtcaaacatattctctgcctatcctattctcttgtgcggggaaactgccctcgtgctttatctcttttttaggattatctgtcttttcttctattgtatttcatttatatgtgtggagcggctntcatattctcttagaaagtaatgtatataaggg

SEQ ID NO: 3211 - DNA, 1980 bp, Glycine max
  misc_feature (1)..(572): n is a, c, g, or t
  Probeset Number=SeqID_12990
nnnnnnnnnnnnnnnnnnnnnnnnnnnnnnnnnnnnnnnnnnnnnnnnnnnnnnnnnnnnnnnnnnnnnnnnnnnnnnnnnnnnnnnnnnnnnnnnnnnnnnnnnnnnnnnnnnnnnnnnnnnnnnnnnnnnnnnnnnnnnnnnnnnnnnnnnnnnnnnnnnnnnnnnnnnnnnnnnnnnnnnnnnnnnnnnnnnnnnnnnnnnnnnnnnnnnnnnnnnnnnnnnnnnnnnnnnnnnnnnnnnnnnnnnnnnnnnnnnnnnnnnnnnnnnnnnnnnnnnnnnnnnnnnnnnnnnnnnnnnnnnnnnnnnnnnnnnnnnnnnnnnnnnnnnnnnnnnnnnnnnnnnnnnnnnnnnnnnnnnnnnnnnnnnnnnnnnnnnnnnnnnnnnnnnnnnnnnnnnnnnnnnnnnnnnnnnnnnnnnnnnnnnnnnnnnnnnnnnnnnnnnnnnnnnnnnnnnnnnnnnnnnnnnnnnnnnnnnnnnnnnnnnnnnnnnnnnnnnnnnnnnnnnnnnnnnnnnnnnnnnnnnnnnnnnnnnnnnnnnnnnnnnnnnnnnnnnnnnnnnnnnnnnnnnnntcctatgctgttaggcatattgaagtttataacttcatagtagataacaactcttctggcccctaaaacactatcatctgtataatcaaatggcattgaagataaagtacatgattacgtgtttatttttctcttttttgaatgccactttcccaaagtggtagttactagttagtgttgcaataattgttgacaactaattgcaattgcttttgttgttcaccaatttccatcttttttcattagaaaattttcctagttaggaatcacaaatgtcagattcaattgtttttttcaagggttcctcctcttcaatctcctacatacaaattttggcttaattttctctgatttgtcatgctaagtgattcttatgtaggccactttagtgcagtgtttcaggtacatagtctcaagtctttccaaactttttgaagataatttgaatgggacacaaattgcacataaagctggcaaattatctgtatttttgggtgtactacttttttactgatatgagaattggacttgattagcttcaacatctattgttcaacgcaattttaaaaaaagaatagctttattcctcactcatccctaaggctcttttttcataccccctccccttttaactattagtattaggtttatttttgaaactgcactcacaaaaattataactttgttcttgcagttaaacattatacaggataatacggcttcatagggttgaggttattcaatttttctgctgatgggattggcgactcagaatcctgaacgttagtatgtacattcatcgtccaggtccaggggctcatgtatctgcctttgtattttttattttttttaccattattcttgattgaattggtcagttacaaatgaacagaatattacatacttaaaaaaaaaaaaaaaaaaaaaaaaaaaaaacacaaaccaaatagaaaaaaaaaaaaaaaaaaaacaaggaaacacaacgggaaaaaacaaaaaaaaaaaaatttctcgccccccccgggggaaaccctctaatttcaggagaagggggcgaaacaaccccccgaaaaaaaaaaaaagtgtggggcatccggggaacccaaaaaaaagaggggccctgtggggggcctaaactttaccccctcccccaagagggggaatctcccccaaagggggcgcgcgcaagaccaaaaaaaaaaaattttttcgtgtccccccccgtggaagaaaggattccggcgccggtgcgcaaaaaatggggggggaaaatagacatgtaggccgcttattccccccacagggatgtcgaaaagcgcccgcgcccccactctactttcccgaggaaaacaacatgggtcataagtagttcacccccataggacaagcactaggatacaacaacccc

SEQ ID NO: 3212 - DNA, 1452 bp, Glycine max
  misc_feature (215)..(215): n is a, c, g, or t
  misc_feature (228)..(228): n is a, c, g, or t
  misc_feature (956)..(956): n is a, c, g, or t
  Peptide Sequence Number=SeqID_6699
  Probeset Number=SeqID_12991
atgagactggggagagtcttgcactgcggactggtttatattactttattcttaagagagggcacttgctgcgggggcgtgcgtgtgcgtgtgttgggttgttttgcaaggaggtgtggacgcgggtgcttgtccgggaaagaaggggaggagagaagctaggaggaggagatggattttgccggacagagaaacgagccgctcggcgcgcgccncctaccacgtggngcgatcgatgacaggagggcggacaccccgagcactagctcgttagtgcctagaaacaagcaagaagtgttaagccacaatactcaatcctataccaacacgaagaataaccacactagtataacacactggaagaccaacccgaagtgcgcccggacacgacaccataacagaatagtgaaacgggagggcgcgcgcgtccggcctatactagcatatgatgccgaacaatccgcccagtttgcggctgacttctctgccagcgtcgcccgacggccggctgctgcggcgctgtgtgagaaggagctgtgggtggggatgtgtgaccttcgcgtagctacacatggcgtatagtagggctgtggtaaacagtcgaatagccgcagtgcgcttcgctcgcctgcccgcggcatcgctccccatctcacggtcaggtgggggtatgtggccggcgaggtgtgttgtgtggttccaccaccgccccgccccccaaacacacaggaagaagggtaacttttctggcggctgtcgctacgcatcgaatctatcttcaacacctaccccaggtcatagggagagcggcggtgggtctgacgcgcacgtcaactggctgcggcgtcgtccgtccgacgctgactctgcgcgacgagctagagtaagtagatcataccgagcggcgagcatcagagagagtcgtgtaagtattaggaagagagcagagtgactgncgacgccgcgcgaacgcagcgccaagcgaccaggagcagcgcacactatcaaggagaggtgcgagggtagtaaccacgatgtacgcatacacacactgagtctcagagtacagagagcggcgcgttcagatagtcatatggctacgcgtgcagtgagtatagcgtcagactcaccaaatccgtggatgggtctaggtggcggcgggctaactgagtggggcgaagagtgggcggagagacgtcgcacgtgtcacactctgcctgcgcatcgggccgactcgcggctgaagcgtgttcgtagcgtgagtgtgatggcgagcgcaccacgcgctggatggacgcgacgcagcgtcacgtggacgctccgagtcagtgctatgagcgctgctccgcacacgacgtctgtgcgcatgaagtgtgatagagatagatcacactcactgacgtccgccgcggcgcgagcgcgaacgcatcagaggcatctgctcacgcgcgg

SEQ ID NO: 3213 - DNA, 1346 bp, Glycine max
  misc_feature (15)..(15): n is a, c, g, or t
  misc_feature (17)..(17): n is a, c, g, or t
  misc_feature (20)..(20): n is a, c, g, or t
  misc_feature (123)..(123): n is a, c, g, or t
  misc_feature (208)..(208): n is a, c, g, or t
  misc_feature (246)..(246): n is a, c, g, or t
  misc_feature (412)..(412): n is a, c, g, or t
  misc_feature (444)..(445): n is a, c, g, or t
  misc_feature (724)..(724): n is a, c, g, or t
  misc_feature (1081)..(1081): n is a, c, g, or t
  misc_feature (1185)..(1185): n is a, c, g, or t
  misc_feature (1196)..(1196): n is a, c, g, or t
  misc_feature (1256)..(1256): n is a, c, g, or t
  misc_feature (1260)..(1260): n is a, c, g, or t
  misc_feature (1346)..(1346): n is a, c, g, or t
  Probeset Number=SeqID_12992
ggttgttggcccctntnttnggtttttcttctcccccccccccgcgcggctcgtcagtgttgttactcgctcgcgccgtaggagacccccccaacgcatgtttcacgatatataaaaaaaganataataaaatatacattatttcctctacattagatagaaaacagcatcctccgcctcgcgcgcgtggccgcagcggcaggcgganacggacagccctgccaccgtctaccacgcgcgaggtgngacgccctggcaataacagacaacagaaattagtccaacgaaattaaatagcgaaagtgcaatattacaatatttagtgatgtggtctgtgttaatcatagtatggtctccagcacacttccgttcatagaagatgaagcactgtgcgcctatatgtgggagagangaaagatggggggtgtggtgctgctggacttnngtagagacaacacactcctgacctacctagacagaaaggtagactccgggttctaggaaccccggtattcttatgtatactcccaccgtcctctacatgctatatatttaacctactatcagcacaccagcgacgacttgatcccacccacgccgctctagtcatagtgcatatttctctctatccctcatatcctcctaatatatactcctctattatcataacaagtgtgacaggagagcgacagccatgtggctatcatttagtgtcgaataacancaaacccacgccgttctcttagtgcaacgccttgatcacgctctatgacacgtgtctactccagattctgcgcggacgcgcttctgcgcggcgcctcctctctacctactagaatttattctccctccgcgctacgttagactactcaccactcatttaagctgttctatactctctacaacgcgtatctaggcctcaccgatacacggccaagacatccgctgcgcttgttctcgaccctgctcgatcgaatatgccatcataccacccaagattgaatgagcggcgatagatttatccctgactgaatcgatttctatagaaagcacacacgcacccgcacgctcgaccgtgatngctgatgctagactcggctacgcgcctgatccgcgtgccatgattgattatcaccactccgtacgtacggtacgagtatctactcacgatccactagaacacanttcgcacgaancatcatgtcctatatcttagtccatacacactgtctgctctatgcatgtgtggtctatgntcgnacgagataaagctacctctactgagctcgtcagacccgtaggtctcgtactgtgcctacgcacgaacacgacgacctactgtcatn

SEQ ID NO: 3214 - DNA, 168 bp, Glycine max
  Peptide Sequence Number=SeqID_6700
  Probeset Number=SeqID_12993
atactttgatcattttcatattctcataaaacctagcaaaccttttcttgataactatggcagaggaaaccaagaacgtagttcatgagcaggaggtgccaaaggtaacgaccgaggaatcatcagcggaggtcacggatcgaggactgtttgatttcttggggaaga

SEQ ID NO: 3215 - DNA, 572 bp, Glycine max
  misc_feature (281)..(281): n is a, c, g, or t
  Peptide Sequence Number=SeqID_6701
  Probeset Number=SeqID_12994
actatcttcaaagtcatactaaggtccttagagatggtaaatggactgaggaagaagcggctattctagttcctggagacatcataagcatcaaactaggagatatcattcctgctgatgctcgtcttcttgagggtgatcctttgaaggttgatcaatccgctttgacaggagagtcacttcctgtaaccaggggtcctggagaagaagttttctctggctcaacttgtaaacaaggtgaaattgaagctgttgtcattgcaactggtgtccacacattnttcggcaaagcagctcacctggtggatagtaccaaccaagttggacatttccagaaagtgcttacagcaattggaaacttctgtatttgttccattgcagttggtatgttggctgagatcatagtcatgtacccaattcagcaccgtaagtacagagatggcatcgacaatcagttggttctaaagtatggaggaagatcgatagccataccaactgccctgtcagtctctaggtcaattggttcgcaaaggctatatcagctaagcggtactccaaaaggcattccatgc

SEQ ID NO: 3216 - DNA, 1738 bp, Glycine max
  misc_feature (5)..(9): n is a, c, g, or t
  misc_feature (13)..(13): n is a, c, g, or t
  misc_feature (16)..(17): n is a, c, g, or t
  misc_feature (20)..(20): n is a, c, g, or t
  misc_feature (24)..(26): n is a, c, g, or t
  misc_feature (28)..(28): n is a, c, g, or t
  misc_feature (30)..(31): n is a, c, g, or t
  misc_feature (35)..(35): n is a, c, g, or t
  misc_feature (38)..(38): n is a, c, g, or t
  misc_feature (40)..(43): n is a, c, g, or t
  misc_feature (56)..(56): n is a, c, g, or t
  misc_feature (60)..(61): n is a, c, g, or t
  misc_feature (63)..(63): n is a, c, g, or t
  misc_feature (66)..(66): n is a, c, g, or t
  misc_feature (69)..(69): n is a, c, g, or t
  misc_feature (71)..(71): n is a, c, g, or t
  misc_feature (73)..(73): n is a, c, g, or t
  misc_feature (81)..(81): n is a, c, g, or t
  misc_feature (119)..(120): n is a, c, g, or t
  misc_feature (136)..(137): n is a, c, g, or t
  misc_feature (145)..(145): n is a, c, g, or t
  misc_feature (149)..(149): n is a, c, g, or t
  misc_feature (184)..(184): n is a, c, g, or t
  misc_feature (208)..(208): n is a, c, g, or t
  misc_feature (261)..(264): n is a, c, g, or t
  misc_feature (267)..(267): n is a, c, g, or t
  misc_feature (307)..(307): n is a, c, g, or t
  misc_feature (336)..(336): n is a, c, g, or t
  misc_feature (472)..(472): n is a, c, g, or t
  misc_feature (487)..(487): n is a, c, g, or t
  misc_feature (494)..(494): n is a, c, g, or t
  misc_feature (498)..(499): n is a, c, g, or t
  misc_feature (575)..(575): n is a, c, g, or t
  misc_feature (578)..(578): n is a, c, g, or t
  misc_feature (787)..(787): n is a, c, g, or t
  misc_feature (843)..(843): n is a, c, g, or t
  misc_feature (863)..(863): n is a, c, g, or t
  misc_feature (865)..(865): n is a, c, g, or t
  misc_feature (1021)..(1021): n is a, c, g, or t
  misc_feature (1024)..(1024): n is a, c, g, or t
  misc_feature (1040)..(1040): n is a, c, g, or t
  misc_feature (1111)..(1111): n is a, c, g, or t
  misc_feature (1142)..(1142): n is a, c, g, or t
  misc_feature (1192)..(1192): n is a, c, g, or t
  misc_feature (1198)..(1198): n is a, c, g, or t
  misc_feature (1241)..(1241): n is a, c, g, or t
  misc_feature (1306)..(1306): n is a, c, g, or t
  misc_feature (1308)..(1308): n is a, c, g, or t
  misc_feature (1313)..(1313): n is a, c, g, or t
  misc_feature (1316)..(1316): n is a, c, g, or t
  misc_feature (1399)..(1399): n is a, c, g, or t
  misc_feature (1434)..(1434): n is a, c, g, or t
  misc_feature (1458)..(1458): n is a, c, g, or t
  misc_feature (1460)..(1460): n is a, c, g, or t
  misc_feature (1500)..(1500): n is a, c, g, or t
  misc_feature (1502)..(1502): n is a, c, g, or t
  misc_feature (1540)..(1540): n is a, c, g, or t
  misc_feature (1571)..(1571): n is a, c, g, or t
  misc_feature (1575)..(1575): n is a, c, g, or t
  misc_feature (1605)..(1605): n is a, c, g, or t
  misc_feature (1624)..(1624): n is a, c, g, or t
  misc_feature (1655)..(1656): n is a, c, g, or t
  misc_feature (1664)..(1664): n is a, c, g, or t
  misc_feature (1675)..(1675): n is a, c, g, or t
  misc_feature (1677)..(1677): n is a, c, g, or t
  misc_feature (1680)..(1680): n is a, c, g, or t
  misc_feature (1694)..(1694): n is a, c, g, or t
  Peptide Sequence Number=SeqID_6702
  Probeset Number=SeqID_12995
ttttnnnnnttcncgnnggngtcnnncncnncccnccncnnnntcgcggcggctancccnncntcnccncncncaccctcnccctcgcggtctagtggccgccactcatcgctgtctannaagatgtgcctatttnnagagaaangtancaggagaggccgcctctactgctcttctcgcaacngactcgacagcgcgtgtgactccnccgcgcttctattctcttctcctcctccgtactggcgtactcaattctctccnnnncantactctacccctgatacgtatcactcagcagagagacagngcgtgagcagagacagtccatagtatatnaaatagtaggatctcgtacatatatacacacactcacacacgctatatactctcctatacatgcaggactcgcactctcacgtctgttgacgcgcggtcaactattagctctgtcgacacatctctatctcagcgnaagatatatagagantaagganacannccatcgcaaaaactgaagatgtagaggagatatatgtgagaataacgcacaatgaccgcgcacagcgctatagcgncanaacacagcaccaacgcgcgacacaccagcgcaccatagccacacctcatatataactaagtaagacactctcatgtacacactactcagcgatcgcacggtgatggttgcactcagtaatatgtctctagtctctctcccgcaccaacccatcatgaacatcaccacacatcagttcacatcacgcactagaaagagcagcgacgacancgatcagaggagaagtgggatgagtgaagatacgacgcggcgaacatcatacaaanattaaaacgcaaaaagaaananaaatataataataatacgcgggacacgtctcagcggcgccacgcgcctactactgaatatatacgaatagcgcctactcaatacgacatactaatttaatgaatgaatcaagacgcacaactacttgcactctgaggaacgatataattgatcgtnganatacgcgagatgatangatactaccgcactgcagagatacgcgtacgactggtcttggacggatcgcgtgactacgacgcgcgtatntacgaggcggtgcattgcgtcgatgcgcacnagcagaagatgatatgtgcatctcacgactgactcgatgcagcgcagagncgcgcngacgcgaaccacactacctagtacgagtcgcgcgtacgtcgancataagtgcatggtcacagaccgtcacatagagagcatcgtatatgtaagtcaatggctacgtcncnatcgnctngtcgtgctctctcgttgcttgtactcgctcgactctctcatgttcatgatgtgcaccagacgctcggtctatgtaggtgtatngcgcgcagcacgagtgcctgcatgacaccgatcgncatcacacgcgcgcagtagaccancnatagacagacagtgagacacgcgaactacctaccatctgnantctaattatatgcacgcctcgccactgcgcaggtgatntgtggtgtctcggccagcagagcgactctancggngacgtcgtcatgtagtatgtatcgagactnagcacatatgctccgagcncatcacactcctgcactgtgtctcatatctnntatcgacncacaccgccanancgngtcagtatctgcgncgcctgctcctacactcgtccgctctctcgacgcgctcacgatg

SEQ ID NO: 3217 - DNA, 412 bp, Glycine max
  Peptide Sequence Number=SeqID_6703
  Probeset Number=SeqID_12996
ggtttggggtgattttaggtggtgtcctcctggctttaagcattttaagtctgaaatcctacaaaaaaggacgcacctctcctctcgctttgaagggccaagctgctatagcaagtatattgtttctgcgggagataagctcaataggcaaagtaaggctttatattgaatatttatcaaaattaatttaatttccatcccaagaaaattaaaattagtttcaaacatttgatattttctcattcttgttttctttttcccagggatcatcttattcactgcttgatcaggttcttaaacttcaatattattaactttgatataacttttttatcttcatttttggagttaattgatcactactgttatgtttcccactgaccatttactatatctacgaagctgctctgtt

SEQ ID NO: 3218 - DNA, 472 bp, Glycine max
  misc_feature (286)..(286): n is a, c, g, or t
  misc_feature (289)..(290): n is a, c, g, or t
  misc_feature (298)..(299): n is a, c, g, or t
  misc_feature (306)..(307): n is a, c, g, or t
  misc_feature (309)..(309): n is a, c, g, or t
  misc_feature (362)..(362): n is a, c, g, or t
  misc_feature (367)..(367): n is a, c, g, or t
  Peptide Sequence Number=SeqID_6704
  Probeset Number=SeqID_12997
ctttggaaattcccttagggctttaggggaaaaggtatctctgggtggggaagaagagccacagttcatgcctttattcaggttttcaggttctcccaggggttctttcccggccgtgtaaacgagcgttttcttcgcccagatcagttccgtgtttttgggaggctctttcgacctccgggaactggttcccgtgaaccctttgtagttattccggcgaggaggtaccagttctcgagctgctccgcacagtctccacgtgctttctttctttgtccgggaaatncgnncccgatgnntgggagnncncgccggggggcgtgggcctgggctgcgggaggggaaggtgaatggattgtggnccggntcaggagttgggcttgggcttgggcttttgttgagggaagggcgaagctcattgcggaggccgtggcttccatggtcggaattaggggaaagagagagtaaagat

SEQ ID NO: 3219 - DNA, 1167 bp, Glycine max
  misc_feature (1)..(380): n is a, c, g, or t
  misc_feature (981)..(1167): n is a, c, g, or t
  Probeset Number=SeqID_12998
nnnnnnnnnnnnnnnnnnnnnnnnnnnnnnnnnnnnnnnnnnnnnnnnnnnnnnnnnnnnnnnnnnnnnnnnnnnnnnnnnnnnnnnnnnnnnnnnnnnnnnnnnnnnnnnnnnnnnnnnnnnnnnnnnnnnnnnnnnnnnnnnnnnnnnnnnnnnnnnnnnnnnnnnnnnnnnnnnnnnnnnnnnnnnnnnnnnnnnnnnnnnnnnnnnnnnnnnnnnnnnnnnnnnnnnnnnnnnnnnnnnnnnnnnnnnnnnnnnnnnnnnnnnnnnnnnnnnnnnnnnnnnnnnnnnnnnnnnnnnnnnnnnnnnnnnnnnnnnnnnnnnnnnnnnnnnnnnnnnnnnnnnnnnnnnnnnnnnnnnnnnnnnnnnnnnnnnnnnnngattttctaaattttttttaccttcgcaatttcaacgctctcatatcacccagacaattaccattccttcagactctcttctcaatgaacttcgaattgttgagggatttatgaggcccttgaattgagagatggagcaatttcttgccattcatggcgtttcttatctcaaccggagcagtttcccgcaaggctttattttcgggtcagcatcctcagcctatcaggaagaggaaaatagaaagaaaaaggaggaactgatgattcagcggtagaaaagaattgctgaaagaagtgctctaagaagactggaactaagacttccttgacttctgcaaagaaagagaatcctaagatacatccatccaacctcgtgcccaagaaattgcaaaaaccagtcatcaggaattccaccattgaacgccttgcaactgcctgatatgaaggtgctgcaagggaaggtggaaaaagaccgatcttttgtggtgtgtttgatgttcatgatcctctaggacacaggttatcatttgtgtttactcaaagtacatgtcatctcataaacctgtgtaaaattgaagtgatgtgcaatttgtgctattannnnnnnnnnnnnnnnnnnnnnnnnnnnnnnnnnnnnnnnnnnnnnnnnnnnnnnnnnnnnnnnnnnnnnnnnnnnnnnnnnnnnnnnnnnnnnnnnnnnnnnnnnnnnnnnnnnnnnnnnnnnnnnnnnnnnnnnnnnnnnnnnnnnnnnnnnnnnnnnnnnnnnnnnnnnnnnnnnnnnnnnnnn

SEQ ID NO: 3220 - DNA, 1383 bp, Glycine max
  misc_feature (11)..(11): n is a, c, g, or t
  misc_feature (13)..(13): n is a, c, g, or t
  misc_feature (27)..(27): n is a, c, g, or t
  misc_feature (33)..(33): n is a, c, g, or t
  misc_feature (38)..(39): n is a, c, g, or t
  misc_feature (90)..(90): n is a, c, g, or t
  misc_feature (94)..(94): n is a, c, g, or t
  misc_feature (96)..(96): n is a, c, g, or t
  misc_feature (102)..(103): n is a, c, g, or t
  misc_feature (107)..(107): n is a, c, g, or t
  misc_feature (150)..(150): n is a, c, g, or t
  misc_feature (157)..(157): n is a, c, g, or t
  misc_feature (419)..(419): n is a, c, g, or t
  misc_feature (588)..(588): n is a, c, g, or t
  misc_feature (597)..(597): n is a, c, g, or t
  misc_feature (621)..(621): n is a, c, g, or t
  misc_feature (779)..(779): n is a, c, g, or t
  misc_feature (816)..(816): n is a, c, g, or t
  misc_feature (989)..(989): n is a, c, g, or t
  misc_feature (1044)..(1044): n is a, c, g, or t
  misc_feature (1309)..(1309): n is a, c, g, or t
  misc_feature (1311)..(1311): n is a, c, g, or t
  misc_feature (1352)..(1352): n is a, c, g, or t
  Peptide Sequence Number=SeqID_6705
  Probeset Number=SeqID_12999
agggtttagcntntagcggagtgttantttctnttttnntacaacacttaccctcgcggcgactcacagcaggagagaccgagaggaatntttntntccttnncganctgcgcgcccggaggattcacgatagtagtagagagatataangagaatnattgattattatagaatagcagggtcacgtctcactccctcagaaaaggccatagatgtccacacagtactagaatgtcgcgctgcgtctgtgtagcgatgagtaagacgaatcggaagacgcgaaccaccatgaccaggacatgaccccgccgtccgctcataatctagcgatacataggctacgatctagctaccatatcgcgacaccctctcgctcatcacactagacagggcacaacgtgacgtccggcgccgcctcngctctacatatgcatcacgtgatcacacactcacgcgagagacgccatgccaaggatatagcatagagatgcgtcacaactcgtcgcactaccacttcgccacaaccataatacgacaccgaacgagcctcagaccagtgaagcatgtatactatatagtacatgtcangcgcctcantatagtagggagatagtcaatatntagaatatgtgcggtgtgactgactggcatgtacgtgatacgaagtgatggccactgcgcataccacacagctgcgacgtatgtatgatcaataacgttagtctcataaacgcacttatcttcactcagattattatcatgatacactgcgagctggnataatagagagtaatcatagcatcaatattcatacgntagagcatcgagcactatcgcgcgacgacgtctcttgtgaactaggactgagatatcagcgaggaagagacacaccccagcttaaactgacatgtacgcaccattgcaatcatcgacgacaactaccaacagacatgaaaacatatgacctcacaacaatatatgcgatcacntcatcaaatatgagccactgcacgcgatcttgagcagtcgatggtacaggactcnacgcgtagtaatagaaatcatctagacgtaacatgtgcgagctcatgacacactgagacactacatgagctagcgactgaaataacatattcgcttcgagaacacatgtcagcgacacaatcgagcgtgttgtctgacatctccgcaccactacgatcgatatcgcatcacgacacaagcagacgaacagacaagactctacactatatattactgaacctctcacgcagcggtcgtcgaccacaagtacagtatctatgatctnancgcgacgttatacctctaagactgaccagcgtctcactccnatctctctacgacgacaggcgacgtccttcg

SEQ ID NO: 3221 - DNA, 1464 bp, Glycine max
  misc_feature (74)..(74): n is a, c, g, or t
  misc_feature (93)..(93): n is a, c, g, or t
  misc_feature (133)..(133): n is a, c, g, or t
  misc_feature (255)..(255): n is a, c, g, or t
  misc_feature (286)..(286): n is a, c, g, or t
  misc_feature (291)..(291): n is a, c, g, or t
  misc_feature (448)..(448): n is a, c, g, or t
  misc_feature (547)..(547): n is a, c, g, or t
  misc_feature (560)..(560): n is a, c, g, or t
  misc_feature (564)..(564): n is a, c, g, or t
  misc_feature (641)..(641): n is a, c, g, or t
  misc_feature (660)..(660): n is a, c, g, or t
  misc_feature (681)..(681): n is a, c, g, or t
  misc_feature (763)..(763): n is a, c, g, or t
  misc_feature (823)..(823): n is a, c, g, or t
  misc_feature (898)..(898): n is a, c, g, or t
  misc_feature (911)..(911): n is a, c, g, or t
  misc_feature (1061)..(1061): n is a, c, g, or t
  misc_feature (1068)..(1068): n is a, c, g, or t
  misc_feature (1099)..(1099): n is a, c, g, or t
  misc_feature (1148)..(1148): n is a, c, g, or t
  misc_feature (1165)..(1165): n is a, c, g, or t
  misc_feature (1171)..(1171): n is a, c, g, or t
  misc_feature (1178)..(1178): n is a, c, g, or t
  misc_feature (1185)..(1185): n is a, c, g, or t
  misc_feature (1190)..(1190): n is a, c, g, or t
  misc_feature (1209)..(1209): n is a, c, g, or t
  misc_feature (1251)..(1251): n is a, c, g, or t
  misc_feature (1287)..(1287): n is a, c, g, or t
  misc_feature (1312)..(1312): n is a, c, g, or t
  misc_feature (1342)..(1342): n is a, c, g, or t
  misc_feature (1349)..(1350): n is a, c, g, or t
  misc_feature (1363)..(1367): n is a, c, g, or t
  misc_feature (1378)..(1378): n is a, c, g, or t
  misc_feature (1381)..(1382): n is a, c, g, or t
  misc_feature (1393)..(1393): n is a, c, g, or t
  misc_feature (1400)..(1400): n is a, c, g, or t
  misc_feature (1403)..(1404): n is a, c, g, or t
  misc_feature (1407)..(1407): n is a, c, g, or t
  misc_feature (1409)..(1411): n is a, c, g, or t
  misc_feature (1421)..(1421): n is a, c, g, or t
  misc_feature (1423)..(1423): n is a, c, g, or t
  misc_feature (1426)..(1428): n is a, c, g, or t
  misc_feature (1432)..(1432): n is a, c, g, or t
  misc_feature (1434)..(1444): n is a, c, g, or t
  Probeset Number=SeqID_13000
cgagagcagtagagaggagcgtcgacgaccagagcgactgtggagcagagtcatacaatgtgagtatctatctntgtgtcacggctcacacgnagcgtgcacgctgcatgcagctcagggacaatctcatagntcaatcaacagcgatgggagtcgtgataacatgtaggagtctcatgtcgaatgagcagcatcacgcacatacaccacgctatcgtacagttacacgcacgatgactgtgatcatatcaccgncaacatgatattatatgtgcagtattaaatntatantgcacagcaatctgttcacaacatataatacacgcatcaataggatcgaccacagcatctcactagtcatcagtctgtgagttagcagctaccatactcattgtctcgggatagtaagtgtcatctctcgcgtatggtataggcgtggctgactatntgtaaggaagtgcagtggcataccctcgtccgatgcatgtcactcatatgtcttgttgtgtgtatgtaggttgaggtgagtatgatgtggagggtgtgngcccacaccctcntttnctatcactcacatctactactaccatactacacacgtgtggtgtggggagggatggttgttacaccaaatcacactncatactacacacatctcanctcagagcaactcatccactncttcacgtgcgatctcatgattgcagaggagcagcgatcagctaatctcacttgcgcagcctatctgcgtatgtgactaccnttctctcaacgtctagtctcgtctccagcccacatatccatccactacactatcttccanaaacattatcagacgattcgagatgttgtactagattctatagtattcattcgatatctattcttcagctatatnttatttatgtganatttatctcacacaacaaattggaagaggaaggggatacagacatatacatactatcagtatatacaacagattagcgtactaacacaacattgtcactcaatactatatatacaatgaattcagacgtcataggcgtagccggattagnagcgatnacgagatagtgagagatgcagagagagaagnatgaatatacatatatagatacaagatagggttatagatctttttatantatttatgtatatatanattttnagatagnggtgatngttanaatgctacacatcatctcnatttttttttattataatgtatttttttcgtgttgtgtgctncgcaacgcacaccattacgcctctgcattgtagtanggtcagccgcggcgtttcacgacanattctatatatgtgtgctctctcgtggggnggtggtnnctacactattaannnnnagggtgggggngtnntttctgctttncgtatanttnnttntnnnggtggtgtgngntgnnnggtncnnnnnnnnnnnggcaaccaccactcacaatc

SEQ ID NO: 3222 - DNA, 673 bp, Glycine max
  misc_feature (88)..(88): n is a, c, g, or t
  misc_feature (118)..(118): n is a, c, g, or t
  misc_feature (173)..(173): n is a, c, g, or t
  misc_feature (439)..(439): n is a, c, g, or t
  misc_feature (443)..(443): n is a, c, g, or t
  misc_feature (510)..(510): n is a, c, g, or t
  misc_feature (534)..(534): n is a, c, g, or t
  misc_feature (551)..(551): n is a, c, g, or t
  misc_feature (574)..(574): n is a, c, g, or t
  misc_feature (618)..(618): n is a, c, g, or t
  misc_feature (622)..(622): n is a, c, g, or t
  misc_feature (646)..(646): n is a, c, g, or t
  misc_feature (666)..(666): n is a, c, g, or t
  Peptide Sequence Number=SeqID_6706
  Probeset Number=SeqID_13001
gcacgagggagtgctagtcgcctgtgttcatttgcaagttagactagtgttctttgtcttatgtttgtggggtttcttacttctaagnaggaggtggagtattagaaaatatttaagntataattagattatcttagaacatctttcttgatctgtttatttgtattagtagntctattctttattcctgaatgctgatgtgatacctgaccaattagtatatatgagtagtaaattgagatatccgcaacacatctaacagtgatattttcctgattattatatctgtttccccattgtccatgattaattaatccatgttttttcctccatattaaaataatgacttattttccaggttccagggatgcatctcaccttacatgtccagcaaatactttgactttgacttccaactagttatccatgttgtttggcnaganaacccattatagtaacatattaacagggtaatacccccatccccctccacgggttaaaacctccgtncccatggaaggacatatattgtanttacatatgcccccaancatttttttttcccccggtcccngaaaccaatttggtttccggttattatatccgttaccatactgncggngtttaatccccttcaacctgggangtgagccattcccgacaatntccttaa

SEQ ID NO: 3223 - DNA, 1057 bp, Glycine max
  misc_feature (1)..(5): n is a, c, g, or t
  misc_feature (718)..(718): n is a, c, g, or t
  misc_feature (754)..(754): n is a, c, g, or t
  misc_feature (975)..(1057): n is a, c, g, or t
  Probeset Number=SeqID_13002
nnnnntcagctatgtaggcccccccccccgggaaatattgtatttagggatattatgagctgtataattatgtacccgctatccactgtatgtatgactctaattgtaaataagatcctctgctgtgtagtcaagacacacggatacgttcacacaatttctcgtttttctccctatgagagcagttagcatgatggtgaaatgtggttaaaagtcacaggtggtaccggtatcactggaactgattgtatcttagaactggccataagtatttagtttctttcttgtttctgttttgccttccctagaacagtgcctctgcttttggttaatttgttggtgagtctgtcaatttgatttatttgtatttggtatattttgttttcagtttggagaagctttacttaaacaggaattgcttgagttctctcttttatcctgataacggtgggcggtatgaatcagaagttacgtgctataaaccctttcaaaacttacactgccttctattggctaataacaacattggtgatctggcctctgttgactcattaaacttgtttcctaatttggtggatatcaggctttctgacaacccaattactgattctggaagaggtggagttccaagatttgttttgattgcccgtttagcaaaagttcagatattaaatggaagtgaggttactcctcataaaaagaaagactctaagattanatatgctcaacttataatctcaaaggtacatactantcctaaagaaatcaaatagcatcccagatttttagagcttaagaaaatgcatggaattcaaaataaaagaccttcaattaaatctactatcccacggacaatcatctcaatattattatcaatgactctgaattatgttagaccatccatatgtgaaaagccatgattgacaaaggaactaccaccaacaactaccaggaaatatcagtactactctagtnnnnnnnnnnnnnnnnnnnnnnnnnnnnnnnnnnnnnnnnnnnnnnnnnnnnnnnnnnnnnnnnnnnnnnnnnnnnnnnnnnn

SEQ ID NO: 3224 - DNA, 479 bp, Glycine max
  Peptide Sequence Number=SeqID_6707
  Probeset Number=SeqID_13003
gcacgagggttaaggagtttgagcctttgaggagacgggaatgttaggtcacgaccgcgcaaacctgaggcatgagccgtgtgaggcaggtccattatggcacttgtcagaacagagtttttgttttatgtgtttatgaggtgggggaccagcccttcttcctctagctaactccattcacacgccagagaatagaggtcccttgaacaattttcacaaataaccataaatatcttgctatgtatttcagcttcaagttacggtgctagctagagagtttaaactttaaaccaaaaaggggagagaacaaaaacccttattagaaagcatcattgttcattactgtccacccggtcaaccattttgcatatgatagttttttgtcaactaagagagatgagattgagaagagagagactacactagtacgctaaatcttatcatatataattttctttcctctccaataaaaaaaaaat

SEQ ID NO: 3225 - DNA, 687 bp, Glycine max
  Probeset Number=SeqID_13004
aagtcattagctactaaacaactctttcacaacgaaacaaggaaaaaaagaaaaagaagaagaagaagatgagagctttagaagaatctaagatctctattgttttgttgcttctatgcttctcaatcttcttcactttcagtctccaggcaaatgagctaacatccccctcctctaaagaagaaggagaggtgagaatggtgccattaatggaggagaagtttatggtaatgaatgaaacaagaaggaagcttgggagtttccagatatgttcagtttgcacttgttgtggaggtgcaaaaggagtttgcctgcctttgccttgttgcttcgcaattaactgcaatatcccaaataaaccctttggttattgctccttcactcccaaatcctgcaattgctttggttgccatagctgagatctttccttttgggcagaggaagaataaaccagcatcttgatttcatatgcaaagtgtgaaagggaagaaaaaacaaaggaatatgtgttcttggtttggttctttatttttattttttttgtttataattttattttcagtcttctttaaatttcattgcctactatcttcagcaacatcatcatcctcattaattaattaattatctttttgcattgccattctgataaaaaaattagggtcttttatggaagatctcacccac

SEQ ID NO: 3226 - DNA, 1573 bp, Glycine max
  misc_feature (25)..(25): n is a, c, g, or t
  misc_feature (67)..(67): n is a, c, g, or t
  misc_feature (103)..(103): n is a, c, g, or t
  misc_feature (180)..(180): n is a, c, g, or t
  misc_feature (215)..(215): n is a, c, g, or t
  misc_feature (256)..(256): n is a, c, g, or t
  misc_feature (468)..(468): n is a, c, g, or t
  misc_feature (474)..(474): n is a, c, g, or t
  misc_feature (1206)..(1206): n is a, c, g, or t
  misc_feature (1235)..(1235): n is a, c, g, or t
  misc_feature (1254)..(1254): n is a, c, g, or t
  misc_feature (1329)..(1329): n is a, c, g, or t
  misc_feature (1439)..(1439): n is a, c, g, or t
  misc_feature (1457)..(1457): n is a, c, g, or t
  misc_feature (1502)..(1502): n is a, c, g, or t
  misc_feature (1515)..(1515): n is a, c, g, or t
  Peptide Sequence Number=SeqID_6708
  Probeset Number=SeqID_13005
cgtgtgcgcatgaagacgtgtgtgnttcagtgttcatgtgtgctaatgatgtcgagtgcatgagtanagaagcatgatgatatagacagagagattcacatgnactaacgattcgtgatagtcagatccattatagtgataatagtaagatgaactaccgagatgataggtatttgatanggatagaggaccgagcagaaagacggttgtaggtncgatgtggtgacggtaatagaagaagtgatgcgatgagagngattggagtgtgtatacggtgatgttagtgatcaaaggtatggatgagacttgattgtcgattctagaggatagtaagcattggtagtgtatcgtgtagaggatgtatctgaacagagtgcgatgatcgcggtatcagagtcgcggtgagtctcagtaatatacagaggatcattgtggttgtgcgtcgagtacagaatacagatgatatantgacanttacacatcgctgcagtgagctgatggtcgatgtaagcgctctgatatgtgtacgttacggagtccgtgtatatcattgtcataatgtgagtgtcgtatcgtgttgtatgctgtgacataagttcattctcctgtatatgctacctgagcgttcagttgtcgaatgagaattgctttgatcggtagtgtgagagttaggaagaggacacagaataaaatcagagacggatgcgatcgaagcggacatggtctgaattgtatattacagatgtgtgttctagtatagcgtcatagtatagttgaaagattcaccgtttcaataacagtctcgtgtgcgttgtcaatatagctggttagaacggtataaaagaaatcggtgtgagcttgtgaatagttcgggtgagagatgatagctgggtgagtcgtgctggatgtacacacgaggtgttttagtacagtagtggtaggaacgaacagtgtggtgtagtgcacagtgtagcgcgtgttagatgttagagttatcatatgagaagtgctagtcgctctagcatgatacgatcgtagttacgtatacaagatatgagtatatctgctcggagtgtgttctgagatgatcgagtatgaatgtatgtatttgtggtatgcaggaatgtccacgtatagaaatgatagctcggtgttctggatatgtagtcgattgtgcactaatgaagcgctcggaacacactacgncatcatattatactagatgtacgtgaganggagtgtgggagacgacanggcggagtgtcgtctgaatgtacgtccgagatatcgaacaggcgagcacgcagtgtcgacgatatcaaataaagntgtatgcagggatagagagagcagtacgtatcggtgattgtcgagcgtaaggcgagcagtacagacagtgacttgtagctgacataacatgtgttattacgtagttacancgtcctgatcccttcgtnatgccttgtgaataacagcggatactacacgacattcggtgtgancagtcatcgttgngtagggagtggatagagtagccaagtaatgtaggatgtgagataggtgcgccgcgtgc

SEQ ID NO: 3227 - DNA, 575 bp, Glycine max
  Probeset Number=SeqID_13006
gatagtagcaaagtgttacaattcaaaagtcacatgtaaacaggaacaaagaggtgtttcgaagaactagagagctagtactcaatcccatctttgtggaatcccagtttcaccgatgtctaggagacgatggattatcagtacattaaagttcagtacatgcagaaagtaatgggtgggtagtattataaggacatcaccagagaatggaaaccaccatccagaaatctcataaactacggacgtcatcattgtcggtgctgatgttgctggcgcagcccatgctcacacacttggccctgaaggtagaacaaaccttttcttgacacgactttgtgaaatctaatccatatgtgtgatgttttttcttagttactacctgcaaatatgttttgattcatagatatatgcaaaacttatgttgaggtaaaataataacaataacaattatgttagaaagtcatgtttgattgccagaaagtagaggttggaagatagaagagtagttttctaagtgttattctgaatgaaattatacaagtgatacagttataagttataaccttatataggct

SEQ ID NO: 3228 - DNA, 454 bp, Glycine max
  misc_feature (1)..(1): n is a, c, g, or t
  misc_feature (186)..(186): n is a, c, g, or t
  misc_feature (271)..(271): n is a, c, g, or t
  misc_feature (328)..(328): n is a, c, g, or t
  misc_feature (449)..(449): n is a, c, g, or t
  Peptide Sequence Number=SeqID_6709
  Probeset Number=SeqID_13007
ntttcactgttgggatgtggtggacaagataaaatcagaccattatggaggcattatttccaaaatacacaaggtttaatctttgtaattgattcaaacgatagagagagaatcggtgaagctcgtgaagaattgatgagaatgttaggtgaagatgagcttagagatgctattctattgatcttngctaacaaacaagatttgccgaatgctatgaactgtgcagaaattactgataaattaggtttacattcattaagaagcagaaatnggtacatacaagcaacatgtgctacttcaggtgatggtttatacgagggactagatnggttatctttacaattgaaaagtctaaagagttaagtttaggaattcaattgagtgtttttagagaaagagagaaaatgagaatgtgtattattttttaaaagaaaattcttttaaattancaatt

SEQ ID NO: 3229 - DNA, 184 bp, Glycine max
  Peptide Sequence Number=SeqID_6726
  Probeset Number=SeqID_13008
gtggatgggcatctagcccagtggcaagagcacggctgtgtgccttggcagacccgagttcgaaacctgtgggcggaatttattttaccgaagtaaaactcggtgtctcacaccttcccttctttaataataatgccgcggggctcctcccccgttggtcaattttccaaaaaaaaaaaaaaaa

SEQ ID NO: 3230 - DNA, 408 bp, Glycine max
  misc_feature (389)..(389): n is a, c, g, or t
  misc_feature (391)..(391): n is a, c, g, or t
  misc_feature (396)..(396): n is a, c, g, or t
  Probeset Number=SeqID_13009
gtgggtcgttctggaaaccctcgccgccacccctcttcgggcagaagcaccgctatcccttctcctctagtgcttgcggcggcgctcgtcctgtccgggcgccgacggttgaaaggaggaggatggtatggagttcctgctttacgccattgacagagttcaccgacagccttgatcaccagattaggttcccctcgtgttcttatcgggcaacggagctgcccctgcagttcctgctgactctaatgctgggtctggttgcgctgaaaaggtcggggacgatggcgcaggtagagcgcgtgaaggagtgtgccgtcgctgggacgcatctccgacaagatcggcgcagtcgactcgcagagtcaatccagaagcactggctggccaananagganctcgactctata

SEQ ID NO: 3231 - DNA, 1578 bp, Glycine max
  misc_feature (68)..(68): n is a, c, g, or t
  misc_feature (301)..(301): n is a, c, g, or t
  misc_feature (488)..(488): n is a, c, g, or t
  misc_feature (775)..(775): n is a, c, g, or t
  misc_feature (943)..(943): n is a, c, g, or t
  misc_feature (995)..(995): n is a, c, g, or t
  misc_feature (1000)..(1000): n is a, c, g, or t
  misc_feature (1018)..(1018): n is a, c, g, or t
  misc_feature (1083)..(1083): n is a, c, g, or t
  misc_feature (1248)..(1248): n is a, c, g, or t
  misc_feature (1252)..(1252): n is a, c, g, or t
  misc_feature (1254)..(1254): n is a, c, g, or t
  misc_feature (1262)..(1262): n is a, c, g, or t
  misc_feature (1268)..(1268): n is a, c, g, or t
  misc_feature (1294)..(1294): n is a, c, g, or t
  misc_feature (1327)..(1327): n is a, c, g, or t
  misc_feature (1415)..(1415): n is a, c, g, or t
  misc_feature (1433)..(1433): n is a, c, g, or t
  misc_feature (1486)..(1486): n is a, c, g, or t
  misc_feature (1537)..(1537): n is a, c, g, or t
  misc_feature (1544)..(1544): n is a, c, g, or t
  misc_feature (1578)..(1578): n is a, c, g, or t
  Peptide Sequence Number=SeqID_6727
  Probeset Number=SeqID_13010
gtgtacacctcctctctcctctcttcctctatattgcacgtaaggggtgagttgtaggccgtctttcnccacaaactctctgaagcgttcacgccctctcccagaccgcgggcagcgccatagctgtcttaggtaggatgctccctcgcggagctcgcgcgggagaggtgtctgtgctgtggagcagatcttcctggagaggctcgatcaggattatgcacgtgaccctgtcgtcgtagagctgtaagatactttagtcagccggtactcagggctgtatctagtgatattatacatcagncttaaggcgtggcttgcatgcgtgcatgtcttaagttgttcatgcctcttcagtgttgtcctacattggtatgtgatcgtatctgtcctctgctgcggtaggaatgccagacagatcatatctgttactcttagtccttgcatgagtctatgtcggacttgtccacatggatgacgaggagaggttngtcgtgttgtcgcttgtctctcgcaggatagtgtgataggtcggtgaggaacgtatgtatgtctatatatctttctcggcgtaggtgctagtgaggagcgtctcgctgtcaagtcgatgatgcgtgactaggcgctcacagatactcgtacacatcatagacgagtggagcgatcatgtgcagcctgctctgatgtcatgatgggagtgtgcgcgatgataatattgttacggaagacatctctgaccacgtgtgaatctccgtctagtggcattgcgcagctgcgnacacggtctagggccgtccagtcgctgctctatagtggtcttgagagcacgagatcacgacgtctgcgctgacctacaggcgtgtctcgctacactaaccatattagttatatattgatatatatcatctgtgagtgtagtgatactatttatagactgcgtagcggnactcgatgtatgagatgcgcctgtatctgctgacgtgtccgtgcatagctgnattancgtcatatgtactggccnctacaccgtgatatactgacttgatctctgcgcgtatctctcgtgtatgtgttctattgtatagngtgtaccactaccatgtgaccacgatatgtaatgtagtaatacgtaaagaagaagtcgcaccatgcttactacgtaacatcactactgcatattgtcgtctacttatcactcgctgagatgatagagtctcgtcctcacacggcgagtcagtctagttagttaangagntngctcacanagtacngtgctccatatatcagctgtactgtngctttcacagactgtcttcctgctcatgtcgancactactgaatatatcgactgtagtgtgatgatgatcgtactgtgtcgatgatgcactgcacgtctcgtgcgaggtatgtgtgtatanagtatgatgacgatgttntgacgtcgacacttcgatgcgtgagctgagtcgctctcgtgctgcactgtatntcaggcgcgtctcagcatttatttgcagtgcgacacatgacgcgtgatagnacgatcnagtagtgtagcgcgcgtcatcggtagatcaaacn

SEQ ID NO: 3232 - DNA, 429 bp, Glycine max
  Probeset Number=SeqID_13011
gtttcgaaaggtggcgctatttgggatttagacaacttacagttattgtgtgaggattgtcataaggcgaaaaccgcaaaagaataataaactattttcccaaaaatctattttccgcgcccctttccaaattggaacgccaatttcgcgggggcgcacgtagagggaggcagacggattctaacgaatgggtttattctaatttactcaatggcggtaaattcgttaacggttccaccactccgggcggttattcgtcttatcagatgaatacaattgaaggaaataacccggcgtctttggttggtgatgccaccttagacaaattgattaaaatgttcgacgcgaaattagcagatgataaataatcaattgattagctatcgtgattatcaaagcgaggcaatagaaaacaccctgaactattgg

SEQ ID NO: 3233 - DNA, 909 bp, Glycine max
  misc_feature (613)..(613): n is a, c, g, or t
  misc_feature (619)..(619): n is a, c, g, or t
  Peptide Sequence Number=SeqID_6728
  Probeset Number=SeqID_13012
gaggggggagaggggaggggaatatgagtgggaggtgcgggtgggggggggccagacggctgcctggctggggcgggattatgcgttcagtgtgtggatattttggaaggggttataaaggcaaagtaccaggttattggtaactgtttcttggggtcaagccccaccaagttttgggagggtaggcctccttccattcttaaatctgggggagtttctgcggattcatcgtttttttttgctccagaagccgccaccggacttgacttgccaacccccaattcttctactaacttccagtttcaaggaggccattggtgttttgaattatgatcaacagaaatcaattgaaggattttaatggaaacgtccttacccacgaaagaaacatgtacgtcttgatgcatgaagttacccacggtctcggattcagcagcagtctctactcttatttccttgatagcaacggaaacaagagatcaggacatatcaagtctgttaaggtcaacggaaagacccgttccttcattgatgttgagcctcttacctcaaagctcagaaaccactacggatgctcatctcttcaaggtgcccttatggaaaatggaggtgntagcgnaaccgcttcttcccactttgagagaaaggtttcctttacgaaattatgggatctggtagtatccccggaagaagagtctctgacatgagtttgacatgactcacccccccgacagacgcaaaaacgacccaccctccccccccccccccccgtggcacccagacccaccaacgccagggcgggcgcccggcctcgggccgtgaccccgcttgtcccccctatcttaaaccatatcatacccctatggtatcgccgcgcccgcccccagagccgcctccaggcccccccca

SEQ ID NO: 3234 - DNA, 598 bp, Glycine max
  Probeset Number=SeqID_13013
gccgcccccccccccccccgaccctccccgccggccccccgcccccggcccgcccgcgcccccccccgcaccccccccccccccccgcccccccacggcccaccccccccccccgcccccgccccccccgccaccccccccctcccccccccgccgcccccccccccccccccccccccaacccccccccgcccccccccccccccccaacctgccccccacctcccccccccccccacccccaccgccccccgcccaccccccccccccagtcaccccccccttgtccccaaccccaggtgtcccttgtcctgccaacccaccccctcccagcgccctccccccgtaagacccaccacccttacctctccccccaagtcccatcactcaattcccaccttgcaccgcccagcccaccattttccggctcccagcccacaccaccaaagccaaagacctgctccctccccttggcgcccccccttggctcccaacgctaccgtacctcagcgtcctcccccctgcggaagcaaacccacagagccctggccccccctccactagctacatattccacagtttcgcacgtctttattta

SEQ ID NO: 3235 - DNA, 468 bp, Glycine max
  Peptide Sequence Number=SeqID_6729
  Probeset Number=SeqID_13014
cagccagctggaggaacccgagagcttcaagcccgcccggtttcttaaaccgttcgtgcccgatttcatattgttcttactacaagttcattccattgggaggtggtctcaggtcctggcccgggatggtctttctgctctactcgctcgagttgacggtggcgcacctccttcactgcttcacgtgggaattgccagattggatgaagccaattgagatggacatgggtgacatgttctgactcaccgttccaagatccacgcgactcattgctattccaaccaagcgcgtggtgtgcccattcttttaaaaaaacaacaacatgaatcttttttcttcctttttttaggatattctttttatcccttaattatacataatcatattaaaataattttatgggttaaaaggcagcttcacaatattaatttcagaattttttgaagaaaaaaaaatttgtaacaatc

SEQ ID NO: 3236 - DNA, 730 bp, Glycine max
  misc_feature (1)..(18): n is a, c, g, or t
  misc_feature (25)..(25): n is a, c, g, or t
  misc_feature (44)..(44): n is a, c, g, or t
  misc_feature (52)..(52): n is a, c, g, or t
  misc_feature (55)..(55): n is a, c, g, or t
  misc_feature (619)..(730): n is a, c, g, or t
  Peptide Sequence Number=SeqID_6730
  Probeset Number=SeqID_13015
nnnnnnnnnnnnnnnnnntacaccnaaaaacaacacaatccccntttttttnaanaacccataggagaacgggcccccctcgagtcagctacgtaggccccccccccaatatacggctccttgttaatccttgcagcctgctttttctttgcatcaatttggtatcttttcagactaaaaaccgattctgaattatttatgactatgttgttccgtgttagccaaaaagaagctgaacagataaaatctctacttaataattttttagcttctctcgattcaagcgttgatcaaattcagatctctgaagaaaatcgagaggtaactgatgctgctaaacttcaacataaaagtacactcagttttcataaagcctctacgaagaagctgtttactgctcaaatccttttgcttgcgcgcctctgtccttactatttacttttaattgtctggaacactatatatttctatatatctttccaaagcttaacgaagattcaattggaacaacaacaaattcaagcaagcttgagcggccttgtggaagggagtatgatggtgaatgagctaattgagcttgttttagcgaactcaaccacaactataggaggagagcctnnnnnnnnnnnnnnnnnnnnnnnnnnnnnnnnnnnnnnnnnnnnnnnnnnnnnnnnnnnnnnnnnnnnnnnnnnnnnnnnnnnnnnnnnnnnnnnnnnnnnnnnnnnnnnnn

SEQ ID NO: 3237 - DNA, 1581 bp, Glycine max
  misc_feature (17)..(17): n is a, c, g, or t
  misc_feature (20)..(21): n is a, c, g, or t
  misc_feature (23)..(27): n is a, c, g, or t
  misc_feature (29)..(32): n is a, c, g, or t
  misc_feature (35)..(35): n is a, c, g, or t
  misc_feature (37)..(40): n is a, c, g, or t
  misc_feature (42)..(42): n is a, c, g, or t
  misc_feature (46)..(47): n is a, c, g, or t
  misc_feature (55)..(55): n is a, c, g, or t
  misc_feature (57)..(57): n is a, c, g, or t
  misc_feature (60)..(61): n is a, c, g, or t
  misc_feature (88)..(88): n is a, c, g, or t
  misc_feature (133)..(133): n is a, c, g, or t
  misc_feature (167)..(167): n is a, c, g, or t
  misc_feature (236)..(236): n is a, c, g, or t
  misc_feature (243)..(244): n is a, c, g, or t
  misc_feature (270)..(270): n is a, c, g, or t
  misc_feature (274)..(274): n is a, c, g, or t
  misc_feature (336)..(336): n is a, c, g, or t
  misc_feature (389)..(389): n is a, c, g, or t
  misc_feature (408)..(408): n is a, c, g, or t
  misc_feature (502)..(502): n is a, c, g, or t
  misc_feature (1018)..(1018): n is a, c, g, or t
  misc_feature (1281)..(1281): n is a, c, g, or t
  misc_feature (1380)..(1380): n is a, c, g, or t
  misc_feature (1499)..(1499): n is a, c, g, or t
  Probeset Number=SeqID_13016
gttttcccccccccccnctnncnnnnncnnnnctntnnnncncttnncttgcttntnttnntcttttcttttctccccctcctcctcntccccccaggtctgctgtgtgagtgattctgttctcggtctgttntgctcttggtgtggattgtatggatattgtaggntgcgtctaggttgttgtcttcatgcaagaggaggggtattcgtcctcagatcgcgcaacaggcaccganatatatnnaaaaacggattatgtctcataaaatntttntgtcataattatgttgtgtattagcgagtctgtctaatcttttatatacgtgtttcccctcnctcccctctccacgccgcccgcacggacccgggcataaggcgcgcagcggccncgagtacgtggaagggaanaggacgtccacagcaccaccaccaagcctgacgcggtcgcgtgttggccatgtgtcattgcgatttctctacttcatgcaaataaatcccgctnccgaagcacatatttctactatctatccttcatatctacttccatattcacctcgcttctccattatacttttttatatatatctttattcgtgtctgtgatgtgcttttttcctcctattctgctccagatagtataagattaatgttcgttattgcctcggttgttgtcctctttgtttccgtatgtacctaatcaaactcctccgtcttcgcctccaacctccgtcgatctccatcggtgacggttgttcctattcgagatatacgatacgcggctaaaattcgaaattataatttgtgatagaaaatagaattaatatacgcgagactagaaacgatgtctaatatacaaagatacaacgaacgcgaaacgtaacacacaatccctatcttactcctccacgctaccctacgcactcctctcctcctatgacacacaaacacacacgacaacaaacacagccaacacacacagatcaacctatcatatcaccagcacacaccgtcgtataanagcttctacacttaactatatgttaatgccgacgtgagatatagcgcgcgcgttcatccgcacctctcacatctcaccctctcttcgcttcactgcgcgcgatactctcttaatatgttgaatacgatatgagatacgagtctccacttcatcatcaattatattatatctctgcatctcggtgcctctatctatactagtcacgtatagcaccgctcttatcacttcgatactcgattcagcgataaactacaacaccatcncatatagatctcgtcaacatgcatcaaacacatactcatgcgcaacaacaagacatagaatagagagaactcaacacatgatcgacagctcaaacaaangctactctacgatatctaattatgtattggtctctagtgtgacttccaacctatacatactctctatctacatgagatactacatatagaccaatatgctctccctctctattcgtccnctcacaacacgagctccgaacattcttattcacctactcgtatcactctctgaagatatcagtgtatatacgtgcaatgaaa

SEQ ID NO: 3238 - DNA, 1353 bp, Glycine max
  misc_feature (1)..(1): n is a, c, g, or t
  misc_feature (26)..(26): n is a, c, g, or t
  misc_feature (52)..(52): n is a, c, g, or t
  misc_feature (96)..(96): n is a, c, g, or t
  misc_feature (247)..(247): n is a, c, g, or t
  misc_feature (249)..(249): n is a, c, g, or t
  misc_feature (251)..(251): n is a, c, g, or t
  misc_feature (400)..(400): n is a, c, g, or t
  misc_feature (578)..(578): n is a, c, g, or t
  misc_feature (752)..(752): n is a, c, g, or t
  misc_feature (1021)..(1021): n is a, c, g, or t
  misc_feature (1164)..(1164): n is a, c, g, or t
  misc_feature (1279)..(1279): n is a, c, g, or t
  misc_feature (1283)..(1283): n is a, c, g, or t
  misc_feature (1287)..(1291): n is a, c, g, or t
  misc_feature (1304)..(1307): n is a, c, g, or t
  misc_feature (1318)..(1319): n is a, c, g, or t
  Peptide Sequence Number=SeqID_6731
  Probeset Number=SeqID_13017
nggaggtggtgaggtatgttagcatnctgctcgacaacaccacacaccgtantagatctatctacatgagagtgtggacgagcgatggcggcgtcntatccgggtcagaagggatggcactggtacatatatatcatgtttcgttgcgcgcaggagagtggtcggtacggccgcgcttttctctatatcacgacaggtgtatagtatttagcgcgagtattattatgtcgcgcctgggttgtctctncntntttggcccgcacacgtctcgtcgcgcacccacgtgtggtgtgagtagcagacgaagcgcgcgcattcgcggcggatcgatgcggcgcggtgtcgcatcagggggcagagtgtgtcgatgacatagtgagcgtagcgagggagaggccgngagcggatctagaatcgagatgtgtcgcgaggaggtaacacatggtgacatctaagacgctatacgcacgctgtctagtgggcggcccccgcagtcacaaccgtgcgcgttggcggacaccgcccatactcgctgagagagactgagatgcacaaggtcgaggggcagacacagacgnaacgtaagtaattagctacacgcaccagcttatcttgttatatgtagacgctaggaatacataagtcgcacgccgcgtttgcacacgatgcggactacagagatgtcacgagagatgagcacgtcgacgcgaccagtgatgagctgatccgtagtgcacgttagacgtagtcanagagacagatattacaatatatacataggtagcagatagttgtgtgtacgacgcgtccgaaactcggacagacatacaggcgcgggggcggtgcgggaggacggtgagacgcgaaggtgacagagcagctcctgtacgcgcaggcggcgctcgcgccgcggcgggctggccggcgcggtgcgcgccagctagctgagagccaggccgacgcgcgcgacgggctccgcgtcttcacgcgccatacgatatcgcgtgtcctccattcgagnttgtaacagcagtgatgtttactagcatgtgacgcgtgcgcgttgcctagacctggcctgtcgtatacgagaatcatacgacgcgctacgggggcgtactagtgaggtccacgctagttagactcgtatgagcatacacggcnatatatttactaatattttataataaagcacacgcagctatataatcacactccgctagggctgttatatatatagtctatatatattaataacacatccttactctcgccgcgntcantgtnnnnnttctcctcctccnnnnataaacataannaaagcacacacacacacccacacacaaacacacc

SEQ ID NO: 3239 - DNA, 489 bp, Glycine max
  Probeset Number=SeqID_13018
tttttttttttttttaaaggtaactttactttccttttggaacttatgcttacagacatataactattggtttgtgtaatgcaccagccacattttaaagatgcatgactgccatattcatgggctttgttgaacaaattaccgagttcttcatggacattttttccatttatgggacatctttcgataattgtctatgcaatctcgataaagtttgcagtggtgtgaagaacgcaacctagtcttgaatgggagaagtgccacttcatggtgaatgaatgtattgttcttcgacatagaatctctgaaaggggtactaaagttgatagaactaatatagaggctatagagaaactaccttctcctagagatataagaggtgtaagaagctttctcaggtatgctagttttcataggaggtttattaaagatttctctaaaatatatatgcctcttaggaatttaaaggatgtaccattctcttttgat

SEQ ID NO: 3240 - DNA, 450 bp, Glycine max
  Peptide Sequence Number=SeqID_6732
  Probeset Number=SeqID_13019
acatatcttcgtacgcttcctcctcaaattcgcttttaattgttttcactgagtcaatggcgggtcgtggtaaaactctcggatctggtgttgccaagaaggcgacgtcgagaagcagcaaggccggtctccagttccccgtcggtcgtatcgcccggttcctgaaaaacggcaagtacgccgaacgcgtcggcgccggagctccggtttacctcgccgccgttctcgagtacctcgccgcggaggttctcgaattggctggaaacgcggcgagggacaacaagaagacgagaatcgtgccacgtcatatccagttggcggtgaggaacgacgaggagctgagcaagttgcttggggatgtgacgattgctaacggaggtgtgatgcccaacattcacaaccttcttctccctaagaaggctggtggtgcttccaagccttccggtgacg

SEQ ID NO: 3241 - DNA, 3743 bp, Glycine max
  misc_feature (1)..(63): n is a, c, g, or t
  misc_feature (3679)..(3743): n is a, c, g, or t
  Peptide Sequence Number=SeqID_6733
  Probeset Number=SeqID_13020
nnnnnnnnnnnnnnnnnnnnnnnnnnnnnnnnnnnnnnnnnnnnnnnnnnnnnnnnnnnnnnnaataataataaaaatcacatgagataatgagatatgtttttataaataaataaggaacaaaaaagattgacaaattatatttcaaagaaataaacatattttaacccatccttatctgtagtatttaaagagcagtaatgggtttagatgccccgggcgcatccgtaaaaatgaaaagaagcactcactcgtgaaccccacgcagtgttcgataatcaaatcttctttctttttcttccgcagtcccaaccttcatggattctcactcacacatcattgcttggggctctggtgaagatggtcagctaggaatcggaagcaacgaagagaaagaatgggtctgcctcgtcaaagccctccagccccaccgtattcgctccgtcgtcgccggcagcagaaactccctcgccatcgctgacgacggcaaattgttcacttggggttggaaccaaagggccacacttgggcaccctgctgagaccaagtctgagaacaagactgagaacactcccagccaggtcaaggctctttccagtgttaaaattgttcaggcggctattggggggtggcactgtttggccgttgatgatcagggcagagcttatgcttggggtggaaatgaatacgggcagtgtggcgaagaacccgagcgcaaggatggcactggtagacctttaaggagagatatagagatccctcagcgctgtgctcctaagcttgttgttcggcaggttgctgcaggaggaactcactcagtggtacttacacgagaagggcatgtttggacatggggtcagccatggccgcctggtgacataaaacagatttcagtccctgttcgggttcaaggtcttgaaaatgtgaggctcattgctgttggagcatttcataatttggctcttcaagaggatggaactttatgggcatggggtaataatgaatatggacaacttggaactggagatactcagcctagatcacaacctattcgtgttcaaggactttctgatcttaccttggtagatattgcagctggtggatggcattctactgcattgacagatgaaggagaggtatatggctggggaaggggggagcatggcaggcttggatttggtgatagtgacaagagcagtaaaatggtaccccagaaggttcaacttttagctggagaagatattgttcaggtgtcctgtggaggtactcactcagttgcattaacccgggacgggcacatgttttcttttggtagaggtgaccatggacgtcttggatatggtaggaaagtcaccactggtcaaccaatggaggtacctatagacctccctcccccacaggatcccagtggcactgcaactgagggacattggatagctaaactagttgcttgtggtggccggcataccctggcaatagtagaatggaaatcaaatgaatcttaaaattgactcaaattctaaataaaacagaaactggaaagtggatgaggctaatgactgatttggaactcaattcaggtgctggaatttcactcgttctgcatgatatgatcttgcctttgtataatcatgcatatggcacaagcataaaattcatcaatatagtaacggggtttggttttggatggtcttaatttgcatattcatgcaggcgatttttttttttattcgtaggaattgaagactgttaaaaaaatttacaataattcacgtattttgttcaaaaatgtagaaggaagccaattggtgatgaaggcagaagtgtagacacaatacccccaaaatgagataggcacatgtgattggaattgtaaagatatggccactttaaggagatgatgatgaactctttcagctatggagttttgcaataaaaatcacatgagataatgagatatgtttttataaataaataaggaacaaaaaagattgacaaattatatttcaaagaaataaacatattttaacccatccttatctgtagtatttaaagtgcagtagtgggtttagttttttttttcgcatccttaaaaatgaaaagaagcactcactcgtgaaccccacgcagtgttcgataatcaaatcttctttctttttcttccgcagtcccaaccttcatggattctcactcacacatcattgcttggggctctggtgaagatggtcagctaggaatcggaagcaacgaagagaaagaatgggtctgcctcgtcaaagccctccagccccaccgtattcgctccgtcgtcgccggcagcagaaactccctcgccatcgctgacgacggcaaattgttcacttggggttggaaccaaagggccacacttgggcaccctgctgagaccaagtctgagaacaagactgagaacactcccagccaggtcaaggctctttccagtgttaaaattgttcaggcggctattggggggtggcactgtttggccgttgatgatcagggcagagcttatgcttggggtggaaatgaatacgggcagtgtggcgaagaacccgagcggtaggatggcacttgtagagctgtatggggagatttggaaattcctcagccctgttctcctaagcttgttgttcctgcaggtttcagcaggctgaacacattctgtggcacgtacgcgacaagagcttgttatgtcactaggtctctaaatgcggtttattttcattgctcagagtccagccctctttaccaattcactctgcatgataatggtcgtccctttaggcttccgaggtatctcttctgttccatcttccactgcgatggcatgattattcgctgtggtaatgaacacagtggtcacgttgtacctggagaatttcagcctctctgaggaccggtcagggtctagtgctttgtcgagcaaacgctgacggatcttgtcggtggtgcagggtattgtactgccgcgcgagatcgttgacagggatatcggtggggcactgggagagtatggcaacgctctggtatttggctgatagccgagaatggccctgaagaaattggtacggccagcgaaggttcagcttttgggtggcgagaaggtatgtgttgatgatggcggtgctggtggtaactacagatatagttgcagtcaacccgggaacgggcatcatgtttatcttgttgggagaaggtgcaccatgtacgtcgttggatatgataggaacggtcacgagctggttaacgctaatggagcgtacctgtgcgagacgccctcgcccgtggggatgacagtgtggactgcacctgagggagatgggatagctaaactagttgcttgtggtgtccggggtgccgtggtagtagtactagtggaaatcggtaggactgatgtaattgatgttgacgtggaaggaaaagagtgtctggaaggtgggacagggcgggttgcttgttggggaaggagggtgaggggctggcgtcggtggctcttttgggggtggttgggtggcggttgggtagtggtgcataggggggaaagaggagatgtagtgatagaatgagggggatcgggtgtgctgggacggtatgcgactgaggtagggggctagggaagtggaagagggagagaaggtaagaagagaaagaagatagtgannnnnnnnnnnnnnnnnnnnnnnnnnnnnnnnnnnnnnnnnnnnnnnnnnnnnnnnnnnnnnnnn

SEQ ID NO: 3242 - DNA, 1976 bp, Glycine max
  misc_feature (5)..(7): n is a, c, g, or t
  misc_feature (12)..(12): n is a, c, g, or t
  misc_feature (20)..(21): n is a, c, g, or t
  misc_feature (24)..(35): n is a, c, g, or t
  misc_feature (37)..(40): n is a, c, g, or t
  misc_feature (43)..(43): n is a, c, g, or t
  misc_feature (49)..(49): n is a, c, g, or t
  misc_feature (99)..(99): n is a, c, g, or t
  misc_feature (103)..(103): n is a, c, g, or t
  misc_feature (122)..(122): n is a, c, g, or t
  misc_feature (155)..(155): n is a, c, g, or t
  misc_feature (264)..(264): n is a, c, g, or t
  misc_feature (270)..(270): n is a, c, g, or t
  misc_feature (275)..(276): n is a, c, g, or t
  misc_feature (303)..(303): n is a, c, g, or t
  misc_feature (383)..(383): n is a, c, g, or t
  misc_feature (644)..(644): n is a, c, g, or t
  misc_feature (815)..(815): n is a, c, g, or t
  misc_feature (971)..(971): n is a, c, g, or t
  misc_feature (1074)..(1074): n is a, c, g, or t
  misc_feature (1084)..(1084): n is a, c, g, or t
  misc_feature (1222)..(1222): n is a, c, g, or t
  misc_feature (1228)..(1228): n is a, c, g, or t
  misc_feature (1373)..(1373): n is a, c, g, or t
  misc_feature (1451)..(1451): n is a, c, g, or t
  misc_feature (1507)..(1507): n is a, c, g, or t
  misc_feature (1582)..(1582): n is a, c, g, or t
  misc_feature (1608)..(1608): n is a, c, g, or t
  misc_feature (1658)..(1658): n is a, c, g, or t
  misc_feature (1668)..(1668): n is a, c, g, or t
  misc_feature (1682)..(1682): n is a, c, g, or t
  misc_feature (1700)..(1700): n is a, c, g, or t
  misc_feature (1733)..(1733): n is a, c, g, or t
  misc_feature (1735)..(1735): n is a, c, g, or t
  misc_feature (1772)..(1772): n is a, c, g, or t
  misc_feature (1851)..(1851): n is a, c, g, or t
  misc_feature (1976)..(1976): n is a, c, g, or t
  Peptide Sequence Number=SeqID_6734
  Probeset Number=SeqID_13021
ttttnnnttttnggtttttnnttnnnnnnnnnnnngnnnnttnttttgntgttgtgtggtgtgtctcgccttgtgcgagcgttgcgtggtttgcgccgntctncagctgagcgctctacgtntggtcggtgtgctttcggacgtgctgtgtgtgntgcgccctgcgtgcttctctcacttgatgtctatgtcgcgcccgctgtcctacgctctgctgtataagaatgttctactatcctcagccgtcctcgatcgtgtgtatanaggtgnttganngggtagtacacaacgcgtgtgagaagngacgtagagagcgcaatgatggtgcgcgcatcgcacacggcatatatctattacagcacacacagcgctacatcaaacanccatactatagctatatagagacggctcattcaccactcgacgatagataacactgatgtcattaacgcacgtattgtatcgatctacagaatgtcaatacgcacataatgatacgccgacctagactgtatactatacgatcaccgacgactgttatatatctacagtaagtatgtggtgcacagtatgacaatacgagcgcggacgaggtagacaggagtaaacgctagcgcgactatagtatgctattgtccttcgtntgtcggcagtacttgtaggagtgtcgactaacataatataatttaactatcaagactaatatatattaatataaaagatgagagtaagagaagagagagaaaatgaagagaacagaagataagatagaatcttagatcagagtacggacataaaatgtatagagtgatgangtatataacggaaatgataaaggcgaagattacagatagataatatagtcagccgcgactgtagtgactgtaataataatatataaccacgccctgtgttctttcattaactcgcatacaacgcaacacaccgcacatatacacattgatacctancgataatgatgaccgacgacactcgcagacacaatgatactcacgcctctaacatctacgcgcgccgatgatatcgcacgctgatgatctcgagatagtatanacatacgacncacatacatacctgtatgagacgaccagatatcatatactgatcctatgaccgctcttcttctctatattatctgtcccttctacgtctactatctcatacattcatgattaacacacccacacacccacacaacatntactcncctcgcgcctcatgtaatctatgtagatgtatgtgcacaagatcacacaacactatcacaagtatgagttaccacgaataacactacgtacaacgtatacatctggacatattaacgaatctttccacctatcttctctttattnatcataccgcgtgcacgcggacaacttataacgccgcaatatcgtatattgatgtaatagatataataagtatatagngtctgacttggagtcgaaccaaacctatttacatttatgtcattgtgctcaattcngcacactacactacaactatcttgataatgttatacaaattacatcgacacttatcatctctatcatattctggncgacatagacaaagcgtctactaatntacaatataacacaaacatcttcatctataatgctcatatatcacagtcnacatactacnatctctataagtgnatatatatatatgccccntaatcacacaccattatcatcattataccatcntncacattcacacttcgacgcggcgcacgtgttgatctnatatctatattgatcgtgatactgcgtggatgttgcgccgacgcgacacatataacacagcacgatatatgagacattngaacaacacatgagagagcacatcaagaccatcatgagtaataagatatattacacaagagtgagcgctcgatgaacgcaccaacaacactcgtgctacaccctattactacggcttcttcgttn

SEQ ID NO: 3243 - DNA, 2165 bp, Glycine max
  misc_feature (27)..(27): n is a, c, g, or t
  misc_feature (47)..(47): n is a, c, g, or t
  misc_feature (53)..(53): n is a, c, g, or t
  misc_feature (60)..(60): n is a, c, g, or t
  misc_feature (68)..(68): n is a, c, g, or t
  misc_feature (81)..(81): n is a, c, g, or t
  misc_feature (84)..(84): n is a, c, g, or t
  misc_feature (96)..(96): n is a, c, g, or t
  misc_feature (121)..(121): n is a, c, g, or t
  misc_feature (183)..(183): n is a, c, g, or t
  misc_feature (193)..(193): n is a, c, g, or t
  misc_feature (293)..(293): n is a, c, g, or t
  misc_feature (302)..(302): n is a, c, g, or t
  misc_feature (340)..(340): n is a, c, g, or t
  misc_feature (350)..(350): n is a, c, g, or t
  misc_feature (356)..(356): n is a, c, g, or t
  misc_feature (359)..(359): n is a, c, g, or t
  misc_feature (380)..(380): n is a, c, g, or t
  misc_feature (396)..(396): n is a, c, g, or t
  misc_feature (408)..(408): n is a, c, g, or t
  misc_feature (503)..(503): n is a, c, g, or t
  misc_feature (520)..(520): n is a, c, g, or t
  misc_feature (543)..(543): n is a, c, g, or t
  misc_feature (545)..(545): n is a, c, g, or t
  misc_feature (569)..(569): n is a, c, g, or t
  misc_feature (572)..(572): n is a, c, g, or t
  misc_feature (578)..(578): n is a, c, g, or t
  misc_feature (612)..(612): n is a, c, g, or t
  misc_feature (681)..(681): n is a, c, g, or t
  misc_feature (803)..(803): n is a, c, g, or t
  misc_feature (941)..(941): n is a, c, g, or t
  misc_feature (1041)..(1041): n is a, c, g, or t
  misc_feature (1192)..(1192): n is a, c, g, or t
  misc_feature (1206)..(1206): n is a, c, g, or t
  misc_feature (1229)..(1229): n is a, c, g, or t
  misc_feature (1286)..(1286): n is a, c, g, or t
  misc_feature (1385)..(1385): n is a, c, g, or t
  misc_feature (1511)..(1511): n is a, c, g, or t
  misc_feature (1563)..(1563): n is a, c, g, or t
  misc_feature (1708)..(1708): n is a, c, g, or t
  misc_feature (1815)..(1815): n is a, c, g, or t
  misc_feature (1870)..(1870): n is a, c, g, or t
  misc_feature (1872)..(1873): n is a, c, g, or t
  misc_feature (1903)..(1904): n is a, c, g, or t
  misc_feature (1942)..(1942): n is a, c, g, or t
  misc_feature (1953)..(1953): n is a, c, g, or t
  misc_feature (1988)..(1988): n is a, c, g, or t
  misc_feature (2005)..(2005): n is a, c, g, or t
  misc_feature (2032)..(2032): n is a, c, g, or t
  misc_feature (2102)..(2102): n is a, c, g, or t
  misc_feature (2107)..(2107): n is a, c, g, or t
  misc_feature (2117)..(2117): n is a, c, g, or t
  misc_feature (2121)..(2121): n is a, c, g, or t
  misc_feature (2124)..(2134): n is a, c, g, or t
  misc_feature (2137)..(2137): n is a, c, g, or t
  misc_feature (2139)..(2140): n is a, c, g, or t
  misc_feature (2150)..(2151): n is a, c, g, or t
  misc_feature (2164)..(2165): n is a, c, g, or t
  Probeset Number=SeqID_13022
tcggtggtgaggttgtgtgttgacgtnagcgttttagtgtttaatantcggtnacgggtnggacagtnggagatcgggagnatnacgacagcaaantgacagttgtatactttagtgatangtgctgacgtgtgcggtggtggcgcgtataatggatggtcacagtatcttttctgtcgactnagcattccantcatcattgacgtgcaagtgctgctcatatagtgagtgtgagttattgtatgagtattggtgtctatcgcgtcacgtcgtcgcaagagctgcgtcgaagngagctgcangtatcgtcggcgtcgtgatgttctatcgtcacttttcncatcttctcntgtctntcnttcttggatatttatttctcnctctgtctatcccgtntgtactgctgtngcacatatgtgtgtcacatctgtatctatcatctgtctctgtgtcatgcgactagaatatctagtctataacataatcatcactactgattacantgctacaatacgtcaancgatatagtattactttatcgtncntgattgtcgcagtcatcatccttngtngtttgnttcatttcctacgtgtggtcgttggagtagcacngattcagtgacgagcgcgatgacgggcgcgaatcggtgcgcgtgtgtgagtgtgtgtgtgtctgtgcantcaatgtgtgtcgtgtcatctagtgtcataagtatatgagtatctggtgcgtgtgagatgatcgtgtcgtgcagcggagtgttcgtgctgatagtagtgaagttgatgtcgacaggcgttgntactgtgtgccgggtagatggcgtgtgtcgctcagtgcacacatatctggttgtagtatcgatagcgtattcgcatccacgtgtcgagcgagatgatagtgatgcgcgcgtgtcgcttgtggatatgtcgacgagtgnagtgagtgtgatgcgtgtatcgttgcggctgtaggctgagtatatagacaatcgttgtgtcgtctattgtatcagtgtggtggtttgcgaggtgtgtgtntgtatataggtgtagtgatatgtcaagtactatacttgtgtcatgatgtgtgtgcataggttctctgtgagaaggtcatcgtaagcgtgtccttaggtgtgatggtgatgtgaataactgagagcagcgtaattcgatgttgtgtcaaatntattataattgtcnaacttattattactatcatgtgnagtgtcgcgacgtatggtgtgcatgcttgctgtctcgtgtcgcgttgttcagtgtcncgacatcttggctgtcttgtcgtggatatagattcgtatataggcagaccgtctgatgccagttcggtgagatggtgagcgtcgtcatgtcgtgcgatnatgtaagcggacgtgagacatatcacggagtctcgtttatatcagttaatcgttgtgtgttgtgtctggtcatttcgatgatgtgtcttgtcacgatgttcatgtctgcgcggcgtcgctcggtgngcatagagaggtccaagcgtaccacgcacatagactccatcagcgcccgtgnaggcagcgatgtccgcacattctcgcatctattgtcatgcatcgctgtcgttacaagagtgtttgcgtcgttcgtgttctgtcggtgcgcagtccgatcgtgggcggcacgcggggcgtgtggttgtgcgggtgtgctttcgtcncgttggggcagcgcattctggatactatatagtgtgcatgtagtgctctatacgcttattactctaacactatcgtagccttcttgttatgcaattaatagctctancttctctctcggttcggtgctattgttgtcggcgctacggtgtgtgtctgattcngnntcgactgacgaggctagacgattgagttcnnctcgcgcgtcgcgcgcaggtcgttctctcgccactcangcctctctcgntcgtggctctctctgtcctctagtatgttctcatnataggatgtcgcgtgcnctctgtcctcttcactgttcttgtganggtgatttttattgccgatcgttttgtctcgtgcatagctgtgtgacttgcgtgtgttagcgtcgtctgntcgantgtcgtctcnctcntcnnnnnnnnnnnccncnnacctttcaannccccccttccccnn

SEQ ID NO: 3244 - DNA, 1586 bp, Glycine max
  misc_feature (33)..(33): n is a, c, g, or t
  misc_feature (251)..(251): n is a, c, g, or t
  misc_feature (377)..(377): n is a, c, g, or t
  misc_feature (634)..(634): n is a, c, g, or t
  misc_feature (645)..(645): n is a, c, g, or t
  misc_feature (648)..(648): n is a, c, g, or t
  misc_feature (866)..(866): n is a, c, g, or t
  misc_feature (979)..(980): n is a, c, g, or t
  misc_feature (1069)..(1069): n is a, c, g, or t
  misc_feature (1236)..(1236): n is a, c, g, or t
  misc_feature (1238)..(1238): n is a, c, g, or t
  misc_feature (1335)..(1335): n is a, c, g, or t
  misc_feature (1342)..(1342): n is a, c, g, or t
  misc_feature (1390)..(1390): n is a, c, g, or t
  misc_feature (1411)..(1411): n is a, c, g, or t
  misc_feature (1460)..(1460): n is a, c, g, or t
  misc_feature (1462)..(1462): n is a, c, g, or t
  misc_feature (1496)..(1496): n is a, c, g, or t
  misc_feature (1503)..(1503): n is a, c, g, or t
  misc_feature (1586)..(1586): n is a, c, g, or t
  Peptide Sequence Number=SeqID_6735
  Probeset Number=SeqID_13023
ggggggccccccctctcctctcgctctagcccnctctcgcgcacctggcgaggaggcgcgtcgccgacacagacgcgagcgtggttagaggacgtgagcactgcgacgtagggagaagcgtcgaggaaggtagatgagaagtagcgcgcgcgagagcaatcacgcgcagtaacggcgaagctgtgtctagttatatgatatatattaatgtatcggacacgtgactgcgatgcgcgcgcctcgcttgcatnttcgcttacacgcttactatttatgagctccacgcccactgcgcgcccgacgcgattgatgtcactctctatgacataggactgatatagatatagtcgacccccagccacgcagacacgaacgcnactgcggaccacatctctgtctagagggtgatgacgtagagcggcgcgcgcgtggcggagattgtgacatcgagtaattgagtataagtgtaggagggtggagcggcctgtctcgttgtcgcgcggtcgtgcgtgcgcaggcctcgtgccgcggggcgggtgtgagataggaaggtggtgttgtgagcggtggtatgtctgcgagtcgcaacgtaatacgaagtatacgatgggtagtaaggtgtatactgctagancacgagatcanatntgcgagagtgtggaatacgtacagcagagagcatcaagacgatcacatgatacgtatacctatatatatagctaacagctcggacacacagcactctacatcatcgccgcctgcttatatatgatctatcgtcacatgcgttcgcgcgcggtgtcgtgcacgtagtattgtctgtgaagagtcgacgtgtgcctgatgcatgagcgcaatatcacaangatgacttagcaagatcttccggatcaagcgagcgcgcagatgtcaatgtgttaacgcttctcgagtagttgcatcgcctgacgcacattatatagagacactgactgctgtnntgtagtagttgttcatctgtgctgtgcagcgcagtgctgatgtcgcgaggcgcgtggtggtgaagtgacagtgctctcttctgcatcancgaagtaggaggctgacggatggcgctcatgatgctatcgtcttgagcggttgccgtggcagaagtgtatgtgtaatcacatttactgcgagcctgtgccccgccgtaagtcgtatgttatgatatcgcagcgcggaggagtacatgtgtatgagcgacataggacntnggtggcagctgagagcagagggtagtgcacatgaactggtagccgtgcggtggtttgtgtttagcgtggactgtcgcagctgtctacgctctgtgtngatgtangttcgtgatcgcgtagaagcaacgtgagacgggtaggacatgagcggnagcgggcggtgtcgggccggnagaagtctctaagcgctagcgatcgctcgacgatgagagatgctgagcntncgagacaagaggagaacgacggcgacgtgaatgngtgactngtgtgaccgtgagtatggaggtcacagcttattgttcgagatacgcaaacgagtatgactggcagctaagatgagtgcgatgn

SEQ ID NO: 3245 - DNA, 469 bp, Glycine max
  misc_feature (310)..(310): n is a, c, g, or t
  Probeset Number=SeqID_13024
ttttttttttttttttttaggaaaactgggtatcttcagctaacactccttgatgctatgctacaatacaaaattccgccatgctatgcacaaaaatagggttgagaaatctccatatagaacatgggtggagtaacccgctaaatatcaggtctactgctcatctgcttgagctttgaatagaatttcaatcatgatctattgttgccccacccactgcacgaacatcaaatcgccgggcccgagattattagctcttgccaccgctttgctgtcttcgatgattccagtttctaggttacgggcatanatgtcgacgtttttgctgagttgatttgcgaccgcaatcaacgatccattctggttcatactgaagtggcgagggtaccatccccctgattttgcaagctggacaaacgatagcttcccgtcggctgacggtttgaacgtcacaagtgaatcacttgga

SEQ ID NO: 3246 - DNA, 1414 bp, Glycine max
  misc_feature (5)..(5): n is a, c, g, or t
  misc_feature (133)..(133): n is a, c, g, or t
  misc_feature (141)..(141): n is a, c, g, or t
  misc_feature (264)..(264): n is a, c, g, or t
  misc_feature (557)..(557): n is a, c, g, or t
  Peptide Sequence Number=SeqID_6736
  Probeset Number=SeqID_13025
caagntagtgtcagagagatactagacatagagtgtagagagatgcggagctcactagcgatagcagctcacagcatatactcgaatcgcacacctgaactgaacggtgctagtatcgcagtgtctctatcgnccatgttngcacactgattgatatcactctgtgagtcgttagtttcacgatgcgacagttggagcacggatccaggcgcagtagctgataattcacgctatctcgttccggcatgtcgagacgtctgagantcgatcagagcgggtgagatgactagagtatgatatgtccatatctcatgtattgtctccgtactatactcacatggttatatattgtcgagagtacggtatgactgcgagtcagttatgatagcgatagatgccatatcggagccactattggtggatgctcatgtgcacggtcaagtgcgaagttgatagttcgtcaaatgctgatgatatgtggcatcgagcttcagacactgatgcgaagcgtatagttcgattgatctctcggttcatgcgtgctcctgaatgactgntacgaagctacgtagctaattgtctcgctgacgatgtacatatggaatgtctatttgcatctcctatgtagtcgcctatttagcaatacataatgagaactcctatgagggaggagggctacgaggagtcatataagaatatagcgtatgtgacgggtcgtgacagttgagtcttgcggcgttgcgagcgacaggtccagtagctcattcgatatgtatgccatacttgctcttgactcttattacttcgtccacgtatggaggaataggatgatgaatgttgtttatgtagcttttatgctgtgtgtattagttattgggtctctcagtcgacgcgtatcgcttctgcaaactctgtacagatacactcttgacgccgtagtgcgtcgtgccgaacatatccgcgataggatcattaacatatacgtctatcgaatgtatagacatcatttaactaggctggaacagatacataacacaaccactatatgcatagatgtgatcacaagatgtaacgtgcgatactatagtgttgcctaatgctagattcagcagtgtaccgagccgacagccagactgcatgatacacgatcatactaatatatagacgaacatgatccagatgtgagcggagcggatgactagataattagtaacataagctagctgttgatggctacggctatcgatctcagacaaacaatcagaggaggaggaggtgggagatgtgccagcattgaaccactgacatgcgtatgagtggtaatcgctggtatctcgactctcttttcatcttacgtttatgtgagtctgctgactaggtcaggctaataagagaatgccgcagagcagagcgg

SEQ ID NO: 3247 - DNA, 442 bp, Glycine max
  Probeset Number=SeqID_13026
ttaaacctaggttggtgtgacaatgtcacagatgagggggttaccagcttggcatcaggttgccctgatctcagggccctggatttgtgtggctgtgttcttataacagacgagagtgttattgctctagcaagcgggtgcccgtacctgcgatctttgggcctgtactactgccagaacatcaccgaccgtgccatgtactccctcgcaaacagctgcgtgaagagcaaacgagggaggtggggcaccccgcggagcagcagcagcagctcgaaggacgtcgatgggctggcaaacctgaacatcagccagtgcacggccctgacgccccccgcggttcaggcggtgtgcgactccttcccgtcgctccacacctgcccggagaggcactccctcatcatcagcggctgcctcagcctgactaacgtccactgtgcctgcg

SEQ ID NO: 3248 - DNA, 1736 bp, Glycine max
  misc_feature (1736)..(1736): n is a, c, g, or t
  Peptide Sequence Number=SeqID_6737
  Probeset Number=SeqID_13027
cagctacgtaggcccccccccataaaaatcaaactactacacaatcatataaatggcctctttaaaagccttctgcattctctttgctctggtatgcgtctcgtatgcttttaccgagcatgaatgtaaacacgatgaacaagatcatgacctccaattcatcgatgttgaagaagacatgagattactcggagaacaagatggtggcagagtccttgcttcagcttcaagtatgagaatctatccctactatgagttcctcaagtcctctgcttctagttcatatgcctcttatatctcaactgaacttattcctccaattgtttcatattttgaaagcgctcttaaagtcaagtacccagttgctggtaaacttgtcctcggttcaagcgtcagcaagatctgcgagcgtagtactccttccattcttaaatctggtggagtttctgctgattacttcgtctattttgactcagaagccgccagcggaactgaactcgcaagcaccaagtactgctacttagcttcaggttccaagagaccattggtgtctagaattatgatcaacagaaatcagttgaaggattctaatggaaacgtccttacccacgaaagaaacatgtacgtcttgatgcatgaagttacccacggtctcggattcagcagcagtctctactcttatttccttgatagcaacggaaacaagagatcaggacatatcaagtctgttaaggtcaacggaaagacccgttccttcattgatgttgagcctcttacctcaaagctcagaaaccactacggatgctcatctcttcaaggtgcccttatggaaaatggaggtggtagcggaaccgcttcttcccactttgagagaaaggttttcctttacgaattcatggcatctggtagtatccacggtagaagagtctctgagttgagtttggccatgcttgaaggatctggatggtacgttgttaactacgactatgctgaaccctacttctttggtaaaggacaaggatgctcattcgtcactggtagctcttgtaccaactacgacgaattctgcagcggaagtagcagaggatgctccccaactggtagaggtggtggttactgtagcagtgactctatctctgatggttgcaaatactactctcctaatgaagactatgactgcgagaaccctgatggtgaagattatgccagactcccaagcgctgaagtttatggaagaagtgctggaagcaagtgtttcactggtactttgaatactagatcatcaaacagtgcgacttcattctgtttcagatactcatgtagcggaagcggatcaaacactcaagtgcaagttcaaatcggaagcaagtccgtcacttgtactgatgaaggaaccaagactgttgatggatactatggtactatcaactgtcccgatcctttgaccttctgtaacactgttggcaagaaatactgccccagaaactgtatgggaagaggtacctgctcaaatggtacctgcagatgtaactcaggattttcaggtgttgattgtgctttaagatcttaaacgatctaagtttgatttttttattggaatgttcgaaaacatggatgcgtgttaaaacatattgtttacttttttaatgttccacttttttctactattttatttcatactaattagttaaaaggcgagagcctttawttgcggagctgcatgacaaaatcatagn

SEQ ID NO: 3249 - DNA, 389 bp, Glycine max
  misc_feature (337)..(337): n is a, c, g, or t
  misc_feature (342)..(342): n is a, c, g, or t
  misc_feature (358)..(358): n is a, c, g, or t
  misc_feature (362)..(362): n is a, c, g, or t
  Peptide Sequence Number=SeqID_6738
  Probeset Number=SeqID_13028
ttgcttctggttgatgattgcaaggaaggacgacacgtacatcaagcaatttgtctgtgtttggcttgttgactcgagtctcgcctccggtgctttcatgtcctcaaagcccacatgcatgccacatgttggttgatttggcatgtgtgcgcaactggagtgcgttcacattagattggcagattggcagtccaccggccggcctgcctagtatatattagagatgggttctgcagactgcagtctctagctactgttaatttgcatgtttacttccatgtagtttctcttgtttgttgctgttatttggtcattttgtaaattggtagcagcgccnagtcntgatggagatgatggngatnctacgcttagaaggcggtgggttcgat

SEQ ID NO: 3250 - DNA, 1631 bp, Glycine max
  misc_feature (1)..(1): n is a, c, g, or t
  misc_feature (67)..(67): n is a, c, g, or t
  misc_feature (94)..(94): n is a, c, g, or t
  misc_feature (130)..(130): n is a, c, g, or t
  misc_feature (219)..(219): n is a, c, g, or t
  misc_feature (276)..(276): n is a, c, g, or t
  misc_feature (417)..(417): n is a, c, g, or t
  misc_feature (593)..(593): n is a, c, g, or t
  misc_feature (602)..(602): n is a, c, g, or t
  misc_feature (680)..(680): n is a, c, g, or t
  misc_feature (741)..(741): n is a, c, g, or t
  misc_feature (756)..(756): n is a, c, g, or t
  misc_feature (813)..(813): n is a, c, g, or t
  misc_feature (824)..(824): n is a, c, g, or t
  misc_feature (899)..(899): n is a, c, g, or t
  misc_feature (901)..(901): n is a, c, g, or t
  misc_feature (1060)..(1060): n is a, c, g, or t
  misc_feature (1079)..(1079): n is a, c, g, or t
  misc_feature (1338)..(1338): n is a, c, g, or t
  misc_feature (1340)..(1340): n is a, c, g, or t
  misc_feature (1609)..(1609): n is a, c, g, or t
  Probeset Number=SeqID_13029
nagtgtctgtacatatacgtagagtcgcgatacacatatcgcgctccgcatgcgcttctgtattgtnatctagagttttacacacctgcactanttaacacaactctatcgcagcgcgtatatataccgncgttatcacacgtcacagcgcgcgcgaaatatcctggtatatatactcgcgcagcgtatgctctcaccgcgcataattctcgttctacntactccgcgtcgcgatgtcattatcaactttatatatgtcgcacgcggatatagacnatcgccggaattatcgatattctcggcccccactcccgtctcatatctagaggtgctcataatcgcccgagcgccgacaccgccgtgtataatatcgtgggcgccggcgcggagcggcgcacaaatatgtgggacataatnaatataaatatataagtgtgtgtgtacgcacacatagcgccgcgcgacatgaggcacgcgcgtagataataactaatcgtgcgcgtgttatcggcgcaagtaggcgagaatacgcgacatatatattatgtgtcgccgcgcgcagtcatattcatattcataccgcctccgcgacnatccgctcnattcacgcgcaccggccgtcttcttcaaataatatattgtctacagcgcgcgaagagctttgcggcacgcgatctttnaccctatcgttatcttcagtacataaatatatggtgtgttcgagtgagagagattatgcgnggagtgctacaacantaaaaataacacaacagacgactatgcggcgccgggtagtgataataaatatgtatnaaatatagagngctcagacacgccggtgtaggcggttggtaaacgaccaccaggtacgcaagtgtacatcgtcggcgccgtcactngntttatcgcgcggtgcatccacataacatacgtgcggcgcggcgcagacatattcgcacacacccgacgcatgttcataaatatgacgtcatatatagtccagctcgatagatccgctccgacgggtcgtcgatatcaatacgtagtcgatgtaacgagnacataacaatgtttcggtncgtgacttaattactccagcaatctacaacttgtgtgtagacggccgcgcgtttctgttgagtacgccatccccacatgacaataagataaacgtatatagtgtgtgcatgccgaacatatagtgcgcgccgcggtctgacacgagttaacgagtaataacatgctgtacatacaaacgcgtattttccggataaggggcgcggggctgtgtggcagaggaagtccaccaacgggtctacgctcgcacgatatcttcananaataccgggcgcgtcgtgcgcgtgccttaactagatatagactccaatatatttatgtggacgtccttacatcacttacatcacgtctcatcgccgaccgcgttcatcgagagtaatggttgtgtgggtcctgcagactcgcgcgccgtactcaccgaagggcggaaggagacacacggctttataatatatatatgtcaataagattgattgtgttgtagtctacctgcccggcttgcggtcctctctcttaacgcccctaccgccanaaggcaacgccccacctcacac

SEQ ID NO: 3251 - DNA, 1849 bp, Glycine max
  misc_feature (76)..(76): n is a, c, g, or t
  misc_feature (156)..(156): n is a, c, g, or t
  misc_feature (276)..(276): n is a, c, g, or t
  misc_feature (476)..(476): n is a, c, g, or t
  misc_feature (512)..(512): n is a, c, g, or t
  misc_feature (577)..(577): n is a, c, g, or t
  misc_feature (583)..(583): n is a, c, g, or t
  misc_feature (594)..(594): n is a, c, g, or t
  misc_feature (615)..(615): n is a, c, g, or t
  misc_feature (761)..(761): n is a, c, g, or t
  misc_feature (819)..(819): n is a, c, g, or t
  misc_feature (870)..(870): n is a, c, g, or t
  misc_feature (876)..(876): n is a, c, g, or t
  misc_feature (900)..(900): n is a, c, g, or t
  misc_feature (1003)..(1003): n is a, c, g, or t
  misc_feature (1032)..(1032): n is a, c, g, or t
  misc_feature (1037)..(1037): n is a, c, g, or t
  misc_feature (1089)..(1089): n is a, c, g, or t
  misc_feature (1240)..(1240): n is a, c, g, or t
  misc_feature (1267)..(1267): n is a, c, g, or t
  misc_feature (1321)..(1321): n is a, c, g, or t
  misc_feature (1326)..(1326): n is a, c, g, or t
  misc_feature (1334)..(1334): n is a, c, g, or t
  misc_feature (1367)..(1367): n is a, c, g, or t
  misc_feature (1451)..(1451): n is a, c, g, or t
  misc_feature (1454)..(1454): n is a, c, g, or t
  misc_feature (1464)..(1464): n is a, c, g, or t
  misc_feature (1507)..(1508): n is a, c, g, or t
  misc_feature (1512)..(1513): n is a, c, g, or t
  misc_feature (1535)..(1535): n is a, c, g, or t
  misc_feature (1541)..(1541): n is a, c, g, or t
  misc_feature (1549)..(1549): n is a, c, g, or t
  misc_feature (1583)..(1585): n is a, c, g, or t
  misc_feature (1604)..(1604): n is a, c, g, or t
  misc_feature (1649)..(1649): n is a, c, g, or t
  misc_feature (1656)..(1656): n is a, c, g, or t
  misc_feature (1662)..(1662): n is a, c, g, or t
  misc_feature (1665)..(1665): n is a, c, g, or t
  misc_feature (1697)..(1697): n is a, c, g, or t
  misc_feature (1701)..(1702): n is a, c, g, or t
  misc_feature (1706)..(1707): n is a, c, g, or t
  misc_feature (1719)..(1719): n is a, c, g, or t
  misc_feature (1723)..(1723): n is a, c, g, or t
  misc_feature (1726)..(1728): n is a, c, g, or t
  misc_feature (1748)..(1748): n is a, c, g, or t
  misc_feature (1750)..(1750): n is a, c, g, or t
  misc_feature (1757)..(1757): n is a, c, g, or t
  misc_feature (1766)..(1766): n is a, c, g, or t
  misc_feature (1771)..(1772): n is a, c, g, or t
  misc_feature (1775)..(1775): n is a, c, g, or t
  misc_feature (1784)..(1784): n is a, c, g, or t
  misc_feature (1802)..(1802): n is a, c, g, or t
  Peptide Sequence Number=SeqID_6739
  Probeset Number=SeqID_13030
ggcggatgtttagctgatacgtaatacgcgtacatatcatataatatatcataagactagtcggatagttcacacnagatatacatcgcaccgcaacgaacacacagagtttcgaacaacgcgggaatatggtcacgcatccagattcccatgttnttgttcgcgtgatcttctattgtctctgttgtgtatctattcaactctcgtactgctatatgtatatagtgcgggtcgtgttgttgtctggtgtgtcgctccatctcatatagttattanttggccgtgttgttgtgtgtgtgaatgtagattatgtatttgtctctatcgacatccattgacatcatatcagtattagccgcgaggcgtctgacctgttaatcttatgtattaactagcatattgcctctggtaggacaatatagatatattatgttaacttctcatccggccggacgcgcacacgatcgtcgccgcgnctccactcggcgcatgctcacgctataggtgattangatgtgatagtgagaatatgagcagtattgtagatctgctcactctcatctcttcatcctcgctnctcatnagcgctactangtatctgtctcgcgatcttcntttttgtcgtgctataacagcatatccgtggtatcataaagataacatatgtttatcatctaacattacattgtatctactttacccatcatacttccactatatctggagtgcatatataaatcataaaactctattggtaccantatttcgcatgctatacagctcagtggtattacagatacacatgtcgcagttcctacnatcatacgtgaatctgtgtgcagttatctgagtcacatctcccatcatatnttctantattcactcacatcctcatccgtnctcccgcgcctctggcgtggtcgcgcctgctgcatctcagctgcacgagtgaacacgcgaggcgcagagcccgcggcaccgtccatgactacaatcgcacgcnctcactctaacacatcaacacacactaancacanataatataacacacatatctcacacatagacgatagagcgtggtactacaantcacgcgtcgagtcatcatccacacgaggatatatcctctcatcttctcttcatccttcgtgtactctctcatcttcgcttctcctctcgtcacgccgacggcgtacggaggcgcgcggcagtacgcggcctgtcgtactcgcgcgacccncgactccgacaatctaatacgcacacncacacccgctcgacccactccgctatcacagacgctcgaccacaacgcacaatntttanattcttcnccatatatttatcgttatgatgtctcatactanaagtcatcttagatcgtgtatgctatatgtcatctggcgcagcatcccgagcacatatcgatgagttcacacacctccgctcanatntattcttgtntttcttgttctactccacccagcagctcgccctgcacaccccnnaccnnctgtacatgcggagcggataancgtganatacaccnccagcagccgcacatctcaccacacgggtaggcnnnagagtcgaaatagtatatntgcacattctgagtcgtagtatgtcatcatgttactatattagtnttacaantgtgtnttnttttttctgtgtgtgtgtgctagcggtggcgngggnnaaannaagatgaaaatnaaanttnnnaagggagcggtgtagattgngngtggcanaaaaacaanagaannatnaaacattanaattgtgagtagaaatanggtgtagatatataattaaatatataattatgatgtgtgcgagggtg

SEQ ID NO: 3252 - DNA, 543 bp, Glycine max
  Probeset Number=SeqID_13031
ttgagcttacacgtgtagaatttctcaatttaatttttttaaagataaaataatatatttttaatttctatacttttgttgttgaatcttatttttagtatcttgatatcgtaaaaattaattcctaaattttataatatatatatatatatatatatatatatatatatatatatatatatatatataatccctccttaattacagcctgaagttgaaaaacatgcacaactttataaacttacatattttatcctttatttatgattttattaattctagctgagtgtgaagacattagacaccttcatatatgacaagttattttctcagctggtgccagaagaaaaggaaaaaggaaaaccgtttttcaaatattctgcttatcattttttactttctttacatgtacctacttttcatgaaaatagtggatgccattaaatattctaactaatctgtgaattgaacattctgctgaccattttttcagctttccaagaaccacattcgacgagaataattttagccatcacataatag

SEQ ID NO: 3253 - DNA, 454 bp, Glycine max
  misc_feature (437)..(438): n is a, c, g, or t
  Peptide Sequence Number=SeqID_6740
  Probeset Number=SeqID_13032
gaagccaccgtcgattctccaatctcttcttcaagttctctgccgatggccgcctccgccgtcgccagatcgatacttcgagctgcttcgtctcggggagccgccgctggttccactggccgcttcgcgtctcaagcgaaatcagttccgccgatgtttagagccagcgctaaaagaagctcactgctttcgcctctccgaaatcctgtggagatgagcttctgtgttgagtcaatgttaccataccacaccgccacagcttctgctctaatgacttcgatgctttctatctctggacatacctatggctggctctctgacgcttgcattgatgatgtgtgatgagtttgccagaagatcactgaagctaccagtttatgtacaaacctctacctttatttaggatctagagccctcttgattttctcccctatttnngcttggagagaatgtg

SEQ ID NO: 3254 - DNA, 504 bp, Glycine max
  Peptide Sequence Number=SeqID_6741
  Probeset Number=SeqID_13033
tcctcctttttagccaggggagagaaaaaggtggggtttccagtggcgcgcgccccgccgccgccgcctggggccatcggacgttcggaactcggaacctcaagaactacggccccggatccagggtttgccgtgtctgcggcaactcgcatggcctgatccgcaagtaccgggtgatgggctgcagggcgggcttccgcagcaacgccaaagacacagggtccttcacgtacccttataaatgtaaaaatcaaaagaagaaaggacgcgaggattatcaaagaactgtggtgctttatcgcggctgagatttttatcataagctatgtaatggactactataatgtttttatcctggtgacaaaaccatgaaaccatgtaagcgactgctgtttgtgcatgtgagagcaattgtaatgttactttctgttactcttgttacattctggatataaatctgcattgttttattataattatattataagcagaaggccgaccatg

SEQ ID NO: 3255 - DNA, 1748 bp, Glycine max
  misc_feature (3)..(3): n is a, c, g, or t
  misc_feature (41)..(41): n is a, c, g, or t
  misc_feature (70)..(70): n is a, c, g, or t
  misc_feature (84)..(84): n is a, c, g, or t
  misc_feature (125)..(125): n is a, c, g, or t
  misc_feature (142)..(142): n is a, c, g, or t
  misc_feature (184)..(184): n is a, c, g, or t
  misc_feature (285)..(285): n is a, c, g, or t
  misc_feature (295)..(295): n is a, c, g, or t
  misc_feature (370)..(370): n is a, c, g, or t
  misc_feature (374)..(374): n is a, c, g, or t
  misc_feature (385)..(385): n is a, c, g, or t
  misc_feature (411)..(411): n is a, c, g, or t
  misc_feature (475)..(475): n is a, c, g, or t
  misc_feature (510)..(510): n is a, c, g, or t
  misc_feature (515)..(515): n is a, c, g, or t
  misc_feature (555)..(555): n is a, c, g, or t
  misc_feature (662)..(662): n is a, c, g, or t
  misc_feature (719)..(719): n is a, c, g, or t
  misc_feature (725)..(725): n is a, c, g, or t
  misc_feature (929)..(929): n is a, c, g, or t
  misc_feature (1124)..(1124): n is a, c, g, or t
  misc_feature (1189)..(1189): n is a, c, g, or t
  misc_feature (1319)..(1319): n is a, c, g, or t
  misc_feature (1435)..(1435): n is a, c, g, or t
  misc_feature (1447)..(1447): n is a, c, g, or t
  misc_feature (1475)..(1475): n is a, c, g, or t
  misc_feature (1477)..(1479): n is a, c, g, or t
  misc_feature (1514)..(1514): n is a, c, g, or t
  misc_feature (1535)..(1535): n is a, c, g, or t
  misc_feature (1551)..(1551): n is a, c, g, or t
  misc_feature (1619)..(1619): n is a, c, g, or t
  misc_feature (1629)..(1629): n is a, c, g, or t
  misc_feature (1648)..(1648): n is a, c, g, or t
  misc_feature (1657)..(1657): n is a, c, g, or t
  misc_feature (1674)..(1674): n is a, c, g, or t
  misc_feature (1697)..(1697): n is a, c, g, or t
  misc_feature (1705)..(1705): n is a, c, g, or t
  misc_feature (1708)..(1711): n is a, c, g, or t
  misc_feature (1713)..(1717): n is a, c, g, or t
  misc_feature (1719)..(1719): n is a, c, g, or t
  misc_feature (1721)..(1722): n is a, c, g, or t
  misc_feature (1724)..(1726): n is a, c, g, or t
  misc_feature (1732)..(1733): n is a, c, g, or t
  misc_feature (1737)..(1740): n is a, c, g, or t
  Peptide Sequence Number=SeqID_6742
  Probeset Number=SeqID_13034
canacgtgacgagagcggtagatagatgaatcacgcatcgntggcggtgcggtgtgtgtacgcgttagcnatatgtctatgctngatcgcatgggatatgaagtcgatctattcgctgctcccgnactgtcgatagagcgcntggtagatgcacattgatatatgcgtatcagtgcaacgaagnccggctagcagcaggtgcctatgtggtctgtgtgtcagtggatatgcactacctctctgcacgcggcgcaccacatgagtatgacgtgtgcgtcatgactnctgccatgcnggacactagaacacagatatcaattatcatatatgtcgtcgcagctcgatatgtaagtcgtcagagatacgcgtngatnatgcaacagantcccgcttcgtccatcagacaatatnatctctatccatctgtacactatctaccttatgacgtggaatacatccgacgacatctgtgatntattgctattatttagtcttctctgggctactacncacgnccatcagtagtgtagcagagcgcactggtactgtccgtgntattgtagctgtactcagcaggggcggcgcgccgagataagcacgatcatagagtacggagacgatagagtatatagtatagtaacgtagcaatactgcatgtgcgncagagtacgagatagccatactgcacatttcgcagtgtggttgtgtagtgctatcanacacanccacacatctctatcgcttctctccaacgacctctactatatgtatctatactgagtatacgtcacacgcgaatcacgacgaccgcgaattatctatactcgagagatatatatcatatacataaacatatacagatcaatacgacagtgcgccgagcaacgaacgcagatggacgagaaatacgacgcgatagacagagaganaatacatagtgacgtagatacacagaagtcagatagtctcgcgcgagagacgatgaacaactagtagaatgtccgagtattctatggacaggctagagtagcgtatgtgtgtcgcggtgcgcgaataaataagtaagagaacatatcatataaatatatatatagtgtatagtagatatacgcgtataggagtanaatagtagaagtaggagtgatggttatggcgtatgagtagtgaagagttatatatgatagtgtantctggtgtagagacgatgttagtagaaatacaccgtatgtacagtagtactcttctacttggaattgaatagccggatacttgtatatattcagcgacttcatctcaacctcaggacatatttcgaatanactctctgtacatcacttcttatattaatgagatcgatgagatggtataagctactgacccatatgaccgtatcttcaccgttcgcagtctcatatgctccccggcacgtgtcagnggccgtgctatntgcgtgtcccgacggtatcgtgttatantnnngttgttgatatgtgtgttgattactgttatacctnatctatcctgtgaacactctnagtgacacgtgagtgngtaatacagtagttaaatatttatatattacgcgggacaacgagcaacatccaagatacagcgttagnttagcgttgntccaaggcgatacgttggngggtagganggtgtcacataagaacnagcacaaagacgcacagacactngacagaanaannnnannnnnanannannnaaaaannaagnnnnaaaaaaaa

SEQ ID NO: 3256 - DNA, 600 bp, Glycine max
  misc_feature (531)..(531): n is a, c, g, or t
  misc_feature (544)..(544): n is a, c, g, or t
  misc_feature (546)..(546): n is a, c, g, or t
  misc_feature (591)..(591): n is a, c, g, or t
  Probeset Number=SeqID_13035
gagacccagcgacttcacggtctttaagttgattgtgagtaagcgcccgtcctttaggctttatgacgggtaactaccttgtagtcccccggcacgcacttgtagcgctcgatatgccaagcgtctgagtgatagattggatgctcttccttccacttggccaatcgtcactgacgacagctagctttctcgtgagcgacgatgccgtcgctcaatgcgcattccccgctcacgcggttccaaggtgggcggggagctttttcgcgttggagcgtcggatgagagcatatcgtcatttgccgccgccgaaatataccagtggcaacaggcaggcagccctcctgacttgtccgcagtgttgcaagaccatgacgccccgcgagaagttgtatgtctgtcaattgtgcaggcagtttgttattgtcttcgccgtaactgaatcgaggtcgttctctatttctttaagccagcgaactgagagattcagcttcacaaaaacgccgcccatttaaagttagcgcgagcggcggnttttccagccccngngagtctaacgcaaatctccagtgcagaatatcctgcacaacttantgccacagt

SEQ ID NO: 3257 - DNA, 1461 bp, Glycine max
  misc_feature (22)..(22): n is a, c, g, or t
  misc_feature (32)..(32): n is a, c, g, or t
  misc_feature (86)..(87): n is a, c, g, or t
  misc_feature (192)..(192): n is a, c, g, or t
  misc_feature (257)..(257): n is a, c, g, or t
  misc_feature (509)..(509): n is a, c, g, or t
  misc_feature (686)..(687): n is a, c, g, or t
  misc_feature (689)..(689): n is a, c, g, or t
  misc_feature (737)..(740): n is a, c, g, or t
  misc_feature (850)..(850): n is a, c, g, or t
  misc_feature (893)..(893): n is a, c, g, or t
  misc_feature (1065)..(1065): n is a, c, g, or t
  misc_feature (1256)..(1256): n is a, c, g, or t
  misc_feature (1380)..(1380): n is a, c, g, or t
  misc_feature (1423)..(1423): n is a, c, g, or t
  misc_feature (1440)..(1440): n is a, c, g, or t
  misc_feature (1461)..(1461): n is a, c, g, or t
  Peptide Sequence Number=SeqID_6743
  Probeset Number=SeqID_13036
gagataagagggggggtggctnatgttggganacggcgtagcactatctgtgcatcgggaggttggggcgtggtcatctgtgttannttagtggttggtatactcacgtaggtggggcggaggggtgcttggcatcctctgtggtcttcgcgcgcgtcgtcgtaacgaggcgactcccttgggtgtgttctnattgtgttgtttgtggcttgttatactaccgtgatatcaatgtaagtctcctcccttgcgtcgcngcgtgtgtgctgtgggtgtctatcgtgtgggcacgccttgcaattgtgcacaggcaggtgtaacacacctttcgtgcggttctatgaccgcgcccgcgtatctatcatattcgacacatggtgttcgtaatactttggacgggtcggctatatgtgtgtatataatcaatcttcatttttgtgtgtgctcctttgcacttaaggctcggcgtggtagtcgtgatggcgagacttagtcttgaccaccatatngctgttgttggtgctttcctttttgcatagtacagtctactcattattcgtagtaataaatgagagatttgtaataacaattggagtggtggtgcacacatgggtgtagaattgtggtgtgtgtgtgggcgtgtctgattgtaggatactagtggttatatatgatacaaggagagnnanatatatgaagatatttatttatccatacaagttgggtgtgggaggggnnnnacaacatatgtaagtatgcactccgtttctccgctccaccgccgacttatagctagctttactgtgtgtgtgcgccctctcggggtccacgccagccctcacaccccgcnccacatcggtgcatatagtgtcgtcggtcacctgtgtgtgccnacaatgtgttggtgtgtggcgtggtggctacgccatcttatagatgtgaacgctgccactcttctttgctctcggctcgcgctctcgtacttctggcgcggagccgtctcgctgtctgtgatgtaattgtgttgtgtgggctccttctcctctcatcaccttcctctccgtnctcgctctatatgtgtggctacaatctgctgtagccgcctctacttctgtgagtgcgatgcgtgttgtgctgtgcctctctcgcgtgttgtgcgctgtgcactgtcttgtgtttctgtcatactttctcgctctcctgctgttgtcgtgatcgcgtctgctcctagacttctctatcgcgcccaccgaccnctaatacatgactaccaccgagcatctctgcatcttactatagctgctccctatcatctctacatatcgtatgtgtggatacatctattcattggttgtgctcgacacatgatgtgtgcgtgcnagcatgtgcgtgtatactctccactgtgcgcgactcaaactcnctatacatgttgaatgntgcattcttgccgtcgatgan

SEQ ID NO: 3258 - DNA, 689 bp, Glycine max
  misc_feature (437)..(437): n is a, c, g, or t
  Probeset Number=SeqID_13037
tgtctatctcttcaaaggaactttccatggaagagactggggttgagagctctgccggcagaagtttgggaatcaggggaggggataaaacttaaactatacacaaactccacatcaaggattggccgggggacctttttttttgtgttcccctccacacatcgtttgtattaaaaattaaatttaagaattggccaggtacgagtctaaaaacactttcgagcccttcatgtgtgaagctgggtaacaatcccctcagacagataccttcggatggctttgaagtggggcctaaacttcagatcctggatctaaggggtaatgcagcttcattactagatggacctgcattttctagtttgccatacctgcaagagctttacctaaagaaaatgaagctcagtaaagtcccatcagatatagtggggctacaacanctacagatccttaacttaagtcagaattcccttcaatcaattccagtaaagttaaaagatctcacttctctcaaagaactcgacctatctaataacaacatctcagtccttctacccaaactaagtttactaaagcccaacctacaaacactaagacttaataaaaatcctctcaaaaacattcgaaaaactatcttaaatagagaaactaaaactattctacaatatttgaaaaacaaattacccacacca

SEQ ID NO: 3259 - DNA, 594 bp, Glycine max
  misc_feature (503)..(503): n is a, c, g, or t
  Peptide Sequence Number=SeqID_6744
  Probeset Number=SeqID_13038
tcagctacgtaggcccccccccccaaatatgttaaatatttaagataaagagcaatccaaatggctttcgttaaggtttataagactagagcttacttcaagagataccaaactagattcagaagaagaagagagggtaaaactgattaccacgccagaaaggcccttatcatccaagataagaacaagtacaacacccccaagtacagacttgttgctagagttacctgctccagagttatcgctcaagtcatctatgccaccatccaaggtgatagaatcgtcgctgccgctgacttcagagaactcaagagatacggtctcgaagctggtttgaccaactacgctgcttgctacgccactggtctcctcgtcgccagaagactcctcaacaagactggtttggacaaggtctacactggtgccaagaagactgacggtgaagactacgatgtcgtcaacgaccataagggaactgaaaagagacccttcaaggctgtttnggatgctggtcttatcagaaccaccaccggtaacagagttttcggtgtcctcaagggtgcttgcgacggtggcctcaatgtcccccactcc

SEQ ID NO: 3260 - DNA, 614 bp, Glycine max
  Peptide Sequence Number=SeqID_6745
  Probeset Number=SeqID_13039
aaaccaaccatccattctttcacacacagatctgagttaggttaggtttattttgaaaacaaaaaaaaatccccaatgtcgcagcaattagggttcgcgatcgagctatacctagaccctgcgttggagaatcagttctgaaagcatggaacgttcttgcgagaagacaatcagcacgcacctgatagaaatggagtcctcggcacacataaccctattctcgggcgcatttctagaacctcgaaagttcgatctctccttgaagggtccgaatcgaaagaagatccttctccttctcactttttcttccctcgccatttttcccaaagaaccccgaaaactcctttttcttgccccaacccctttccctttattccttcaattttaggaaaagttttggggcctttacaaaaaaaaagcccccaaaaggggaaaaaaaaccttttaattccggaaccccttttggccccgggcccccctggccccaaaaaagaagggccggggggttttcccccccttgggaaaaaataaatttccggtttcccgaaaaccaagagaaatcccccccccaaagacccccccggggagagaaaattttttttttgggttgaaaa

SEQ ID NO: 3261 - DNA, 1454 bp, Glycine max
  misc_feature (166)..(166): n is a, c, g, or t
  misc_feature (192)..(192): n is a, c, g, or t
  misc_feature (337)..(337): n is a, c, g, or t
  misc_feature (437)..(437): n is a, c, g, or t
  misc_feature (510)..(510): n is a, c, g, or t
  misc_feature (907)..(907): n is a, c, g, or t
  misc_feature (926)..(926): n is a, c, g, or t
  misc_feature (1167)..(1167): n is a, c, g, or t
  misc_feature (1358)..(1358): n is a, c, g, or t
  misc_feature (1363)..(1363): n is a, c, g, or t
  misc_feature (1376)..(1376): n is a, c, g, or t
  misc_feature (1384)..(1384): n is a, c, g, or t
  misc_feature (1405)..(1405): n is a, c, g, or t
  misc_feature (1433)..(1433): n is a, c, g, or t
  misc_feature (1435)..(1435): n is a, c, g, or t
  Peptide Sequence Number=SeqID_6746
  Probeset Number=SeqID_13040
cgagctagcaccgccaagtgagagcctatagttagattagtgcgttatgtcgtgtgtatgatgaggagtatagtagcgacgccactcgcgcacgcatacgttatattctgagatgtctcgcattaagatcgtgcgttagagtcagccgcgtgataagattagtttnttactaatctctcacgtggatgtatnttgtgtggtgttggatcgttgtgaggaggtcgtgcattcgctagatggtgcgaagtgtgcgtgaggtagtagagaggtggtgagtgagctcttaataggtagttcagagccgcgcggaagatgcgcgcggtgagtgcggagtggntagtggcgagagaacgggtgcggcagtgtgaagaatatgtatggggtatgggggcgaagagatataagtgtgttatgataggcatccacgcagtgtatanagagaggcagtacatcattctatagtggcaccgccggagattagatgtcgatctgtgtgcatactccactctncacaccatatagggagtggggagggtctgtgccgccaaaagaagaatgagaggagaacctgtcacgcggggtggggtgaatgtgcccacccagagatgtgtgcctgtgtggatttgttgagacgtcgaaagaagataggtagatcgtagatggagtgaccggtggttgatgattatatagacctcacccgcaccattatattggcgtgtggatttgagatcgaagtcgacattccctcccgcaggtattggggcagagccacaccaaatgaaagagcgtcacaagtgtgggaaggctagagtgcacaccacactgaaacaaacgagtactcgcggatattatttaatatcatatcgaaacataaggtaccactaggtatcccgattcaaataaggtnccagacggtgttaataaanttttcgcctcggtcggccgcacgtcttgcgctgtttatattgcgaactagccgaatattgatagatcacaagattgacgcgcgaggtcaactgagcacacctgcactacatttaagtactctctgatcacgactaatgatatctaccaaaaaacaacatatgattgtctgcagagctaacttctcctactatattgctatatacgatttctcgctttatatttttactcgtatcactgcanggcataacgcgcctgatcttgctacgattgacgtatatcactgcgcatgagtgctgtatgatgtgatgagtctgtcttggcgctgccggcgatggcacactgccgtgttacctcccgcagtcgccctctattctttagagttgtcgactaagccacgacagcgcgctcctctctttaccctttccgttctncttanttaacaatatgantatctcanatataatattacatatacccnacgacatcaataacacacttccaacccnanactcacacatcactcccac

SEQ ID NO: 3262 - DNA, 431 bp, Glycine max
  misc_feature (187)..(191): n is a, c, g, or t
  Probeset Number=SeqID_13041
ctgcagttactcagtgttttttttcttttcattgacaggatgacatttataaatggcttgcagctacattctttctctggtttgttctggccatttactttgacaatataatcccaaatgcatcgggtgtgaggaaatcaatatggtattttctaaatcccaattattggatgggcaaaggaggtcnnnnngtgaaaggtgatggggttgataactgtgtaggtgcaaccctatgtctgagacctgaggacacgcacatgagtgatggtctcgttggagaagaaaacggcatgcttcagcaactaacagaaggtcttgttgatgcaaatattgctgttcagatacgtggccttgcaaagacataccctggcacacgtagcattggttgctgctttaaatgtaaaagaacttcaccttacaatgctgttaag

SEQ ID NO: 3263 - DNA, 500 bp, Glycine max
  misc_feature (292)..(292): n is a, c, g, or t
  misc_feature (330)..(330): n is a, c, g, or t
  misc_feature (380)..(380): n is a, c, g, or t
  misc_feature (399)..(399): n is a, c, g, or t
  misc_feature (402)..(402): n is a, c, g, or t
  misc_feature (434)..(434): n is a, c, g, or t
  misc_feature (454)..(454): n is a, c, g, or t
  misc_feature (492)..(492): n is a, c, g, or t
  Peptide Sequence Number=SeqID_6747
  Probeset Number=SeqID_13042
tcgagtcagctacgtaggccctccccccccacctgttgcttcatgtaacgatgagcacgttgcttcatatgtcaaacaccaaaaagttggtttccactgtttgaacaaatcaaacccaattgctaaacaattccaacgcgaagccgatcaaggtcaaaaactcccattggagcacaagacccaagacatccaggcttacgtcgaagttccagttcgttgtgaacgtgtaaacaccgaagagaagcgtctaagaaaggaaactgaaaagaccgccgaacaaaagatccacatngttcaaaaccaagacggtgaagaagaatcattcctgtncgagcacaaaccatggaccaccgagcaagaagaacaacaacaaaaacaangtcaatcgtcaagacattnggncagaaaaagccaccaaaaacaaaaccaaatgngaggtagccaacaaagcgtngacgaatcagacgatgaagattcattcagcgaacaagncttggaca

SEQ ID NO: 3264 - DNA, 406 bp, Glycine max
  Probeset Number=SeqID_13043
actcgagccgaatcggctcgagggacgacatcaaagtgtatggtgacgctttggagaagccaacatgactctttttaccaggtcacaagcagcctccaattcgtgcctctctcttcaaaatggccgctaccttctcagatctccacacaggagcggggctcgagtccctcgacgacttcctctctgggaaggtccacctttccggggatcagttcacaaaggacgacatcatagtgtatggtgctgttttggagaagccaggtgactcttttcccaatgctgccaagcggcacgaggttgtcttatctcacctcgctgtaagcttccccggcattgcttaatgggtgagatttagttgtctagctttaacaccctttgaggctgctcctgcgaaaccggatgcttc

SEQ ID NO: 3265 - DNA, 1635 bp, Glycine max
  misc_feature (11)..(11): n is a, c, g, or t
  misc_feature (28)..(28): n is a, c, g, or t
  misc_feature (225)..(225): n is a, c, g, or t
  misc_feature (444)..(444): n is a, c, g, or t
  misc_feature (468)..(468): n is a, c, g, or t
  misc_feature (760)..(760): n is a, c, g, or t
  misc_feature (1021)..(1021): n is a, c, g, or t
  misc_feature (1024)..(1024): n is a, c, g, or t
  misc_feature (1268)..(1268): n is a, c, g, or t
  Peptide Sequence Number=SeqID_6748
  Probeset Number=SeqID_13044
ccgcgctcggncagcggcaatatgaggngttatatatgcgcagacaacagaactcatagtcgtacggacgtcggatgcggcgcgcacgcagccacaatgccacgctcctcgcgatcatcctctgcgcgcggcccgcgcgtaataatatatcgacacacattattaaacaccgacgacgacatacgcagcctcgtaccacatataagtgatctgtattacacgtanccacgcgttcagtatcccgcgcgagtgtatatttcattacccaccaacacatacggccgcgacgcacgccttttattacacacacaatatttgatatgttataatatctgtcgcgacgcaagcgcggctagcgcaccgactatgacacactcgacgcgtgttcccgcgcgcaccgcggcgtgtatacgttccccggccgacgcgttatcaatatatatnactagtaacgcacacgcaggaatnctgccggtgatgtgttataaataataggtcgtagagtgggggtcgagtcgcatgacgccgtgcgtgtattactcatggcgcgtattattccgagcctcacacggcttcgtctcactagtataacactagagtcaaaacagtattatcggggcagcgatggtgcggcgacaaaacaaacagtgtagtagaagacacgtacgtaccgcgggataaggaggtacaacatgaccgtcgccggtaggatcgaaaccaatagttatcccagtgatataatgcgctcagtgtcggcgcnccacggctcgttagttaataatatttaaggtggggcgggggtgttatttagtcccacacacatgtttcatctgtgcaatataaccgccgcgtgtatttcttagtccgtcgcgccccgcagccgtatcttttttttagcgggggccgtccttgcttattttctgatttgtatatcgcacaagatatatgcgggcgggcgggggagacgacaacagaccacgtgcctctatcggtggcgcaacacaccgcttatttctttacnccntgtccataataaataataattatgcgcgctggcggggcgctcaatatatccgtctaaaatgttccgcaagaggcagcgcgcgggttatattcacacatctcggtgtgtttattagggggggcgggggtggggcacccacacccagcgcctttttatataagcgcggcgcgcatgccgaaaatataatcctcatggcggcgagctcgaatatataaataagacgcgggggggagaatagtgaatntaatatatatgtgaggggattcattgaagcgggcgcatggcgcggcatacatataataatataggcaccctcctttattatttagatcgcaggtgatatctgtgtgaagagaggtcgcggggggaggaaaaaagttaaaagtagctgtgacgggggcgcaacaccgcaacccacttatataataacaaaaaagcggggggcggagaagggagatatggaataaatcttagcggtaatacaattacggacaatagggtgaatagaagacacgaacggcaatataagagcaagggaggagaacacggggcgaacagaaatgggagacgccgaataggcgatagtctcacgaggtgtggtgcgcaccata

SEQ ID NO: 3266 - DNA, 1767 bp, Glycine max
  misc_feature (14)..(15): n is a, c, g, or t
  misc_feature (21)..(23): n is a, c, g, or t
  misc_feature (35)..(40): n is a, c, g, or t
  misc_feature (50)..(51): n is a, c, g, or t
  misc_feature (55)..(55): n is a, c, g, or t
  misc_feature (57)..(57): n is a, c, g, or t
  misc_feature (73)..(73): n is a, c, g, or t
  misc_feature (94)..(95): n is a, c, g, or t
  misc_feature (98)..(98): n is a, c, g, or t
  misc_feature (101)..(102): n is a, c, g, or t
  misc_feature (160)..(160): n is a, c, g, or t
  misc_feature (215)..(215): n is a, c, g, or t
  misc_feature (247)..(247): n is a, c, g, or t
  misc_feature (285)..(285): n is a, c, g, or t
  misc_feature (343)..(343): n is a, c, g, or t
  misc_feature (359)..(359): n is a, c, g, or t
  misc_feature (409)..(409): n is a, c, g, or t
  misc_feature (469)..(469): n is a, c, g, or t
  misc_feature (489)..(489): n is a, c, g, or t
  misc_feature (512)..(512): n is a, c, g, or t
  misc_feature (522)..(522): n is a, c, g, or t
  misc_feature (532)..(532): n is a, c, g, or t
  misc_feature (571)..(571): n is a, c, g, or t
  misc_feature (598)..(598): n is a, c, g, or t
  misc_feature (630)..(630): n is a, c, g, or t
  misc_feature (636)..(636): n is a, c, g, or t
  misc_feature (857)..(857): n is a, c, g, or t
  misc_feature (924)..(924): n is a, c, g, or t
  misc_feature (947)..(947): n is a, c, g, or t
  misc_feature (1002)..(1002): n is a, c, g, or t
  misc_feature (1006)..(1006): n is a, c, g, or t
  misc_feature (1059)..(1059): n is a, c, g, or t
  misc_feature (1068)..(1068): n is a, c, g, or t
  misc_feature (1100)..(1100): n is a, c, g, or t
  misc_feature (1129)..(1129): n is a, c, g, or t
  misc_feature (1159)..(1159): n is a, c, g, or t
  misc_feature (1232)..(1232): n is a, c, g, or t
  misc_feature (1286)..(1286): n is a, c, g, or t
  misc_feature (1357)..(1357): n is a, c, g, or t
  misc_feature (1421)..(1421): n is a, c, g, or t
  misc_feature (1450)..(1450): n is a, c, g, or t
  misc_feature (1458)..(1458): n is a, c, g, or t
  misc_feature (1460)..(1460): n is a, c, g, or t
  misc_feature (1466)..(1466): n is a, c, g, or t
  misc_feature (1484)..(1484): n is a, c, g, or t
  misc_feature (1500)..(1500): n is a, c, g, or t
  misc_feature (1515)..(1515): n is a, c, g, or t
  misc_feature (1520)..(1520): n is a, c, g, or t
  misc_feature (1548)..(1548): n is a, c, g, or t
  misc_feature (1559)..(1559): n is a, c, g, or t
  misc_feature (1615)..(1615): n is a, c, g, or t
  misc_feature (1638)..(1638): n is a, c, g, or t
  misc_feature (1649)..(1649): n is a, c, g, or t
  misc_feature (1702)..(1702): n is a, c, g, or t
  misc_feature (1707)..(1707): n is a, c, g, or t
  misc_feature (1731)..(1731): n is a, c, g, or t
  misc_feature (1745)..(1745): n is a, c, g, or t
  misc_feature (1749)..(1749): n is a, c, g, or t
  misc_feature (1763)..(1763): n is a, c, g, or t
  misc_feature (1767)..(1767): n is a, c, g, or t
  Probeset Number=SeqID_13045
taaaatataatatnntaaacnnncacaataacatnnnnnnttttattttnngtantnttcatctctgtgcgcncactgtataagagaggggagnnatnccnncaatattgcaggctcccgtgaatctctacatacattccaccgcaccagcgccgtcacnctcttttgtctctcctgatctccagcgcatgcttcctcgcatagttatccattgnggtgtatgtgctagcagtgtgttagtgtggantagtatggatgaggaggttcagggtattggcttagtcncatacgttatctgtcatcgagaccacgattagagctaccgcagagaggtgcgagtctncttcacaggtactagncttcagcgacgtggatacagcatgcgttagcaggtgagactgtcagggantactctaatccgcactcgcgctagataatatcaacgaggagtcaggaggtgcttagagancgctagatctgtagtcttcntctcgacactatatcgtcgctcntagcgttgantatatctccngtatagaacaatagtctagtcgtcaatcatattacgcgncgtgagtagtcctctatgcgtcgtatntcttgaggattctctctagctgcgtgtaagcncctcantctaggcgatatagtggtcggagggcagacagctatctcgtctcacgcttaagagcacagcacgtggccctagtagtctagcacaggagatgtgtgtacgtaggttgcttgtgactaggttctatggtacggtcggctctgtatcgagtcgcgttcacgtttgcagcacatctctcgacagtctccaacacgatatatgtataagccagcacatctcgtcnacgtataggcgagttgtgccggcacatctggatcagacctatacagtgctcttcactcataagagcncacgttctgtcttctaccttagnaactacgccatcgacgctgcgaaatgggagacactcacatgggcactaatatacnaganctatcgactagcggttctaggtagaactgtcgtcatacgtacgttatgccgtntccggttanatgcatcatggcgttccatgatcgtcgagagncactgactgagagtaccgtatatcagcantaccgtcaacgcgagcacaactgtggtgcntccagtctgctctgaagagcccaacgtcctgggagtcgcgtagagtcagcgcgcgacattcttcgctcatcgnctcgctcaacgcgtcaatgatcggcgcgatagtgcacaaatatcacctcagccnctagggccacgaacgcgacgactaacagaacgtctacgagagtgcttcgcgcgagtcgtacaacagtctcnactcctccactgagctctcactctctctgtcactctacctcgctctagatgtgatatgtctgcngttggcttcatcatgcgtatgtcatatgntcctagcngntctccncatcatatgctcgctgcntggactcatgcgagtngtgtcatcatacaancatcntcgagacacactctcatactcactcgcnacgcgcgcatncatagagtctattactctcgccctgacatcagcgatcaatgcctctcacacgagtnacggagtgtcgtgcatctatgtncggtgctctcnctctcatgcatctactagatgtacgatgccgctatgaagtagcacatgcactncgatnatgcgatcgacgctgctcgactgncagtttactccaancgtnagtactgtctgctnacgn

SEQ ID NO: 3267 - DNA, 1849 bp, Glycine max
  misc_feature (1)..(1): n is a, c, g, or t
  misc_feature (49)..(50): n is a, c, g, or t
  misc_feature (179)..(179): n is a, c, g, or t
  misc_feature (201)..(201): n is a, c, g, or t
  misc_feature (203)..(203): n is a, c, g, or t
  misc_feature (346)..(346): n is a, c, g, or t
  misc_feature (483)..(483): n is a, c, g, or t
  misc_feature (506)..(506): n is a, c, g, or t
  misc_feature (609)..(609): n is a, c, g, or t
  misc_feature (800)..(800): n is a, c, g, or t
  misc_feature (850)..(850): n is a, c, g, or t
  misc_feature (900)..(900): n is a, c, g, or t
  misc_feature (905)..(905): n is a, c, g, or t
  misc_feature (1037)..(1037): n is a, c, g, or t
  misc_feature (1071)..(1071): n is a, c, g, or t
  misc_feature (1189)..(1189): n is a, c, g, or t
  misc_feature (1225)..(1225): n is a, c, g, or t
  misc_feature (1237)..(1237): n is a, c, g, or t
  misc_feature (1306)..(1306): n is a, c, g, or t
  misc_feature (1315)..(1315): n is a, c, g, or t
  misc_feature (1322)..(1322): n is a, c, g, or t
  misc_feature (1385)..(1385): n is a, c, g, or t
  misc_feature (1421)..(1424): n is a, c, g, or t
  misc_feature (1454)..(1454): n is a, c, g, or t
  misc_feature (1479)..(1479): n is a, c, g, or t
  misc_feature (1483)..(1483): n is a, c, g, or t
  misc_feature (1485)..(1485): n is a, c, g, or t
  misc_feature (1489)..(1491): n is a, c, g, or t
  misc_feature (1495)..(1495): n is a, c, g, or t
  misc_feature (1498)..(1498): n is a, c, g, or t
  misc_feature (1500)..(1500): n is a, c, g, or t
  misc_feature (1508)..(1508): n is a, c, g, or t
  misc_feature (1510)..(1510): n is a, c, g, or t
  misc_feature (1514)..(1514): n is a, c, g, or t
  misc_feature (1521)..(1521): n is a, c, g, or t
  misc_feature (1525)..(1525): n is a, c, g, or t
  misc_feature (1530)..(1532): n is a, c, g, or t
  misc_feature (1535)..(1535): n is a, c, g, or t
  misc_feature (1538)..(1542): n is a, c, g, or t
  misc_feature (1548)..(1548): n is a, c, g, or t
  misc_feature (1551)..(1552): n is a, c, g, or t
  misc_feature (1554)..(1556): n is a, c, g, or t
  misc_feature (1559)..(1560): n is a, c, g, or t
  misc_feature (1569)..(1571): n is a, c, g, or t
  misc_feature (1573)..(1573): n is a, c, g, or t
  misc_feature (1577)..(1579): n is a, c, g, or t
  misc_feature (1583)..(1583): n is a, c, g, or t
  misc_feature (1585)..(1585): n is a, c, g, or t
  misc_feature (1587)..(1587): n is a, c, g, or t
  misc_feature (1589)..(1591): n is a, c, g, or t
  misc_feature (1593)..(1593): n is a, c, g, or t
  misc_feature (1597)..(1598): n is a, c, g, or t
  misc_feature (1603)..(1604): n is a, c, g, or t
  misc_feature (1612)..(1613): n is a, c, g, or t
  misc_feature (1623)..(1623): n is a, c, g, or t
  misc_feature (1626)..(1626): n is a, c, g, or t
  misc_feature (1628)..(1628): n is a, c, g, or t
  misc_feature (1637)..(1647): n is a, c, g, or t
  misc_feature (1652)..(1654): n is a, c, g, or t
  misc_feature (1656)..(1659): n is a, c, g, or t
  misc_feature (1661)..(1662): n is a, c, g, or t
  misc_feature (1665)..(1666): n is a, c, g, or t
  misc_feature (1669)..(1670): n is a, c, g, or t
  misc_feature (1673)..(1675): n is a, c, g, or t
  misc_feature (1677)..(1679): n is a, c, g, or t
  misc_feature (1681)..(1682): n is a, c, g, or t
  misc_feature (1685)..(1686): n is a, c, g, or t
  misc_feature (1689)..(1689): n is a, c, g, or t
  misc_feature (1691)..(1697): n is a, c, g, or t
  misc_feature (1701)..(1707): n is a, c, g, or t
  misc_feature (1711)..(1714): n is a, c, g, or t
  misc_feature (1716)..(1717): n is a, c, g, or t
  misc_feature (1719)..(1722): n is a, c, g, or t
  misc_feature (1724)..(1724): n is a, c, g, or t
  misc_feature (1733)..(1735): n is a, c, g, or t
  misc_feature (1737)..(1738): n is a, c, g, or t
  misc_feature (1740)..(1746): n is a, c, g, or t
  misc_feature (1749)..(1751): n is a, c, g, or t
  misc_feature (1753)..(1753): n is a, c, g, or t
  misc_feature (1771)..(1849): n is a, c, g, or t
  Peptide Sequence Number=SeqID_6749
  Probeset Number=SeqID_13046
ntcgagtacatcgtatgcatagtaaagaacagtatctattactacgagnnacgagtgtctttatatcataaaagtatcattctgagatttgacatctctgtaaccgtctactacactcatattctcatatacttttaatctcaatacaatccaatcatcatcagtcactctataagatnccttccttgtgtctagattganangttatagcgcgctacacagtgaatcgatcgagacatcgcccgctctgataagcgtatcgtagtgtgtactgaatagtctagcagatattgctcgagtgtgtgtacgtatgtatcgcgtctcgtctatatgcaatacatagtangtgtgtattccatctctcgtctgtggctgcgactgcacatgtcgccatcgttcacctgcgtttcgtgcgtcgaacggctttcttgtatatgtatatgtcatatttacttagatacagtcatcatatgtagatgaggnagatagagattagtgtgtatgtntcaatatggatggtgtagttagtggccgcagagcgcgcgtgcaggacgcgttcgctcgctgtgtgtgatgtctagatggacgtgtgtgtatgatctctagctntgtgtgagatgagttgagcgattgagtgatggtgtagtgatgtaacatattctatgtatacgtgtacgacagaccaatagcggtgttatgtttatactatttagagtagtatattcgagattcactcagaaatcttagtatatttctatgatgtatatgtgtagcgtagtcacagatatgatatagtatantatagattaatgaattgcctcatagatattgagcatatgcaaccgatagnatgtacatagatacgatcgagaatatcacagacatatactgtctaattantagantcagcgcggatagttttgtggtatgcgctcatcgaattgatagatactagactctagagctgtatatgtaatgaattatctattactacgttacgcactgtcttaaatgagtgaaatctctcactcatgaanacattgacagacgactagagtaatactattacanaaacgcaaatatatttatttaggaagacaaccatagttcgcaacacaactatgatcatagttcttctggcattatctacatcacttcatcctctctcgttatatacgcatcacagcantagacgtattgtagagttagtgagagtgcagatagncgcggcattacntgcgcacatattacgatactcagagttatcatgtgtcggtgtatatcggcatatatgattatagagtgngtgtagtanatattgnagcagagtatatcatacgcgtgtgagatgagtaattactatatatgcacagtgcgatccgctngctgcatgcctgtcgagatggcgtatcgcactcgannnncgtgatatatgagtatcgttcgtgtagtgngacgcgtgttagatatattgcacangaanangagnnnacanttncnccctacgngncganacgagcncgcnaggannnggnggnnnnnttgtcnacnnannnccnncacacagannnanatannnatanangnannnangtgnnccacnncacccacnncccggccccnccnantgacgcaannnnnnnnnnncagannncnnnncnnccnncannatnnnannntnnaannaanannnnnnnccannnnnnncacnnnnannannnncncaccacacnnnannannnnnnnaannnanacacaccccaaaaccccnnnnnnnnnnnnnnnnnnnnnnnnnnnnnnnnnnnnnnnnnnnnnnnnnnnnnnnnnnnnnnnnnnnnnnnnnnnnnnn

SEQ ID NO: 3268 - DNA, 2059 bp, Glycine max
  misc_feature (1)..(79): n is a, c, g, or t
  misc_feature (2059)..(2059): n is a, c, g, or t
  Probeset Number=SeqID_13047
nnnnnnnnnnnnnnnnnnnnnnnnnnnnnnnnnnnnnnnnnnnnnnnnnnnnnnnnnnnnnnnnnnnnnnnnnnnnnnntacgggtaagagaagacgacagaaggggagcttctcagtcatttctattaaaccgagatcaaccttggatctttattagggattgaaagccatcttagcaaataaaacactccttactctaaatatacataaattgcctgaaagagctcaattcctttcccccctccagttcatactctattatcggccttcgtttcgttcgttagtttctcagtcgtttgttctgagatcaaccttgcatcaggtgtttctcttcacttcttcttttttccctttcacaaaaacttgaattgaaccatcaacgctcaatgccgaaccctaccaattccttctattcttctattccttcaattttctcaatattaacttgtatttggttcaaccaccatttgtttctccccctttaattcaatattctcttcacacttttttcggtttgaatccttgtgaataattgtttcgcttcaacttaatcatttcaatttgaaataaatagtacactgcgttggattctctaatgttttcataaatttccagggttagggaatggctgctatcttagctcggaaatcactccttgctcttcgtgcgcgccaattggctgtaagcggtcaagggctgcacagctcccaaaactatggccttcgattaagtgcacactcctactctaccaaaagagaggatgaagaaagggagcaactcgcaaaggaaatttcaaaggattggagttctgtttttgaacgtagcatcaacactctctttctcactgaaatggttcgaggtctaatgctgactctgaaatacttctttgaaacaaaagttacaatcaattatccatttgagaaaggccctttgagcccccgtttccggggtgaacatgcactccgacgatatccaacaggagaggaacgctgcattgcttgcaaactttgtgaagctatatgtcctgcacaagcaatcacaattgaggctgaggagcgagaagatggaagccgcaggacaactcggtatgatattgacatgaccaagtgcatttattgtggattttgtcaagaggcatgccctgttgatgcgattgttgaagggccaaactttgaatttgctacagagactcatgaggagcttttatatgacaaggagaagctgcttgaaaatggggaccgatgggagactgaaattgcagagaacctgagatctgaaagcctttaccgctgaaattttccatgtgatccttgcctgttgctttttgggtctaattgggcaatgataaataaaatgaccagtgaatggttttaaagagctgtatgcatacacaattgttacatcagtttttttttttcttttgtcaatgcttgcattgctgttaagtgtacaatattgatgacgtttatctccttgaaatcttgaacaaatgtggaaataattgaatttttcagcaaattgatgccctttcagcatactggcaacttgtaggcttgtagtcataattgatcctttgaaaatggaagcactgatgcagtgcagctttcagaatctaaattcattggggattcggtgaaaaaaaaaaaaaaaaaaaaataaaaaaaaaagcttatcgataccgtcaaacttcttttttttccccccgatacccaaattccccctactagcgaatcaaatttaagccccgcacaactgccaagccccctatcccacccccctcctactaacgcaaccacacacgcaccttcctcctctcctctttctaaccactccttactttcctcctcattacccatttatttccgcctccattacatttattctccaccttctttcgtttaccctactctactaacaccccccacccctctcatgttcatacctataattaatctaatttcctcaaatcaacatttacctcctctcacatatctttttcctacccacccacacaccctctcacttccctacctacacacacttcccaactctcgtcan

SEQ ID NO: 3269 - DNA, 680 bp, Glycine max
  Peptide Sequence Number=SeqID_6750
  Probeset Number=SeqID_13048
gagagggagagcgaaacatacaaaggaattcgagtgaggatctaatcgtccatatctttgacctaaccctagtatcgggggctctgtgccgtcggagcaccctttctgatcggaataagactttatacagctcagttgagtctgtttccttctgaaataaaaaaagggtgatggaaacccagaagaaaactagggaacatagcctacaccatatagttgatgacatcggcgctgcatttggaatgggagctattggaggttctgtggtccacttcataaaaggaacccaaaattccccgaaaggccgtcggtttgttgggggagcacaagctgtgagcatgaatgctcctcgtataggaggtagttttgctgtgttcggaggccttttctctgcgtttgactacacaatggtgtacattaggaagaaggaagatccatggaactctatcgtagcaggtgctgctacaggagggtttctgtctatgcgacaagggcttgctgctgcttcgagatcagctcttatgggagggctcttgcttgctttgatcaaaggggtccattaatgttaaacaagttagcttattggattgtgtttattgagctttctctgctcagtcttggaacctatatactcttttgtttaaatcattctacagtaattcatgtattggtggtatatt

SEQ ID NO: 3270 - DNA, 2070 bp, Glycine max
  misc_feature (18)..(18): n is a, c, g, or t
  misc_feature (51)..(51): n is a, c, g, or t
  misc_feature (55)..(55): n is a, c, g, or t
  misc_feature (58)..(58): n is a, c, g, or t
  misc_feature (65)..(65): n is a, c, g, or t
  misc_feature (72)..(72): n is a, c, g, or t
  misc_feature (148)..(148): n is a, c, g, or t
  misc_feature (165)..(165): n is a, c, g, or t
  misc_feature (231)..(231): n is a, c, g, or t
  misc_feature (273)..(273): n is a, c, g, or t
  misc_feature (285)..(285): n is a, c, g, or t
  misc_feature (303)..(303): n is a, c, g, or t
  misc_feature (396)..(396): n is a, c, g, or t
  misc_feature (467)..(467): n is a, c, g, or t
  misc_feature (512)..(512): n is a, c, g, or t
  misc_feature (515)..(515): n is a, c, g, or t
  misc_feature (600)..(600): n is a, c, g, or t
  misc_feature (626)..(626): n is a, c, g, or t
  misc_feature (656)..(656): n is a, c, g, or t
  misc_feature (719)..(719): n is a, c, g, or t
  misc_feature (736)..(736): n is a, c, g, or t
  misc_feature (742)..(742): n is a, c, g, or t
  misc_feature (762)..(762): n is a, c, g, or t
  misc_feature (778)..(778): n is a, c, g, or t
  misc_feature (782)..(782): n is a, c, g, or t
  misc_feature (809)..(809): n is a, c, g, or t
  misc_feature (963)..(963): n is a, c, g, or t
  misc_feature (978)..(978): n is a, c, g, or t
  misc_feature (1005)..(1005): n is a, c, g, or t
  misc_feature (1300)..(1300): n is a, c, g, or t
  misc_feature (1320)..(1320): n is a, c, g, or t
  misc_feature (1578)..(1578): n is a, c, g, or t
  misc_feature (1605)..(1605): n is a, c, g, or t
  misc_feature (1730)..(1730): n is a, c, g, or t
  misc_feature (1732)..(1732): n is a, c, g, or t
  misc_feature (1735)..(1735): n is a, c, g, or t
  misc_feature (1754)..(1754): n is a, c, g, or t
  misc_feature (1757)..(1757): n is a, c, g, or t
  misc_feature (1760)..(1760): n is a, c, g, or t
  misc_feature (1780)..(1780): n is a, c, g, or t
  misc_feature (1936)..(1936): n is a, c, g, or t
  misc_feature (1950)..(1954): n is a, c, g, or t
  misc_feature (1988)..(1988): n is a, c, g, or t
  misc_feature (1995)..(1995): n is a, c, g, or t
  misc_feature (2027)..(2027): n is a, c, g, or t
  misc_feature (2031)..(2038): n is a, c, g, or t
  misc_feature (2054)..(2070): n is a, c, g, or t
  Peptide Sequence Number=SeqID_6751
  Probeset Number=SeqID_13049
atcacatctcgtctcgcntgtactctcgcttccatatagcacggggagganacancanatcacangtgctancttctacgctgcagcgccgatgacgtgcgcgtggtccgctggtagagtcatcaccatatctgctctactcatccangctcatcagcgcacacnccgcgtctcagactcatctgtatgacgatcagtgcgttgataactcagcgcgctcatcgcgcgctntcgctagtggacggtagtgtaatctatgatggatcagaccgngtcgtggggcgngcgtgcgtgtgatgaagnagtctacgcgcgtgcgcgcgcatgcgcgcgcgacgatgtagtgtctgccgccgtagtcactactacacgtattacatcttagcgttgatgtantattacaggtcgacacgtgctcgcacagctcggcgtgagtgtacgttgctacatactatcgatcgatcatntgcgcctttgcgtagtcccgcaggcacacctctgctctcttcatntantgactcatcgctatagctcgacaatcatacattgtaccttaataacatcactaatacgcgcgaatagcaggaggacactgacaangtgtcaaaagacgagttgcgcgtgcntcgtctgcgcgatgtctatgatctcgagtnagagcacgtgagatatcactattaatgacgcaggaacgccgcaggcgtgatacatagaagagngacagcgccgttgagtncgctgncgcggactgcgtctactctngtagtgtctatgagtntgantcagtgagactaacagatgtgtggcgnggcgtgtgtctatgttgtgctctatagttcagctagaggatgtgatatatcactcagctaccagagtgcgatcgtgtgctatatgtcgctgtacgagtatgtatctcgtttctcgtgcgtctcgtgcggaggtgatgatacatgtatagctcgnagcaggcgactggtnagagcgctctgctatgaccacagcatngcacatgtacactctgtagtatcattatatattcgagtgtcctagtcgacggtagatcgagctgtctatcgtcgtagctagtaggatgtgtcgatacatatacatacgcagtacacgatatatatgcgatcggtccatatcagtcatatgtctctgaccctatatcacacgtacgctggtagcggcggcactcatcatggtaatgatacacacgtcataagtcgtcacaactgaccgcagacgaatgagcgagcgagacacagacacaaacgcgcgagatcatacgctagtagtnagagcgcgcgagcgcgagcnagcgtatagaaatgtcacttccttatctgcccgtcctcacttatcatcgccatagctatatacgtgatgcttcggctatctatacagccgtcgtcctcgagcacatatgtcggcctcaaggaccgaccctacactctgcttcgcgcggctctactctgtatcttagtcccagccatatcctatacttcttttcaattactcttcttgtctctccctctctttggtccatatattattgtcgaggatgtttgttatgtnttctccatattctatgtattacactanttatatatgagtctcaccctagtaccattatgtgcacgtctattcagccgcatcacgcgccgccgtgagtcgtgataggagcgacagtgggataccccgcgctgctggagggagcgagattaagnanagngtgggcgatggtgatgganatntanaactccggcgcgccgtgagngtatatatatttaatcctcattctgttcacaaccgtcgttctcacgttacgcggtggcagaagattctcttctcactcgtcgcctcgcgacgtgagcttcgcgacgttctcatgcgaaaaacgagacgagggtgcaccgggatgagcagagctcanacacagcgagggannnnngtgggtttgtggagtgtatgtgtgtaggtggtgnggtctgnggtgtttgtatgtattttgttgtgggtgtgtntttnnnnnnnnggggggggggaagttnnnnnnnnnnnnnnnnn

SEQ ID NO: 3271 - DNA, 852 bp, Glycine max
  misc_feature (601)..(852): n is a, c, g, or t
  Probeset Number=SeqID_13050
ataactctttcgccgccttgttcctcgtatactcttcgagtcgcttcgcttctcgatctcgatctccgccgtttcagtttgatcatcgatggctgtaccaaaccagcaaaccgtcgattaccctagcttcaagctcgtcatcgttggtgatggaggcacagggaaaactacgttcgtgaagaggcatcttactggagagtttgagaagaagtatgaacccactattggtgttgaggttcaccctctagacttcttcactaactgtggcaagatccgcttttactgctgggatactgctggacaagagaagtttggtggtcttagggatggttactacatccatgggcagtgtgccgtcatcatgtttgatgtcacagcacgtctgacatacaagaatgtcccwacmtggcaccgkgatctttgcmgggtctgtgaaaacatcccgattgttctttgtggtaacaaggttgatgtcaagaacaggcaagtgaaggcaaagcaggttaccttccacaggaagaagaatttgcagtattatgagatttcagcgaagagcaactacaatttcgagaagcctttcctctatttggccaggaaactnnnnnnnnnnnnnnnnnnnnnnnnnnnnnnnnnnnnnnnnnnnnnnnnnnnnnnnnnnnnnnnnnnnnnnnnnnnnnnnnnnnnnnnnnnnnnnnnnnnnnnnnnnnnnnnnnnnnnnnnnnnnnnnnnnnnnnnnnnnnnnnnnnnnnnnnnnnnnnnnnnnnnnnnnnnnnnnnnnnnnnnnnnnnnnnnnnnnnnnnnnnnnnnnnnnnnnnnnnnnnnnnnnnnnnnnnnnnnnnnnnnnnnnnnnnn
